United States Patent Application Publication US 2006/0236419 A1 - sequence listing, part 2

SEQ ID NO: 2669 - DNA, 496 bp, Zea mays
  Clone ID: PAT_MRT4577_76677C.1
cggcctcagtcgcacatatctactatactatactctaggaagcaaggacaccaccgccatggcagccaagatgcttgcattgttcgctctcctagctctttgtgcaagcgccactagtgcgacccatattccagggcacttgccaccagtcatgccattgggtaccatgaacccatgcatgcagtactgcatgatgcaacaggggcttgccagcttgatggcgtgatcgcccacgatgctgccacatgtggcggccttaccgcctgccaccatcgttccatgtgccgccgccggttcgtctgccgcctccaccatgccactaccctactcaaccgccccgggctcagcctcatccccagccacacccatgaccgtgccaacagccgcatccaagcccagggcaactacaagaaacctgcgaacttgacaacaccccgatcctgaggaagaggggcaaggtcctgagaaatcaatacaggccaacaacaacagccta

SEQ ID NO: 2670 - DNA, 1956 bp, Zea mays
  Clone ID: PAT_MRT4577_76736C.1
accgcggggttcatggtaaccagagtgttatttaagactaccaccgtacaaaaaaaaaaaaaaaaaaaaaaaaaaaagaaaaaaaaaaaaaaaaacatcgaggcgggccggcgtttgggctcatatcttcttctcgtccgtctcgcttctctctctcctgaggcgcagcggtggggtggggtggggccgtagggggagcggcattgcgagctcacaccacctgcggcgcggcgatcccgggccaccggctatcgggctatgtgatgatccgggccgtgatctcgacggctattcgcggctgaacgggcggcggcgatgaacggagcgagcgccggcgccggcggggaggcgccgctggtgtacaaggcctggaaggggaacaatgtgtttctactgaaggggaggttcatatttggccctgatgcaagatccctgtttatcaccatgttccttattgtcgcgccggtatcaattttctgcgcgttcgttgccaaggaattgatggataagttctcttatggtctgggattgccggttatgattgcagcagttctattcacagcatatgatctgagtcttctgcttctaacttctgggagagatccagggatcatacctcgcaatgcacatcctccagaacccgaagggtttgatggcaatgcagaggttggggctaaccagactccacccgtgcgtttgccccgagtgaaggatgttgttgtcaacggaatcactgtgaagacaaaatactgtgacacttgcatgttgtacaggcctcctcgttgctcccattgctctatctgcaacaactgcgtggaacgttttgaccatcactgcccctgggttggacaatgcataggacttaggaattacaggttcttctatatgtttgtattctcaacaactttgctctgcctgtatgtctttgggttctgctgggtgttcattattaagatcagaaatgccgagcagataacaatttggaaggcaatgacaaagacccctgcatctattgccttaatcatctacacattcattgcagtttggtttgttggtggcctctctgtgttccatctgtatctcatgagcacaaatcagacaacatatgagaacttcaggtatcgctatgatcagcgagacaacccatacaacaagggagtcatggaaaacatcaaagagatcttctttacaacgatccctccttccaagaacaacttctgtggtagggtcgaacaggagcatggtctgaggccccgtccaacgaatggtttcatgagtccaaacatggggagagctgttggcgacattgagatgggtagaaaaccagtggcttgggatgagcctaggatggcggctgaaattggtgatttaggagcaggtctgagcaacctgttggaggacaaggatggcaggtttcgtaccacatctccagatctcagccgcgacgcccttgcggttggaggaggcttagaagagcacggatcctcggcgatgaaccctgggcgctcaagctggggagttgaagcaggtcgatgatggcaatggcattgaccatgtaaggcggatgtagtgagatgctcagggttgttagtgccagttcgtcgctaatttgttgttttgttggagatttgaggtcactaatgttattagacttatgacctgtatggctgttgtttctggactttcttttcttcttcctcttaatttggggcgtcttccatgtccattgtttgaagcagtcggtttgtgacgtctccagcttggtactgtcaggttttgtctgtatataatcggagcagtaagcctaaaataggtttcggttgcttgggtttggatggtaatggttgtgaacaatgttgaaccttcgcattgcagtaaatgaacatcgtttgatcggagtgcttaaaaaaaaaaaaaaaaaagcgaaaaaaaaaaaaaaaaaaaaaaaccccaagg

SEQ ID NO: 2671 - DNA, 818 bp, Zea mays
  unsure (1)..(818): unsure at all n locations
  Clone ID: PAT_MRT4577_76902C.1
gggccgcctctgaagaagggccctggacgtcggcggaggacgccatcctggtggactacgtgaagaagcacggcgaggggaactggaacgcggtgcagaagaacaccgggctgttccgctgcggtaagagctgccgcctccggtgggcgaaccacctcaggcccaacctcaagaagggggccttcacccccgaggaggagaggctcatcatccagctccactccaagatgggcaacaagtgggctcggatggccgctcatttgccagggcgtactgataatgaaataaagaattactggaacactcgaataaagagatgccagcgagctggcttgccaatatatcctgctagtgtatgcaatcaatcttcaaatgaagaccagggctccagtgatttcaactgcggcgagaatctttccagtgaccttctgaatggaaatggcctttatctaccagattttacctgtgacaatttcattgctaattcagaggctttatcttatgcaccacagctttcagctgtttcaataagcagtttgcttggtcagagctttgcatccaaaaactgcggcttcatggatcaagtaaaccaagcagggatgctaaaacagtctgaccatttactccctggattgagtgacaccatcaatggcgcgctctcctcggtcgatcagttcccaaatgactctgagaagctcaagaaggctctgggttttgactatctccacgaagncaactctagcagcaagactattgcaccatttgggggtgcacttactggcagncatgcncttnntaatggcaccttctctacttct

SEQ ID NO: 2672 - DNA, 275 bp, Zea mays
  Clone ID: PAT_MRT4577_76926C.1
acataatacaagattgtccttcgacaaaataaaaaataaaaaaataaaaccatgcgtggtatttgttatttcagtactatacaaaggtatgctcagttcagtactctagaaccatttagccactatatttacatgaactcgtaaggttaacagtgcccaaaacatactaagttatctcacttaacggcattactacgccaggggatgtgtctaagtattctcctcgagttgccactaccaatgcctcatttcctaatacgcatgaggtactctag

SEQ ID NO: 2673 - DNA, 1004 bp, Zea mays
  Clone ID: PAT_MRT4577_77005C.1
ctggtgggcttctcttgcgtgacctactacacgtcggcgctgctcgcagactgctaccgctacccggaccccgtccacggcgccgtcaaccgcgagtacatcgacgccgcccgatgctacctggaccggaagaacgtggtgctgtgcgggtgcgcccagtacgtgaacctgtggggcactctcgtcggctacaccatcaccgccagcgcaagcatgatcgcgattaagcgcgtcaactgcttccaccgggacggctacggcgccgccggctgcaacccgtcggggagcacgtacatggtggtgttcggtctcttccagctcctgctgtcgcagctgcccagcctcctccgcacgtcgtcgtcctcgtcgcccccgcccaccctggccgtcgcgccgctcaagctcgtcctgcgcaccatcgtcatcatgttcacaacgctcgtcgccatgctggtgcccttcttcaacgccgtgctgggcctcatcggcgcgctcggcttctggccgctctccgtctacttccccgtcagcatgcacatggcaaggctcaacatccgacgcggagagatccgctggtggatgctgcaggccatgagcttcgtctgcctcctcatctccgtcgcagccagcatcggatccgtgcacgacatcgtgcacaacctcaaggccgccgcgccattcaacactgcaaactgattaataaacatgcatttactagtatatatacggatcggatcggaggagtgatgggttaattagtttcttaattagctttggctactatatctatcagtatcagagtcagaggagcagagggccggccacatgcatggcctttttgtgtttcttgattatatatctggcaaatttgatctgtcgagcagattttcatgcatgcatgcatgctgctaattcggacgtacgttgaactagtaataatattattatttgtaatgtaaccccagcaatgcaatgcaatgcaagaagcaacaataatatttgcc

SEQ ID NO: 2674 - DNA, 227 bp, Zea mays
  Clone ID: PAT_MRT4577_77107C.1
gtgcaaacagaagcttgtagcaaatgcccttcttgcggtttcacttgctgtgtgcaaagctctagctatggttaaaatgattactgtctaacagcacattggaaatcttgctgggaacaaaaatatggtgctccctgtacctgccttgaatgcgattaatggaaggtcacatgctggaaacaagcttgccatgcaggagttcatgatcctacctactggtagcctct

SEQ ID NO: 2675 - DNA, 517 bp, Zea mays
  Clone ID: PAT_MRT4577_7710C.1
cccccctctcgagtttttttttttttttttttttttttttttttttttttttttttttttttttttttggggagcaatttatgcaacatgccatcctgctttataattattacaaaagcgacaaacccctccaatcacacgtgaagggggggcccagggtgaaaaaaaagtcttattaaaaggaagggggaaaatgacgaatttaaaaaataatgggaccctttgtcacgtccactcataatatatccaacaaccccccccggccgggcggtttactcgctgcccggaccggaggtagctttcgtgaccccggggaaaatgaccctggtgccaagcagctccttgccgacctcgggggggaatgtgtcgtaccggaggaaaagctcgacgaggaggagcctgccgaccaacaccacaaagtttttcccggggcactgtttgttgccaaccctggggttctcggcctcccggccgttggaccagtacacgtactggagcagtttgctgccctcctcgc

SEQ ID NO: 2676 - DNA, 2004 bp, Zea mays
  Clone ID: PAT_MRT4577_77280C.1
acccgtgcaaccacttcactcatcacttccacttatgttccacattgccgtgccgtgcggtgcgtgaaaggcacggggccgccggccggactcttctgacttggcaaccgccgcgcagcgcgacgagcgccacctgcttgctgccgcgtgcctgcgtgcgtgtgcgtccaccactgaccccgcgcccgcccgccgcccctgcccctccactccacttgctcactcgtcggctcgtcgcggcccgcttcccccccggccaagggatggacgcgcttcgcctacggccgtccctcctccccgtgcggcccggcgcggcccgcccgcgagatcattttctaccaccatgttgttccatacaacgaaatggtgaaggacgaatttgcttttctagccaaaggacccaaggtcctaccttgcatcaccatcagaaattcttcgaatggaaatcctcctattgtaggatatcacatcggtcattaaatacttctgttaatgcttcggggcaacagctgcagtctgaacctgaaacacatgattctacaaccatctggagggcaatatcatcttctctagatgcattttacagattttcccggccacatactgtcataggaacagcattaagcatagtctcagtttcccttctagctgtccagagcttgtctgatatatcacctttgttcctcactggtttgctggaggcagtggtagctgcccttttcatgaatatctatattgttggactgaaccagttattcgacattgagatagacaaggttaacaagccaactcttccattggcatctggggaatacacccttgcaactggggttgcaatagtttcggtctttgccgctatgagctttggccttggatgggctgttggatcacaacctctgttttgggctcttttcataagctttgttcttgggactgcatattcaatcaatctgccgtaccttcgatggaagagatttgctgttgttgcagcactgtgcatattagcagttcgtgcagtgattgttcagctggccttttttctccacattcagacttttgttttcaggagaccggcagtgttttctaggccattattatttgcaactggatttatgacgttcttctctgttgtaatagcactattcaaggatatacctgacatcgaaggggaccgcatattcgggatccgatccttcagcgtccggttagggcaaaagaaggtcttttggatctgcgttggcttgcttgagatggcctacagcgttgcgatactgatgggagctacctcttcctgtttgtggagcaaaacagcaaccatcgctggccattccatacttgccgcgatcctatggagctgcgcgcgatcggtggacttgacgagcaaagccgcaataacgtccttctacatgttcatctggaagctgttctacgcggagtacctgctcatccctctggtgcggtgagcgcgaggcgaggtggtggcagacggatcggcgtcggcggggcggcaaacaactccacgggagaacttgagtgccggaagtaaactcccgtttgaaagttgaagcgtgcaccaccggcaccgggcagagagagacacggtggctggatggatacggatggcccccccaataaattcccccgtgcatggtaccccacgctgcttgatgatatcccatgtgtccgggtgaccggacctgatcgtctctagagagattggttgcacaacgtccaacatagcccgtaggtattgctaccactgctagtatgatactccttcctagtccttgccagcaccagtgacccaaacttggtcggctgagctcagcgctcagcagctttacgtgcatctgcgccttgacttgtgcagtgggcgtcgctagcatgaatgatgtatggtgcgtcacggcctgacggttcgtcagtctgggccgtgttttgtgtccgaggaagatcgtctgtcagagatctggattgcctcgctgctacaaaaaaaaaattaat

SEQ ID NO: 2677 - DNA, 565 bp, Zea mays
  Clone ID: PAT_MRT4577_77291C.1
ctcacacatctattgttgttcaaagcctgtgtgtttactagcaaccaggtagctcgggcggcatagcgcagcctttatgtgggtgggagaagcccaccactttttcaactcaccacaagaaggaccaggagcagcccgccggcaagtacgggtactccgagaccggggtggtcaccgccaccgaccagggcgagtgcgagaggtacatgaaggaggagaaggaccacatgcacaagcaggacctcggggaggccgtggccttcgccgccggaaccttcctactctactagaagcacgaggcgaagaaagaccccgagcacgcgcacaggcacaatatcacggacgatgtcgatgccgaaagaacgtctgtgccggccgctacttttttcacgagcacaacgagaagaagatggaccacaacgaccccgatgaggccatcggtacagaagaaccaccaccacctcttcagatgacactataccagccggctcgcgaccgagctagctaactccggcgcacacaaccacacacatgtttaattgtgaactgcatgcgtgtgtaatac

SEQ ID NO: 2678 - DNA, 400 bp, Zea mays
  Clone ID: PAT_MRT4577_77349C.1
cggactcgtggggggctggcttctcctccccctcttaccaagtactcttcgggtaaggtacttaaggatgtgtggacgggctatggctgcgggtgatgtggattacctctactttgtcagcgggcttgcctatgtcaccactaacgagtcgctggagaatgccttcatctcctacggcgagatcctcgactccaaggtcatcacctaccggaagacggcgaggtctcgcggcttccgcttagttaccttctccttcgataactccatgctcgacgctatcgagaacatgaacggcaaggagctcgacggccgtaacatcaccgttaaccagacccagtctcttggcagtcgcggtggcggtggtggctacagcagcggtcgaagaaccggcggctatggt

SEQ ID NO: 2679 - DNA, 2003 bp, Zea mays
  Clone ID: PAT_MRT4577_77402C.1
acgcgggggcgcacacggcacacacaccacaccacacctcctcgcttgcactccgctcgtctgacatctcgtcccgtcctttcgtttcgaagcctcgcgagccccgacgatggccaccaccgcggtgtcggtcgacgagaagctcgataagcttcgcgccgaggtcgccaagctcgaccagatcagcgagaacgagaagtccgggttcatcagcctcgtgtcacggtacctcagtggggaggcggagcagatcgagtggagcaagatccagacccctacggatgaggtggtggtgccctacgataccgtcgcgtcgcctcccgaagatctcgaggagacgaagaagctgctggataagctcgttgtgctcaagcttaacggagggctcgggacgaccatgggctgcactgggcccaagtctgtcattgaagtccgcaatgggttcacattccttgaccttattgtgattcaaattgagtccctgaacaagaagtatggatgcaatgtccctttacttctgatgaactctttcaacacccatgatgacacacagaagattgttgagaagtattccaactccaacatcgaaattcatactttcaatcagagccagtatcctcgcattgttaccgaggacttcttgccacttcccagcaaagggaaatctgggaaggatggctggtatcctcctggtcatggtgatgtgtttccttctttgaataacagcggaaaacttgacatcttattggctcagggcaatgagtatgtctttgttgcagactcagacaacttgggtgctatagtcgacatcaagatcctaaaccatctgatcaataaccagaacgagtactgcatggaggttactccaaagacgctggctgacgttaagggtggcactctcatctcttacgaaggaagagttcagcttttggagattgcccaagtacccgatgagcatgtgaatgaatttaaatcaatcgagaagtttaagatattcaacactaacaacttgtgggtgaaccttaaagctatcaagagactcgtagaggctgaggcacttaagatggaaattattccaaaccccaaggaagttgatggtgtgaaagtccttcaactcgaaaccgcagctggtgcagctattcggttcttcgacaaagcgattggaattaatgttccccgctcaaggtttctcccagtgaaggctacatctgatctgttgcttgtgcagtctgatctttacaccttggttgatggctttgtcatccgcaacccatccagagcgaatccagctaacccttcaattgagcttggacctgagttcaagaaggttgccaatttccttgctcggttcaagtccatccccagcatagttgagcttgacagcttgaaggtttctggtgatgtctggtttggctctggaattacactcaagggcaaggtgacaattatcgccaagcctggagtgaagttggagattccagatggagacgtacttgagaacaaggacgtatatttttactgaaatgatactccgaagagcacgtatggtgtcttaccgggaggactcattgccgccattctgccacatgcccccggtgctcgagaatattgttatggaaagggcacaaagtggccatattcccaaggtgataaacgccgtcatgcgggacacttttcgagcgaatggcgtttgtggtccgggagaccgggaccttgcggataagttcctcgcctgcttgttcgaatccaaggtgctagatccatcccgaataccagccggcaatcctgttagcactttagctccattctgcgggttgttagactagctctaacaagaaactctaaagagttctgtaccctaaatttagaggatcagatcgttctctatttactccagcagcgtcgtctaaacgatcctctaaatttagaaaacgcttgttggattttctatatatagagtttctttaaacgttaaaaaaaaaaaagaaaaaaaaaaaaaaaaa

SEQ ID NO: 2680 - DNA, 1922 bp, Zea mays
  Clone ID: PAT_MRT4577_77404C.1
ccttcgagtccgccgggacacggcattacggcacacacaccacaccacacctcctcgcttccactccgctcgtctgacatctcgtcccgtcctttcgtttcgaagcctcgcgagccccgacgatggccaccgccgcggtgtcggtcgacgagaagctcgacaagcttcgcgccgaggtcgccaagctcgaccagatcaggcgagtgcccccctcctctccgcactagatctcgccgcccgatcgcttcgcctcccatttttgctgatttctgagtgtgtttttccgcgcagcgagaacgagaagtccgggttcatcagcctcgtgtcacgctacctcagtggggaagcggagcagatcgagtggagcaagatccagacccctacggatgaggtggtggtgccctacgataccgtcgcgtcgcctcccgaagatctcgaggagacgaagaagctgctggataagctcgttgtgctcaagcttaacggagggctcgggacgaccatgggctgcactgggcccaagtctgtcattgaagtccgcaatgggttcacattccttgaccttattgtgattcaaattgagtccctgaacaagaagtatggatgcaatgtccctttacttctgatgaactctttcaacacccatgatgacacacagaagattgttgagaagtattccaactccaacatcgaaattcatactttcaatcagagccagtatcctcgcattgttaccgaggacttcttgccacttcccagcaaagggaaatctgggaaggatggctggtatcctcctggtcatggtgatgtgtttccctctttgaataacagcggaaaacttgacatcttattggctcagggcaaagagtatgtctttgttgcaaactcagacaacttgggtgctatagtcgacatcaagatcctaaaccatctgatcaataaccagaacgagtactgcatggaggttactccaaagacgctggctgacgttaagggtggcactctcatctcttacgaaggaagagttcagcttttggagattgcccaagtacccgatgagcatgtgaatgaatttaaatcaatcgagaagtttaagatattcaacactaacaacttgtgggtgaaccttaaagctatcaagagactcgtagaggctgaggcacttaagatggaaattattccaaaccccaaggaagttgatggtgtgaaagtccttcaactcgaaaccgcagctggtgcagctattcggttcttcgacaaagcgattggaattaatgttccccgctcaaggtttctcccagtgaaggctacatctgatctgttgcttgtgcagtctgatctttacaccttggttgatggctttgtcatccgcaacccatccagagcgaatccagctaacccttcaattgagcttggacctgagttcaagaaggttgccaatttccttgctcggttcaagtccatccccagcatagttgagcttgacagcttgaaggtttctggtgatgtctggtttggctctggaattacactcaagggcaaggtgacaattatcgccaagcctggagtgaagttggagattccagatggagacgtacttgagaacaaggatgtcaatggccctgaggatctttaagcaatgtttgtcatcaccagtttttcccaaggacatgtcacaggaactgccaagcctagtcactcctactgagctctatattttgtaattttcatgtgcattccgattccgctgtgagggtcatgtgagcccgctagagaataattgtaatcttctttgctgcgtctgtacttgtgtttttgtgcgccaggacgtatatttttactgaaatgatactccgaagagcacgtatggtgtcttaccgggaggactcattgccgccaaaaaaaaaaaaaaaaaagcggcc

SEQ ID NO: 2681 - DNA, 2335 bp, Zea mays
  unsure (1)..(2335): unsure at all n locations
  Clone ID: PAT_MRT4577_77406C.1
cccacgcgtccgcgcagaagcaccgaaaggtgtcacctctgctcgccttcgccttcaccttcaccttcaccttcaaatgtgactcggcttggcgcaaggggaatgaactccaggagacaggagcagcaggctcggcggaccatcagagcgctgctggccaagaacggagcgctgtgcacaggtgtttggagatgcaggagcggaggcgcagatatagcctcgcgagccccgacgatggccaccgccgcggtgtcggtcgacgagaagctcgacaagcttcgcgccgaggtcgccaagctcgaccagatcagcgagaacgagaagtccgggttcatcagcctcgtgtcacggtacctcagtggggaagcggagcagatcgagtggagcaagatccagacccctacggatgaggtggtggtgccctacgataccgtcgcgtcgcctcccgaagatctcgaggagacgaagaagctgctggataagctcgttgtgctcaagcttaacggagggctcgggacgaccatgggctgcactgggcccaagtctgtcattgaagtccgcaatgggttcacattccttgaccttattgtgattcaaattgagtccctgaacaagaagtatggatgcaatgtccctttacttctgatgaactctttcaacacccatgatgacacacagaagattgttgagaagtattccaactccaacatcgaaattcatactttcaatcagagccagtatcctcgcattgttaccgaggacttcttgccacttcccagcaaagggaaatctgggaaggatggctggtatcctcctggtcatggtgatgtgtttccttctttgaataacagcggaaaacttgacatcttattggctcagggcaaggagtatgtctttgttgcaaactcagacaacttgggtgctatagtcgacatcaagatcctaaaccatctgatcaataaccagaacgagtactgcatggaggttactccaaagacgctggctgacgttaagggtggcactctcatctcttacgaaggaagagttcagcttttggagattgcccaagtacccgatgagcatgtgaatgaatttaaatcaatcgagaagtttaagatattcaacactaacaacttgtgggtgaaccttaaagctatcaagagactcgtagaggctgaggcacttaagatggaaattattccaaaccccaaggaagttgatggtgtgaaagtccttcaactcgaaaccgcagctggtgcagctattcggttcttcgacaaagcgattggaattaatgttccccgctcaaggtttctcccagtgaaggctacatctgatctgttgcttgtgcagtctgatctttacaccttggttgatggctttgtcatccgcaacccatccagagcgaatccagctaacccttcaattgagcttggacctgagttcaagaaggttgccaatttccttgctcggttcaagtccatccccagcatagttgagcttgacagcttgaaggtttctggtgatgtctggtttggctctggaattacactcaagggcaaggtgacaattatcgccaagcctggagtgaagttggagattccagatggagacgtacttgagaacaaggatgtcaatggccctgaggatctttaagcaatgtttgtcatcaccagttttccccaaggacatgtcacaggaactgccaagcctaatcactcctactgagctctatattttgtaattttcatgtgcattccgattccgctgtgagggtcatgtgagcccgctagagaataattgtaatcttctttgctgcgtctgtacttctgtttttgtgcgccaggacgtatatttttactgaaatgatactccgaagagcacgtatggtgtcttaccgggaggactcattgccgccattctgccacatgcccccggtgctcgagaatattgttatggaaagggcacaaagtggccatattcccaaggtgataaacgccgtcatgcgggacacttttcgagcgaatggcgtttgtggtccgggagaccgggaccttgcggataagttcctcgcctgcttgttcgaataccaaggtgctagttcctatcccgaaataccagccgtgcaatcctggttnagcactttagctaccattcttgcggcgttgttagcactagcttctaactaagaaactgtaatagagtttctgtaccgctaaatttagaaggatccagatacgttctcctattctacttccagcagacgtcctactaaacgagtccttctaaatttgagaagaacgttgttggattttcctatatatagagtttcttt

SEQ ID NO: 2682 - DNA, 2146 bp, Zea mays
  Clone ID: PAT_MRT4577_77410C.1
agcggagcactgctcccagcgctatcactgttgcttgtaggggaaggtttagaggtggccgctgcacccatctcgttaccctaaacgtgcacagtgcaaggggagggggaagggcgcggcatgcgctgaagacagtctgaggcgctgcgggcagtctaacagcaccccctcctcgctcgcactccgttcgtctgacatctcctcccgtcctttcctttctgaggctcgcgaaccccgacaatggccgcaaccgcggtgtcggtcgacgagaagctcgacaagcttcgcgccgaggtcgccaaactcagccagatcagcgagaacgagaaggccgggttcatcagcctcgtgtcacgctacctcagtggggaggcggagcagatcgagtggagcaagatccagaccccgaccgatgaggtggtggtgccgtacgatatcctcgcgtcacctcctgaagatctcgaggagacgaagaagctgctggacaagctcgttgtgctcaagctcaacggagggctcgggacgaccatgggctgcaccggacccaagtctgtcattgaagtccgcaatgggttcacattccttgaccttattgtgattcaaatcgagtccctgaacaagaagtatggatgtaatgtccctttacttctgatgaactctttcaatacccatgatgacacacagaagatcgttgagaagtattccaactccaacattgaaattcatactttcaatcagagccagtatcctcgcattgttaccgaggacttcttgccacttccaagcaaagggaaatctgggaaggatggctggtatcctccaggccatggtgatgtgttcccctctttgaataacagtggaaaactcgacatcttattggctcagggcaaggagtatgtcttcgttgctaactcagacaacttgggtgctatagtcgacatcaagatcctgaaccatctgatcaataaccagaatgaatactgcatggaggttactccaaaaacattggctgatgttaaaggcggtactctcatctcttacgaaggaagagttcagcttttggagattgcccaagtacctgatgagcatgtgaatgagtttaaatcaatcgagaagtttaagatattcaacactaacaacttgtgggtgaaccttaaagctgtcaagagactagtagaggctgaggcacttaagatggaaattattccaaaccccaaggaagttgatggtgtgaaagtccttcaacttgaaactgcagctggtgcagctattcgtttctttgacaaagcgattggaattaatgttccccgctcaagatttctcccggtgaaggctacatctgatttattgcttgtgcagtctgatctttacaccttggttgatggctttgtcatccgcaatccatccagagcgaatccagctaacccttcgattgagcttggacctgagttcaagaaggttgccaatttccttgctcggttcaagtccatccccagcatcgtcgagcttgacagcttgaaggtttctggtgatgtctggtttggttctggaattacgctcaagggcaaggtgacaatcaccgccaagtctggagtgaagttggaggttccagatggagctgtatttgaaaacaaggatgtcaatggccctgaggatctttaagctatgcttgccgtcaccagtttttcccaaggatttgtcaataggagcagccaacccaaatcactcccactgagctctaccttttgtaattctcgtgccattccgctcccgctgtgagggtcctgtgagcccgctagagaatatgactgtaatcttctttggtgcgtctgcccttctgtttttgtgcgccagggacgtatattttgctgaaatgatactaccatagctttgcgtgccggaaaaaaaaaaaaaagaaaaaaaaaaaaaaaaaaaaaagttcggccttgacaacccaacccgaccccaagttcccaacgcagaggatcgaactgaatcctccgcaactcgccgccgccgggaccgaccgacccgatcctatcgatcgaggatgtcgtacgcctacctcttcaagtacatcatcatcggcgacacaggcgtggggaagtcgtgcctgctgctgcagttcacggacaagcgcttccag

SEQ ID NO: 2683 - DNA, 2142 bp, Zea mays
  Clone ID: PAT_MRT4577_77417C.1
gcgttcgccccgcgtccgccccgcgtccgccgagcgtccgcccgggcagcgtcccctcgaggccggccgggacaagatcacttcgggaggcaagtgcgatttcgatctcgcagccaccttttttttgttctgttgtgtatctagtagttggaggagatatgcagtttgcacttgcattggacacgaactcaggtcctcaccagataagatcttgtgagggtgatgggattgacaggttggaaaaattaagtattgggggcagaaagcaggagaaagctttgagaaataggtgctttggtggtagagttgctgcaactacacaatgtattcttacctcagatgcttgtcctgaaactcttcattctcaaacacagtcctctaggaaaaattatgctgatgcaaaccgtgtatctgctatcattttgggcggaggcactggatctcagctctttcctctgacaagcacaagagctacgcctgctgtacctgttggaggatgttacaggcttattgatatccctatgagtaactgcttcaacagtggtataaataagatatttgtgatgagtcagttcaattctacttcgcttaaccgccatattcatcgtacataccttgaaggcgggatcaactttgctgatggatctgtacaggtattagcggctacacaaatgcctgaagagccagctggatggttccagggtacagcagactctatcagaaaatttatctgggtactcgaggattattacagtcacaaatccattgacaacattgtaatcttgagtggcgatcagctttatcggatgaattacatggaacttgtgcagaaacatgtcgaggacgatgctgatatcactatatcatgtgctcctgttgatgagagccgagcttctaaaaatgggctagtgaagattgatcatactggacgtgtacttcaattctttgaaaaaccaaagggtgctgatttgaattctatgagagttgagaccaacttcctgagctatgctatagatgatgcacagaaatatccataccttgcatcaatgggcatttatgtcttcaagaaagatgcacttttagaccttctcaagtcaaaatatattcaattacatgactttggatctgaaatcctcccaagagctgtactagatcatagtgtgcaggcatgcatttttacgggctattgggaggatgttggaacaatcaaatcattctttgatgcaaacttggccctcactgagcagccttccaagtttgatttttatgatccaaaaacacctttcttcactgcaccccgatgcttgcctccgacgcaattggacaagtgcaagatgaaatatgcatttatctcagatggttgcttactgagagaatgcaacatcgagcattctgtgattggagtctgctcacgtgtcagctctggatgtgaactcaaggactccgtgatgatgggagcggacacctatgaaactgaagaagaagcttcaaagctactgttagctgggaaggtcccagttggaataggaaggaacacaaagataaggaactgtatcattgacatgaatgctaggattgggaagaacgtggtgatcacaaacagtaagggcatccaagaggctgatcacccggaagaagggtactacataaggtctggaatcgtggtgatcttgaagaatgcaaccatcaacgatgggtctgtcatatagatcggctgcgtttgcgtctacaaaacaagaacctacaatggtattgcatcgatggatcgtgtaaccttggtatggtaagagccgcttgacaggaagtcgagcgttcgggcgcaagatgcgtagtctggcatgctgttccttgaccatttgtgctgctagtatgtactgttataagctgccctagaagttgcagcaaacctttttatgaacctttgtatttccattacctgctttggatcaactatatctgtcatcctatatattactaaatttttacgtgtttttctaaaaaaaaaaaaaaaaagcggccaaaaggaaaaaaaaaaaaaaaaaaaaagaaaaaaaaaaaaaaaaaaaaatttaaaatgaaaattttagggtgaaaagaacaaagtgtcagaacaaggttaagtaagtaaagggggggccccat

SEQ ID NO: 2684 - DNA, 243 bp, Zea mays
  Clone ID: PAT_MRT4577_77476C.1
agcatgggcctgccttttataattacatatgcgggcaacggatgtgttagttgatgcgatgatggcatacatacatattttgcgtacatacacatgacatgactggattattacatatgtccaacgtatgcgtgagcgcaccccatgatggcatacatacatattttgcatacatacacacatcacatgactggtgaatcatgcaaagatctgtgatctgattctcatgcaagagcaggaacg

SEQ ID NO: 2685 - DNA, 371 bp, Zea mays
  unsure (1)..(371): unsure at all n locations
  Clone ID: PAT_MRT4577_77517C.1
ccgggtctatgtagcgtagtgagtcggaatcggctcgagaagtacaagnttgacaacctgtatggttgccgacactcgctccctgatggtctgatgacggcactgacgtatgatcgcggaacaagctgcgtggtctgcgaatacggtgatgtcggcatggtggtgcgtctgccgtcaagaaggtctgtgcccgtgtcagtttgaccgagatcgacgccatctgtgacctccaggctctgatcggagggtcttcaggtccttcccttggaggacgttgtctctgaagctgacatcttcgtgagcaccactggcaacaaggatatcatcatggttgaccagatgaggaagatgaagaacaatgccattgtctg

SEQ ID NO: 2686 - DNA, 1703 bp, Zea mays
  Clone ID: PAT_MRT4577_77573C.1
cccgctgtcttctagatcaaaagttcggttaaatggttgtcaaacaatggtaggcaacataggatacattaaatttcaaatcaaaacccagtgcatccgagttcaggtcttcaggcttggcaggtgaagatttctcgagaaaaccctggaaacaactggcttccgtttacggaccttgattcccacacctgccatgcccctcaaatgcctggtggttctgctttacgtcatcctgatgaacttccttggtttttcggactgtaaacatgccttcgcatccagaaacctaacaaagacaaattactgattgcatcgtatcagggacaatattgtttctaagttactgagtgtttcttcttggcctccctttccccttccctccctccctctccccgcgggccgccagaggcaatttcgccctcgattcgaccccgattcgtccgcccgcgaccgggattccctccgccaagcgcggatctgaacgctgcgctccgtgtcgccgctcgaatccgccatgaagggggccaaatccaagggcgccgccaaggccgatgccaagtaagaaaaacgaatctccggttctcttcttccttgttcgtcccgtggatctgttccgtggcgtccgaagcattcgatttctgttattatgacatccgccgccgcgagtagattttgacctttttttttcccgtcgtcgttgttttgctgtcgctgtctctgtcgtcgtcgtcgtcgactcgattgctttggcatctgcaggctggcggtgaagagcaagggggcggagaagcccgccaagggcaggaaagggaaggccggcaaggaccccaacaagcctaagagggctcccagcgctttcttcgtgttcatggaggaatttcgcaaggagttcaaggagaagaaccctaagaacaagtctgtcgctgcggtggggaaagctgctggcgacaggtggaaatccctgagcgagtcggacaaggctccctatgtagccaaggctaacaagctcaagctcgagtacaacaaggccatcgctgcctacaacaagggcgagagcactgcagctaagaaggctcctgccaaggaggaagaggaggaagatgaagaggagtctgacaagtccaagtcggaggtcaatgacgaggatgatgaagagggtagtgaggaggatgaagatgatgacgagtgatggagctcctcgagacaatggaccgtgcttcatccaacaatggagcggctacacaaggccccgtggcgatcacaaaaaaggagcctatatccatgtactagaattattcagtttcactccacatcgtgatgttttatttttacttttgtcgtgctataacggatagcgctcctcgttggcgccactggcgggtggttctgcctctggtctggtgtgtttgtgtgtggtcacacttgccagccagcagaggcgcctgcttgtacctagattactgtttccattgtcgtcatcatcggctaacattgtcataatgtcagtttgggtaatgttagattaagtaattattgtgttctgtattcttgttaaaaaaaaaaaaaaaaaaatgtttgcttttacaggtttactgttatctcaatatatgtatatgtactagtgatgtattaaatgtgctaatatgtgatatatatatatatatatagctttttcatctaaaaaaaaaaaaaaaaaagcggcc

SEQ ID NO: 2687 - DNA, 2021 bp, Zea mays
  Clone ID: PAT_MRT4577_77574C.1
gaggttggccgggctttctcgccttctcggcgcgctacgcctacgactgagctgaaagaagcggtagatcggcgttagcggcgagctagggttccggcgagtgcacccaatggcatcggaggcggcgcggcggcggcaggagatggcagaggaggggcaacggcacctggaggagactatcgcagcctcgttccagatcctcgtatccatgaacgacgagctctgcaacgccggcctttggtcctcctcatccgtctcggccaccgctgcggctggctaccagcaccatcactctgctactcttccgaccccacactctgtagattccgacgctgccgacgcagggggcgcgcccagccccggcgggtcgctcgacgaggcgaggcaccgctacaaggcgcctgccctcccctcctgcagcgcccgtcgcctccctttccccttccctccctccctctccccgcgggccgccagaggcaatttcgccctcgattcgaccccgattcgtccgcccgcgaccgggattccctccgccaagcgcggatctgaacgctgcgctccgtgtcgtcgctcgaatccgccatgaagggggccaaatccaagggcgccgccaaggccgatgccaagctggcggtgaagagcaagggggcggagaagcccgccaagggcaggaaggggaaggccggcaaggaccccaacaagcctaagagggctcccagcgctttcttcgtgttcatggaggaatttcgcaaggagttcaaggagaagaaccctaagaacaagtctgtcgctgcggtgggaaaagctgctggcgacaggtggaaatccctgagcgagtcggacaaggctccctatgtagccaaggctaacaagctcaagctagagtacaacaaggccatcgcagcctacaacaagggcgagagcactgcagctaagaaggctcctgccaaggaggaagaggaggaagacgaagaggagtctgacaagtccaagtcggaggtcaatgacgaggatgacgaagagggtagcgaggaggatgaagatgatgacgagtgatggagagctcgctcgagacaatggacggtgcttcatccaacaatggagcggctacacaaggccccgtggcgatcaaaaaaaaggagcctatatccatgtactagaattattcagtttcactccacatcgtgatgttttatttttacttttgtcgtgctataacggatagcgctcctcgttggcgccactggcgggtggttctgcctctggtctggtgtgtttgtgtgtggtcacacttgccagctagcagaggcgcctgcttgtacctagattactgtttccattgtcgtcgtcatcggctaacattgtcataatgtcagtttgggtaatgttagattaagtaattattgtgttcaaaaaaaaggagcctatatccatgtactagaattattcagtttcactccacatcgtgatgtgaaactgaataagtctagtacatggatataggctccttttttgtgatcgccacggggccttgtgtagccgctcctcgagacaatggaccgtgcttcatccaacaatggagcggctacacaaggccccgtggcgatcacaaaaaaggagcctatatccatgtactagaattattcagtttcactccacatcgtgatgttttatttttacttttgtcgtgctataacggatagcgctcctcgttggcgccactggcgggtggttctgcctctggtctggtgtgtttgtgtgtggtcacacttgccagccagcagaggcgcctgcttgtacctagattactgtttccattgtcgtcatcatcggctaacattgtcataatgtcagtttgggtaatgttagattaaaaaaaaaaaaaaaaaaaaaaaaaaaaaaaaaaaaaaaaaaaaaaaaaaaaaaaaaaaaaaaaaaaaaaaaaaaaaaaaaaaaaaaaaaaaaaaaaaaaaaaaaaaaaaaaaaaaaaaaaaaaaaaaaaaaaaaaaaaaaaagggggg

SEQ ID NO: 2688 - DNA, 1127 bp, Zea mays
  Clone ID: PAT_MRT4577_77605C.1
ctctagtgccgccgagacgctttccttccgtctgccgaccgacgcacgcggacgcctccgttcgtactcccgccgcctgtagaggcctcgtcctctcgcccaccggcgaaaaacagttcccctctgccgtttccgggtctcttagtgcaagcaaggaggccgttccacgctcctccagcgagctccgtgctgaagcggcaagcagtagcagcaacaacaacaaagccttttagtcccaagaaagttgagataggctaaagctaaaaacccaagagaacttacaaggcaaggttcgggcacatggatatctgttttccacacactcctattcaagaaagatgattaatcttttcaaaataaagggtcaaaagaaagatgaggcagcaagtgctactggaaaggcccctgttaagaaacagtctgctggggagctccgtcttcataaagatattagtgagctcaacctgccgaagaccacatcaatttcttttcccaatggcaaggatgatctgatgaattttgagatcaccatccgacctgatgaaggatattacatgggaggcgctttcgttttcacctttcaagtgtccccatcttatcctcatgatcctccgaaggtcaaatgcaagaccaaggtgtaccatccaaatattgatttggaaggcaatgtctgtctgaacattctgcgtgaagattggaagcctgttctcaacatcaacaccgttatttatggcctgaatcttctttttacgcaaccaaacgacgaggatcctttgaaccacgaagctgcagctgtcctccgtggcaacccaaagatgtttgaggcaaatgtgaaaagagccatgaccggaggctacgtaggccaacactatttccaaagatgcttggcttgatgtgatggcatcaagccagcgggcccatgtatcagcaccagcgcgcccagctttggaggatttatgtggatttagtgcgcttctggaagcaaaggtcaaatcggtcgttgttgataatgtgatgtacttctttttattttccatgttttagtataaaaatgaactagcaagcgacaaatattcgataacgaggtagtatctgtttgccctgaaaaaaaaaaaaaaaaagccctc

SEQ ID NO: 2689 - DNA, 1179 bp, Zea mays
  Clone ID: PAT_MRT4577_77606C.1
gcgtttgcggttgtcgttgggagtgccgccgagacgctttccttccacctgccgaccgacgcacgcggacgcctccgttcgtactcccgccgcctgtagaggcctcgtcctctcgcccaccggcgaaaaaccgttcccctctgccgtttccgggtctcttagtgcaagcaaggaggccgttccacgctcctccagcgagctccgttctgaagcggcaagaaagatgattaatcttttcaaaataaagggtcaaaagaaagatgaggcagcaagtgctactggaaaggcccctgttaagaaacagtctgctggggagctccgtcttcataaagatattagtgagctcaacctgccgaagaccacatcaatttcttttcccaatggcaaggatgatctgatgaattttgagatcaccatccgacctgatgaaggatattacatgggaggcgctttcgttttcacctttcaagtgtccccatcttatcctcatgatcctccgaaggtcaaatgcaagaccaaggtgtaccatccaaatattgatttggaaggcaatgtctgtctgaacattctgcgtgaagattggaagcctgttctcaacatcaacaccgttatttatggcctgaatcttctttttacgcaaccaaacgacgaggatcctttgaaccacgaagctgcagctgtcctccgtggcaacccaaagatgtttgaggcaaatgtgaaaagagccatgaccggaggctacgtaggccaacactatttccaaagatgcttggcttgatgtgatggcttcaagccagcgggcccatgtatcagcaccagcgcgcccaggtttggaggatttttgtggatttagggcgcttctggaagcaaaggtcaaatcggtcgttgttgataatgtgatgtactccctcagttctttttatttttcatgttttagtataaaaatgaactaacaaacgacaaatattcgataacgaggtagtatctgtttgccctgtgacgtgtttaaaaccggtgaatttggggatatggtggtgtcacaagggaaaatgcttctccaattatatcactcgataaatactaaacgagaaatgggaactggattgtaaagaagatcgcttcttttccagaaaaaacaaaattgaggtggtatctttgattttgtactcggctgtcttc

SEQ ID NO: 2690 - DNA, 281 bp, Zea mays
  Clone ID: PAT_MRT4577_77693C.1
accaataagtaccattttttccttaggattaacttataacaaattctgacaggagtaacagtattcattgatccacagtccatgctgggggggcaggggtttgctggagccggggagaacacaggactaacaactgtctcagagcgaccttgcataaaaaacacagatgggcaacaacaaacgagacgaacgaagataaaccctttggactagggtaaacatcacggctgccaacaggataactgggccgggcgggccccaccggtaagtttcttcagttc

SEQ ID NO: 2691 - DNA, 234 bp, Zea mays
  unsure (1)..(234): unsure at all n locations
  Clone ID: PAT_MRT4577_77815C.1
ggtgggtggaatcttcctaaacgacttgttncattgattcttgtttagttttagcttcttttgcaccacaagggggggggtttttttcaactgcggatcaggcttcaaatgcggctcaagctgcaagtgcggcaagaagtaccctgacctgtaggagacaagcaccgccttgcaggccaccgtcttcctcggcttggccccggaaaagaaggccgctcccaatttcgacaaggc

SEQ ID NO: 2692 - DNA, 401 bp, Zea mays
  Clone ID: PAT_MRT4577_77920C.1
ggaaaaaacttgccccgtttataatcgataattgggggggttttgaagaacaggagttttgaaccctggggcagtttggaggttttacatgactggggaaaaaagggcatgggattggagcttttatgggccctggtactagaaagggtcacatagcaggggtttggaaaaaaactggggatcaccccatcccccagcagggggcaatccggttgccaatggggggggagccttaaacaagcccctgagctggagttagcctagcaatcggaaccctgaagggggggcaagaaacgtaatccagccccgccttcgcaaaaaaggccacagagggggggtctccaccgggttctccacaaaggcccaccttcaagttagggctagctttggggccccttttt

SEQ ID NO: 2693 - DNA, 446 bp, Zea mays
  Clone ID: PAT_MRT4577_77952C.1
aaaaaaagcctccaccctgtaaggggggggccttgttgtaacacgtgtcacgaaacacgacgcatgaactgaattgaacttgggcgaccagaaaaaaaagagcgggctattaatcttttggacaggttctaaagggacacaaaactccgggtccaaaacaaaagggggagccgctgggcttttatacaaagttttaaaaatcgcaaaaagaatgcaattggacagcaataccgtttagggcacaacaagcccaattgaaaagcagttattagctccaactttgccaaaaatacccttactagtaataacagaaagaccactgaataaccccatttttgcccccaggagcttctataaaacagtatatggaggtgaaaaggacattccaatcttccaatgtttacttgagggggtctcttttggaattacttgttggcaccacccct

SEQ ID NO: 2694 - DNA, 305 bp, Zea mays
  Clone ID: PAT_MRT4577_7801C.1
ttgcttcattgatagcacatttgtgttccttctatggctgccaaattatttagcctccttatgctccttggtctgtctgcatgtgctgcttcggcgtccattttcccactatgctcacaagctcctatagcttacgttcttaccccgtacctctcaccagcggagtcttcgagtttgtgattacccaattctccatccctattggttccatctggcattcgctgctggcttcttacctttatcacccttgctgctccaacaatcttctgccctattacagctgcttcctttggggcattttttgg

SEQ ID NO: 2695 - DNA, 237 bp, Zea mays
  Clone ID: PAT_MRT4577_78059C.1
tgaacccttctgcccttcttgaaaaaacaacagttgttggcccgttctaacctgcacgcctagcctaaagctggcacccttttaaaactgcaaaaattgctgccattcaacccacttgctttgaaaaaaccaacagtgttctaacaacaacccatcattggtggtgccctcttttaaaatgcttatgaattataattcaataatgaaaattttttggatagaagtttgtggcttccc

SEQ ID NO: 2696 - DNA, 312 bp, Zea mays
  Clone ID: PAT_MRT4577_78070C.1
tagtgagtcgtattaaagttgattgggacaaatggcaggacgaggatgatgaagacgctggatttaatgactttggtggtatggacttctcgaaactggacataggaggtgctgatgaccactatattggggatgatgaagatgatgtggttgaaagtgctaagaaggatgaagaacgacgtaagacagaacagagcaaggatgaggaagcagctccagctgctgcaaaggaagtgaagccatgaagaatcagttgactttgctcggcgccatgggtgtccacggtatctagctaggcgagacgttcccttg

SEQ ID NO: 2697 - DNA, 1002 bp, Zea mays
  Clone ID: PAT_MRT4577_78087C.1
atctccgacccgatccgacccgacacacaaatatctccacccctgttccggcgacgactacgatttgggaggaaggtaagcgaatgggtgaggaggcggtcgacgactacgagctccacatggtgtgctacggcggcggcggcggcggcagcgaggacgagcgcgtgatggagtgggagtcaggtctcccgggcgcggacgagctgaccccgctgtcgcagccgctggtgccggcgggtctggcagcggcgttccgcatcccgccggaggccgggcggacgctgctggacgtgcaccgcgcgtcggctgccacggtgtcccggctgcgtcgcgcgccgccgccgtcgtcgtcgggcagcggagggagctcctccttcgcgcccttccatccggcggcgaggggggacgaaggggcggactcgtcggcggcgggcggcggggcggcggcgacgacgaacggcaacaataacatgagcagcagcagcaagcggccccggctggtgtggacgccgcagctgcacaagcggttcgtggacgtggtggcgcacctggggatgaagaacgcggtgcccaagaccatcatgcagctgatgaacgtggaagggctgacgcgggagaacgtggccagccacctgcagaagtaccgcctctacgtcaagcggatgcagggcctctccgacgagggcccgtcgccgtccgaccacatcttcgcatccacgccggtgccgcaaagcctggtgcatgaggtgcccatgtacggcaccatggccagcggcggacaggcgtaccacaaccacaacggaatgggaggaggagggtaccagtaccagtaccatcactaccaccacgcccacaaatgactcttctgttggattggatccctcaataatcccatcgatccttttggttttggatctcttgctaattcagttcttcgtgtgagcggtaaatggatctcttttaagaaataaagaaagaaagataagtttcttttcccttttc

SEQ ID NO: 2698 - DNA, 536 bp, Zea mays
  Clone ID: PAT_MRT4577_78147C.1
actttcttatttctgggaagcacacaaacatgaaacaaagaactctattattgaactataactcataagaaatctaaaagagggcaccaccaatgatgggttgatggtagaacactgctaagtttagaaaagcaagttggttgaatggcagcaattgatgaaactgaaagatggtgccatcgttaggcgcatcgtgctgatagaacggcaacaactgtggttgcgtgaagaaggtaatagggctcacaccagctaactgtctgaatggtagtagctgatgctgctgtaaataagcaggagagctcaatgctggcagatggttgaatggaagaaattgctggaggtaggcaacaggtagctggctgaatggtagttgttgctggtgcaaataagaagcataggtcaatgcagctagctggctgaatggaacaaactgctgttgctgagagcatgcagcaaggtttgctagcacaagttggtgtaattgatgtgccctgatgttctgtgccattaaatgcacctaatgtaaccgcgaa

SEQ ID NO: 2699 - DNA, 466 bp, Zea mays
  Clone ID: PAT_MRT4577_78248C.1
gcttgcctcaaaccctcgacagcgctgtcgacctcgcgcggccgccgcaacaatggcgtcccttttcaaggacccgagcaagctgtcggtgtacagggaccggcggttccctgggacgcaggaggagtttgaggcggcgctgctggcgtcgctgacggtgtacgtggggaacatgtccttctacaccacggaggagcaggcctacgagctgttctcccgcgccggcgagataaaaaagatcatcatgggcctcgacaagaacacaaagaccccctgcggcttctgcttcgtactgtactactccagggaagatgctgaagatgcagtaaaatatattagtggcacaatgcttgatgatcgcccaatccgtgttgattttgattggggctttgaagaaggcaggcaatggggccgtggaaggagtggtggacaagtccgagatgagtaccgcacggattatgatcct

SEQ ID NO: 2700 - DNA, 376 bp, Zea mays
  Clone ID: PAT_MRT4577_782C.1
cacgcagccgcagccgccggaagcaagcaagagctgcgactgcgagcaggcttattaagctaagcgacgacctccgttccattgcgaacaggctacatacagatcagagtgaggaagaagaggaagccgaatttcttttcactcttccgactgacctttcgcgggtgcgcacgccacctcgggtcgggagcgcgtcgatcgagtccgtggcggtggcggcgtgggacggtgaccggtaagtttgtacaatataaagcgcggcggccacacagtcacacacactgacacacacacaccagctgggagctccggagatgcaacagcggcgcaagtcggtgttcgcgtccgcgccgttcgcgatgaagcaggcggcgct

SEQ ID NO: 2701 - DNA, 112 bp, Zea mays
  Clone ID: PAT_MRT4577_78338C.1
ggtaatatatattctcgcacgatgggcatctccggctgcggtggctagagcaagctggagagcccgctgctgggcccgtcttctacgggccacggctaggcggtggtgagcg

SEQ ID NO: 2702 - DNA, 865 bp, Zea mays
  Clone ID: PAT_MRT4577_78440C.1
gtccacacttcgcaacaacagaaaaaaatcctttttttaattgaattttttatcaatcaaaatgactgaaacaagagagatcaacgttttcatggccaagctcgctgagcaggctgaacgttacgatgagatggttgaagccatgaagaacgttgctgatttgggacaagaactcaccgttgaagagcgtaaccttctctccgttgcctacaagaacgtcattggtgcccgtagagcttcatggagaatcatcacctctattgagcaaaaggaagaatccaagggaaacaccgctcacgttgagagaatcaaggagtacagaaagaaggtcgagaacgaagtctccaagatctgcgctgatgtcctcggaaccctcgacaacaagttgattccaaacgctcaaaccaccgagtccaaggtcttctactacaagatgaagggagattaccaccgttacctcgccgagttcgccaccagcgaagctagaaaggaagccgccgacaactccttggctgcctacaagtccgccaccgacattgctaactccgagttggccccaacacacccaatccgtttgggacttgccctcaacgcctccgttttctactacgaaatcatgggatcaccaaagcaagcttgcgagttggctcgtaaggccttcgacgacgccattgccgagttggatcaactcaacgaggagagctacaaggactccactttgattatgcaattgttgagagataacctcaccctctggacctctgacttggagggagacaaggccgacgctgaaccagaagccgccaactaagaatcttcctttcctcacacaacactttgtataaatacttctatctttatttat

SEQ ID NO: 2703 - DNA, 1658 bp, Zea mays
  Clone ID: PAT_MRT4577_78450C.1
tcggcttccttggcaccaccgcctcccctcctctccttattaccaccacctagctagcagcggcagcggcagcgccggcctgttgtgctgctcgctcagacagctctgctagctgcatcctcctaattctccaggtctctctctcctctcccaactcccaagtcccatccggatccgagacgctggaggcggagcgcccccccgggacggcggcggcgacgatggggcgcggcaagatcgagatcaagcggatcgagaacgccaccaaccgccaggtgacctactccaagcgccggacggggatcatgaagaaggcgcgcgagctcaccgtgctctgcgacgcccaggtcgccatcatcatgttctcctccaccggcaagtaccacgagttctgcagccccggaaccgacatcaagaccatctttgaccggtaccagcaggccatcgggaccagcctatggatcgagcagtatgagaatatgcagcgcacgctgagccatctcaaggacatcaatcgtggtctgcgcacagagattaggcaaaggatgggcgaggatctggacagtctggacttcgacgagctgcgcggcctcgagcaaaacgtcgacgcggctctcaaggaggttcgccataggaagtaccatgtgatcagcacgcagactgatacctacaagaaaaaggtgaagcactcgcacgaggcgtacaagaacctgcagcaggagctaggcatgcgggaggacccggcgttcgggtacgtggacaacacgggcgccggcgtcgcctgggacggcgcggcggcggcgctgggcggcgccccgccggacatgtacgccttccgcgtggtgcccagccagcccaacctgcacggcatggcctacggcttccacgacctccgcctgggctagcgcatccatcaccatatatgctgggtggtgctgctcgatcctactgcatggcaatgcaagctggttggttagttcgctcatgcatcgtccgtcaacaaagcaagtaagcaatgcaatgcaaccgaggtactgtaatagccaataaaatctactgcatactgcaaacccaattactggtagcttagctaccgcgtgtgtacgaatcaaccgattaattaccgcgccctagcttgcatgtcgtcgtcgtctgtgcttttggcgttcgtagacatgtgtgtattgtatgcatgggtcctgttcatctgcatccatgcatgttgtttatgattgtaattgttgtgtgaaatggctgtactttgttatgatcacgtgaaattatatctacattcgtgagactaaaaaaaaaaaaaaaaaaaaaaaaaaaaaaaaaaaaaaaaaaaaaaaaatggcggtgatatacgccttccgcgtggtgcccagccagcccaacctgcacggcatggcctacggcggctcccacgacctgcgcctcggctaatcgatcacggctattgctcctactagcttatatatcgagtgatcaagttaccacaataagaaaaaaaaatctgtgtgtttgtatttgtgaaatgctgtgatcgatgatgccttatgtcggtctcgtgcacatgattcagttcaatgtgtaattaacgccgtagtgctcgactgtgtattgtattgcatgatgtgctatgactttggttgtgagct

SEQ ID NO: 2704 - DNA, 1668 bp, Zea mays
  unsure (1)..(1668): unsure at all n locations
  Clone ID: PAT_MRT4577_78571C.1
gggtacctcgaggccggccnnnnnnnantttccaaaaaaaaaaaaaaaaaaaaaaaaaaaaaaaaaaaaaaaaaaaaaaaaaaaaaaaaaaaaaaaaaaaaaccggacccacgcccgcgcggacgcgtggacaccaatacactacaccataccagaaggagcaaaaataagacgagatggcggacgagcgcttgcctcaaacggccggcgcccgcacggctctcgccagagctactggatcctcggcacggaaacgcgcccgcgatagttaggtgcgcctgtgggcccggccggctcgtcacttacataggcgcacgcacccccgcctggtgcgtcgtcgatcgctgctttgctggcgcgcggcggccctgtgtggcacagtagaggtctgctgaggacgacgaccggaggcgtgctgcgtggatggtcctcatggccgggatgctccccggcgtggagtgcgcgcggcggcggcgggtccggcagggcggggcggggatgggagcggaggcggccggaggaggcacggggcggcggtcctccttctgcctgtacgcggccggccacggcggcgccggtaattctggcaagcggagcggcggcgtggtgcacgggcacgggtggacgctggacagcaatgcccgggaggccaaggagcggctggaccagaagctcaggaccaagagggaggccgccatcaagaggcaccacagcacggggagcataaagctgggcgtgccgcaccggagcgccggcgcggacgagcgcggcgagagctccgcgccggcgatggccggcgtgcagcgcgaggtgtactcgaagaagggcgtgatgcggcggctgatgcggtggagccggccgcggtgggccgcggcggagcaggcggagtgcgcggtgtgcctggacgagttccgcgcgggcgacgtgctggcgcacctgcgctgcggccaccgcttccactgggcctgcgcgctgccctggctcgagggcacctcgcggtgccccttctgccgcgccgccgtggacgccggcgccgccgccgccgccgacggcgcctagaagcggccgaggctctggtcttgctggggcttgccctgggctgggacggcgcggggcgccttgtcgctgtcggcccacgccagccacgccacccccatggcgttgccacgctaggcagtggctagtgggggtggtcatggtgagtggtgaccggcctgcttgtgcatgtggcgcggagcggaggaggacagcgagacgcgcacgacgaacccgtgagtgccttggcagtttttgcacgctttgcgcgcgcaaaggcacggttggtgcacatttgttggttgggccgtttggcccccctttgccgtgtcctcctcccatcatcgcgagcaagtgatgaacggttttgttttcgtgtttggggagcgctttgtttatggactctggtattagcggatagcggttccatcatgtaattcatgtcaaaaaaaaaagatcgtctgatcgatcttggagaaagaactgtaatttagatcaacatcaatcacatctgtgtacagtctcagtgttgttgctctgaacttgtataattttctgtttgctcagttgaaggtaaatgcagttggaggtgaggtctctttagaacgctaaaaaaaaaaaaaaaaagcggcc

SEQ ID NO: 2705 - DNA, 301 bp, Zea mays
  Clone ID: PAT_MRT4577_78749C.1
gcattacccccttcggtgcaacatctttgcaccgtgcttcaaccaggtgtaccccttccgtcactgacacatctaggctacggttttcggaaatcattatacaatatgtcgtcaggatgttgaaaaagtattttgccttactctgtgaaacaaaacattctttatcacaagtgtgcataaacctgtgagttatatatgggagagtacttttgtgatatattcaaactttatgattatgatacagaccaagggcaggaccattacatcctatgttgcatatccacgttttatgtctaaagaa

SEQ ID NO: 2706 - DNA, 1243 bp, Zea mays
  Clone ID: PAT_MRT4577_78947C.1
cattgggaccctcgaagccggccgggttgatatagtatgtggtagttgaacaaggagcgcgatgatgccgatcatagacttggatccgtgacggtcccactgtcacggatgcccttgttcactcgactaggattctaaagtctaatttaaataatctgatcagataactgggctgcatataaatatagcttggagcaaatctttcagccacccgatccccaaccgcccggcccgacattccctccaaccgccgctgcggctgcgccgcccaccgccgacaggcgacagcatcgacaggcgcagcagtcaacaggaaccgagccatggcgagcgcggatctgctgcggagggaggaggagttctactcctccctgtttgattccgccaaaggcgatggcgccaggtcgcgctcacagctgatcgagaggaagatcgaggccctggaggacatggccaccagggtcagtaaccggagatcgcggaagtggtttaacgaccgtttgctgattgaactcgtcccgcgtctttacgttgaagagatcaaaggcctattcgctcctccgccgtggggtgagcaagtgcccttgtcagcattctacagggcaaatgttggtgaatgggattccttcaggagcattgacatggatgctgaggcaagattgatgcagcatatgaaaaaatcattggaaaaacccaggaatcatgtcgatgaaggggaatcgattgcgctgaatgcttggcatcgaatagatcgacacactagagaagcaataaagagaaatttccttcctgatctgcttggaatatatgaagaacgcgttagggccttcattgaagacgctagtgacaaagatgctcttgtgctgaatgttcaggacccatttcagagactactgctccacggtgtttgtgagttctacaacgtgagctcgacaaccaccagcagtgtgagagaagatgggaggccttggaaggcaaccaccatcaagaagaggcagggcaccggcgttccctctagaatcacactagttagctttctgagaatgaagaagaatggatcgcagtaacgttagttagcgttcaagaatacaacaaaattgctttagattccgtttaggctgttgcaagacaagtgagtggtcactggcaatgtgttcttatatcgcatcagcctgctggctacggtttggaacttcctgacagaaagtaaaaacttccggttctacaaaaaaaaaaaaaaaaa

SEQ ID NO: 2707 - DNA, 2502 bp, Zea mays
  Clone ID: PAT_MRT4577_79089C.1
cccacgcgtccgcccacgcattgggtccctcgagggccgccgggaatgccctcctccctcggcggaaacatccaatccccgggccaccactacctgcctgcccgtgcccacgcttcttctcttctcctccccaagccccagccccagctaccgcgccccctcctgtctgttccaattccaccagcgtcggcctagctacctgcccgtcccctctccgagtacggtcggaagcctcagctgaaggatctggcctgggcgccctccggacgacgggacaggttctgtttggtcttcataaagtagagcactagctagaagacatattcacacgcatcagctatcaaattgcaagcttagaattgacctcaaagttgggacatgcttgtcttaccagaagcaactgatagcttggagttgtagtccgtccggactgtctgctggaccagtatggctgacactccaacttcccgcatggtgcacccctttggcgacgtcccaaggcagactcccaagcaattcctgtattctggtaacccgcagcacctctgccatccgtaccagtcagctccggacacccacgtcgtgccgcagcgccgttacaccgtgaggtctcagtctcactcaccaaataatgctggttctcaagaccatgagactcacaagcagtacacgctggagtcctcagcggcttcccggttgttcaaggcatggttctccctccagccaaagcgtccatgccgggagtggcagccctgtgtctcatgacgacagccactccggctccacgaatggccatggatcacctgtgagcgcgtcgtgtgtcaccggcgaggaccctactgatctcagcagaaactgaaggatcttgaggctgtaatgctggggacatctgagactgaccccgagatagtcaacagtctcgagatctccgcggcaaaccaactctcgttggagcccgaggagtgggagcacatggtgagcatgcccagagggaacctgaaggagctgctgattgcctgcgctagggcagtggaacgtaacaacagctacgccattgatctgatgatcccagagctgaggaagatggtttcggtgtccggcgagccgcttgagaggctgggagcctacatggtggaaggtcttgttgccaggctcgcggcctccggcagctcaatctacaaggctttgaagtgtaaggagcccaggagctctgatctcctctcctacatgcacttcctgtatgaggcctgcccctacttcaagttcggctacatgtcagccaacggcgcgatcgcggaggccatcaagggagaggacaggatccatatcatcgacttccacatcgcgcaaggggctcagtgggtctctctcctccaagcccttgcagccaggcctggcgggccaccgttcgtgagggtcaccggcattgatgattcagtctcagcttacgctcgaggcggcggtctggagttggttggcaggaggttgacacatattgctggcctctacaaggtgccctttcagttcgacgcagtcgctatctcaggcagtgaggtggaggaggagcatctaggcgtcgtcccaggcgaagccgtcgccgtcaacttcacccttgagctgcaccacatccccgacgagaccgtgagcacggcgaaccaccgggaccggatcctgaggctggtgaagggcctgtcgcccaaggtgctcacgctggtggagcaggagtccaacaccaacacggcccccttcgcgcagcggttcgcagagacgctggactactacacggccatcttcgagtccatcgacctggcgctgcccaggggcgacagggagcggatcaacatcgagcagcactgcctggctcgggagatcgtcaacctggtggcctgcgagggcgaggagcgggtggagcggcacgaggtgttcggcaagtggaaggcgcgcctcatgatggccgggttcaggccgtccccgctcagcgcgctggtcaacgccaccatcaagacgctgctgcagagctactcgccggactacaagctcgccgagagggaaggcgtgctctacctcggctggaagaacaggcccctcattgtttcatcggcatggcactagtgttggcctcgtggagaatgttggcctcgtggagaatgtttctggtgactttctacctcgttgttagtatagatatgcttggctgagcactaaaactatatataggaagcctgtggtgatagatactgagttgtagtagaacacatatagcctaaatgcctaatgctgtgatggcagtcactaccagcctagcctagaacaggttgatgatgtgtagtagtaagtttgggtatatgtttcagttaatcagttttgcttgggtgcattctgaagggtggcctcttcaaaaaggacatcaaaccttctaacttgacccttcaaaaataattcaaatagtgagggccgaaaaatcagtatgaaaaaataaaaaaaatcaaataatatggaaaa

SEQ ID NO: 2708 - DNA, 392 bp, Zea mays
  Clone ID: PAT_MRT4577_79171C.1
gccggtaccgatgaactggccgagttctaagtagagaatcggtttttcttgtcagatgccggtgtctgctgcgtctggtggtggttaatgggagaaattcgcgagatctgttccggatcaagcgtgcgagctcgggaatcaagggtttcacacatagcttcgtcgatttgaatttgatgtactaatggagtctaagggtggcaaaaagtctagcagtagtcgttctatgatgtatgaagctccccttggctacaacattgaagacgttcgacctgcctgatgcgtgaaaaatttccaagctgttgcttactccaacttctcgtagaatccattcttgttatccttttggctttctcattcttataattaaagattttttttctgacactttt

SEQ ID NO: 2709 - DNA, 649 bp, Zea mays
  Clone ID: PAT_MRT4577_79229C.1
gatatattctcttctccttcttcttcttgtcctcctccttcgtcttctccatcttcctgtccttcgatccatcaaaagctggccgcggccgagacgacgtgcatagctataaataatagcccatagcatcctcaacaaccagacaagaagtaccacgccgccggttgtttgtttgtttcttccatggagagcacggagctgaaagtggagatggtggcgttgcatgagaagcgggtacgcagatgcctgtccaaagtgaaagggatcgagcgggtggaggtggaggcgagcctgcagaaggtggtggtgacggggtgcgtgaaccggagcaagatcctcaaggcgctccgccgggtggggctgcgcgccgagccgtggtcaccgcacaacgagctgctcagcgcctacgccgccaccaccaccctcgtcttcaacaactcctacgccttcttctgatcaagtcatctcatcctttatagctagatagctattgtaatctctctctctctctgcgtgcttggcttgcttggagtttgttgggaacgtgaacgacggacggcgttccacatgtacacaacatggatggcattttaatctctctctcccttctttcttcttgaaaaaaaaaaaaaaaaaggcccctagggcc

SEQ ID NO: 2710 - DNA, 395 bp, Zea mays
  Clone ID: PAT_MRT4577_7924C.1
acgaggtgtacgcgcgggtgtgggtgctgcccgaggacgaggacgcggagaagcgtgcgcaggcgcgggtccgggacgacgaggacgcggatcgccgcgacggcgaggacggcggcgccatgaggccgctcgcacggacgccgcacatgttctgcaagacgctcacggcatccgataccagcacgcacggcggtttctcagtgccgcgccgcgccgccgaggactgcttcccgccgctggactacagccagcagaggccgtctcaggagctcgtggccaaggatctacacggcacggagtggaagttccgacatatctatcgaggtcagccacgaaggcatctcttaaccactggatggagtgcatttgttaataggaagaagctcatttctgga

SEQ ID NO: 2711 - DNA, 374 bp, Zea mays
  Clone ID: PAT_MRT4577_79371C.1
gacacaggggggccttgccatcaaaaacacagaggggggacaacaaacaccacacgaacgaagataaaccctttgggctaggggaaacatcacgggggccaacaggataacttgggcgcgcgggccccaccggtcaattcctccaattcccgtgggagttcccctaaccccccccaccggtgccacccccctaaccccccccaccaccaccgtagccgccggccccaccggagccgccggcaccgccgaagccgccccccgcatcacggggcccgccaccggcgtaacccccccctccacgggcaccaccggacccaccggcgccgccttcacaggcgcgatgggactgggcctccttgacggggatgttgcgg

SEQ ID NO: 2712 - DNA, 2122 bp, Zea mays
  Clone ID: PAT_MRT4577_79414C.1
agcagaccagtagaccaccgtgcctgtgcctctctctcgtagtcgtatctgcgttgcgccgctgcttaaacaaacgccggacaggggagggccgcggcacgcgtctccagtctccaccctccacggctccacccatctcaaaaccctagcaaccgcgcctccatcggtccatccctaccccaaatcccaatccaagttcggtccccaggcggcgaggaccctcccgcgccgactcgtccccgcagatcggcgggcggggcagattcagattcgggtccgtggttcgctcggctagcctcgccggggtcccaccgcggcggtcggggagcatggtgggaggggggaggcggggaggagcggcggcggaggaggtgaagctcaacaccggcaacgtgttcgcggcgctcgagtccctcaagaagaagaagaagggcgacaagggcagggcggccgggccgtcctccaggaagaagcacggcgcgggggccgcgcagcagcagcaggagccgccgcagaaggatgtcttctgggctcccgcgccgctcaccaccaagtcctgggcagacgtcgaggacgacgacgacgacgactacttcgccaccaccgcgccgccgcgccccgtatgggccgccgccgccgccgccgagcccgccaaggaggaggaggaggacgtcgaggatgctgtccgcgccgcccttcaggaggacgttgagagtgacgacgaggaccttgatgacgaggaccttgatgatggagctgagcatgaagtggaagatgccccagccgaacttgctgtcaaaacagttgaagccctggctgcgccacccaaagatacagaaaggcagctgtctaaaaaggagttgaaaaagagggaactagcagaacttgatgcagtattggctgagctgggactttctgggaactcaaccagcgctgcacaggatgctgagaaggaaggtgccaaccaagctggtgatgcagagaaaaaggaagatgctactgtcccctcagagagcaagacctccaagaagaagaaaaagaaggacaagagttcaaaggagggaagaaaagaaacacaagaagcagccgaggggtcagaggagactgccagtgcaggacctgatgaagaagataccactgctgtggacgtgaaggagcgtttgaagaagatggcttcaatgaagaagaagagatcgagcaaagagacggacaccggtgccaaaatcgccgctgccgaggccacagcaaggagcgcaaggcttgcggcggccaagaagaaagagaagagtcattacaaccagcagcctgtgcggtaaatgggcataaagttttggatttgggtgctctgaattttatatttccttgtagttggactcacaataatacttttttgatctgtcgtatttatgaccgggaagttcctttgagttccatttcagaaaatgaaaaaaaaaaaactcctccattctccaccgcgccccaacctcgaagagttccgaagtttccacaccctcaaagcgaagcagcatgagttccaccggaggcagcggccgtgggaaggcgaagccagcgaccaagtctgtgtcgcggtcttccaaggctgggctccagttccccgtcggccgcatcgcgcggtacctcaaggccggcaagtacgcggagcgcgtaggcgccggggctcccgtgtacctctccgccgtcctcgagtacctcgccgccgaggtgctggagctggccgggaacgctgctcgggacaacaagaagaaccggatcgtgccgcgccacattcagctggcggtgcggaacgacgaggagctgagcaagcttctgggcactgtgacgatcgcggccggcggcgtgatgcctaacatccaccaaaatttgctgcctaagaaggctggtcacaagggggacatcggctccgcctcccaggagttctgaacgcgtcttcggaaggaggagagacgcgtggtgatgtttgggctttgcggttttggggctgttgtcgatgggtttgagactgatggtttgtgggatgtaaacaaatgcagcgcgttgtttcatgaatgaacggatgaagatgaatgatggatagaaagtatttattcatgatttcctccct

SEQ ID NO: 2713 - DNA, 2388 bp, Zea mays
  Clone ID: PAT_MRT4577_79557C.1
ggccgggccgggaaggaatcaaagccaccccagtccgctgcttccattccatctcccttctctcgccttctgcggcactgcagtgctctgctgcctcggcgtctccacctcctcccggcgacggcagggcatccgatacgacgccgcgcttccttccgaatcccaagccgcaccccgcaccctcccggtcgccattcccgatgctggtgttctcgagcgacgacgactgctgcggctcctcgtactaggggggcaggatcgatcggcagactcgcagaactataggatatcacagaacagttcttgaggtacttattgcagcctaatagtacatggagcgatattcagatatgagaccaaaggcagaagtttcatatctcggaaggggttccagattctcttctagaaatcaaagttcagaagagaggactaaccatagcagcgataaaccgggaagcagcacaagattcaatcctacgaaagcgagaattggcggtaatcaagggaggccaagatatgtatgcgattcatttaaatctccaagctcaaaggtgtcgcctgcaggctcttccaaatttccacttagcaagtttgaggagaggcgaagacagccttttgtgccagggtttgacattgctgaaagtagtagaagaaaggctgatgccaagcagctacagggtagtaagaaaattgctgcagagaacgacagttcagacaatctgcgaggtgaatcagaaggttttactactgaacaagtagtaaaaccagaaggctctcatgttgtcggtcattcaggtgtttctgcgtatacagtcgggtccctggtccaaactgcttcactaggttctaggacacacagacagaaacacaaagaagtgaatttgggtactccaggagcatcgtcttcaactctgactaacaggtctactatacctggaaattctaccatgggtgtgaggccagcttatggtcatgttaatggagggcagatacatggtcttaaaaaccttggttgttcttcggtacctgatgctcagccatcaggttgcccatctgagtctgttattagtaggaggaggtttgagttcatgagaaagagggcctttgaccaggaaagctcttccagatcagtgaacttaagcttaggtcattcaactcctacagatattcgcagaatcagaatgaatgaacaatcactttgtcaacaaataccacgaagcagcagcagaagccatcaggaatcggcaggttcagttaggacaagacgaccttctcctcatgccactaggatgagtgttcctgatggaagagcagatggcgtgctttctctgcacgagtcatccacaaaggatgtacagccagctcaggaacatctttcattggaagaagtctccactgagagttcaataaggccattctttgtggaatttgataataacattttctcgtctagtcatcttcgtcgctcgagtactcgagctgaaaggggaagaccaagctccctttttgaagaaagtcctcgacaaatgttccatagtctcatgggggagagggacagacatagacacataaccatggaaggaattacagaggttttggctgcattggagaggattgaacagcaagcagagctgacctatgatcaattgctaatgctggaggctaatctattttttggcgcctttgcctcctatgatcggcatagagacatgcggatggatattgatgatatgtcctatgaggaattattggccctggaggagagaataggctctgtgagcacagctctttcagaggagcagttcacaaaatgcctcaaaagaagcatatatagtcaggtcgctctagaagtgaacaaatcaaccgttgatgacatgaaatgcagcatctgtcaggaagagtacgcggagggcgaagaggttgggaggctgccatgcgagcaccggtaccatgtgtgctgcataggccagtggcttgggcagaagaactggtgtccagtatgcaaagcgtctgccgtgccttccaagggctgaagcattggggatgctggaaaccccgttccggattacaaaccatccttgcttttgtctacgtacattgttcttttccctatatgcattagatatagatcatgtctagatgtatgacgctagaacagcttgcgatttgggaggaagctaagagagtaatagttagctggttaataatagttcatagctaatatttgctagataactattacttggctacctattagctgtgcctttcacattgtggtacaggacaaatgcttgtcagatcgtgaacaaccttataacttgatgaatggcctaagtcaaagaggaatatgttgtgcctatctcatattgcgaaaaaaaaaaaaaaaaa

SEQ ID NO: 2714 - DNA, 263 bp, Zea mays
  unsure (1)..(263): unsure at all n locations
  Clone ID: PAT_MRT4577_79616C.1
cacacacgtacgcacacgcatacgcacacgcatacggctgaactgagctgagctcaccaccacctaacacgggagatagctatagctagcatagcaagccagcaagtcagcgacttagcagcagctaactagccatgctgccgtccttcgtgtcgccgacggcangctgcgcggcctcggtggcgcctccgccgcggccgtttccaggcagctacggggcaccggtgctgggcccgctacgggaccggctcgacttcttctgg

SEQ ID NO: 2715 - DNA, 676 bp, Zea mays
  unsure (1)..(676): unsure at all n locations
  Clone ID: PAT_MRT4577_79625C.1
ccggccgggaccttcaaagttcactttcaaaccccttcatctagtacagtcagaatgcctgagaccgttggagagaacggcaacgccgctccaggccgcctgctactgctttccaaccgtttgcccatcaccattaagcgatccgaagatggaagctattcattctccatgtcttctggtggtctggttactggactgagcggcctcagcaaaaccaccagctttcagtggtatggctggcctggtctcgaggtccctgacaacgaagtcgagggcatgaagcaacgactaaaagaagaatacggcgcacacccagttttcatcgacgatgagcttgcagacagacattacaatggtttttcaaactcgatcctctggcctctattccactaccaccctggtgagatcacattcgacgaatctgcctgggctgcataccaggaggtcaaccgcctcttcgccaagactgttatcaaagatgttcaggacggtgaccttatttgggtccacgactaccatctgatgctgcttcctcagatgcttcgtgaggaaattggcgaatcaaagaagaatgtcaagattggtttcttccttcacacaccattccctagcagtgagatctaccgaattctgcctgtacgagaggcactcctgactggcctnctcgactgcgatc

SEQ ID NO: 2716 - DNA, 327 bp, Zea mays
  Clone ID: PAT_MRT4577_79648C.1
ttcacgcgtacgtccacccagaactctatcagggttgcccaatggatgcttgaaactactggcgcgacaagtttcatgggatgcattggaaaggacaagtttggtgaggaattgaagaaaaacgctcaagctgcaggagtgactgctgattactacgaggatgatactgctcctactggcacatgtgctgaatgtgttggtgctggtgaatggtcattgattgcaaatctgttagaggcttactgtcacaaatatgaacatctaaagagaccagtgaactgaacgctagttgtcatggccagtgacatatacattgctggatttttg

SEQ ID NO: 2717 - DNA, 273 bp, Zea mays
  Clone ID: PAT_MRT4577_79789C.1
aaaaaatcgaaaaaaaacaaatcccgttcatatacacaaaatgggctcacagatctttgtccatacgtgcatcctgattgtggaagcacgcagctgcccacctagggctgcatacttacttattcagactgatccagcttgtgggaccatcgtaagttcacatgcttacagacgacaaattttcataccactagcctgtcttgtctgcttcacagattaaccaaacgacaacctcgaatttgcggcgttttaaaatatacagctcacaagcaa

SEQ ID NO: 2718 - DNA, 3181 bp, Zea mays
  Clone ID: PAT_MRT4577_79924C.1
ttgggtacctcgaggccggccggcgttgcggacgcagccacgcaggcgcaggaggcaagacgggacctcgccctcccccgccttgcctttgagtgcttccactccacctcatcagtcgccgcccccgccccgccgcgccgcgggcccctccacctaccctcggcgcccgcccttcttggcccagcgcccctgcacatctgcctgccccccctcggccgccggcggcggcgatcgcgggtagccgccccaaccggccgaggttgcatagaggtgctggtatcttactctgcttctggttatgctatctgcctatgacttcagcttcccaaacttctccctgcttcttgcccctggttggtaaaaatctgtaacaactgctgccctgactgcaaaagacgcaactatgcgtctttcttcttctcttcaagatttgccgaccttcaccagaattgatgctttggaaaggggttctagcgtaggcagtgatctgagctcagggcgcccaaaacctgtccgcatgcttcaaagagatggtgccgtcgcaagcttttcaaaagaaagaacacccccctcatcgccgacaaatagaaagaaatgcatgagagcagccggatgtgctattgcattgatcttactggtgttctttgcgtatggttcatggagatattttcatgtgttcctctctgaaggaagatctgaatactatgttgttcttgattgtggcagcactggtacgagagtttatgtctatgaatggcatattaatcataatgacgcaaatgcatttcctattgttttgaaacctttagggaatgctcccaagaagaaatctggtaaattaacccgactatatcagcgaatggagacagaacctggattgagcaagctcgttcacaatgaatctggattgaagaaggcaatagagccccttcttcagatggctgagaaattgatccctagacatgcacacaagcacactccactttttctatatgctactgctggtgttcgcaagctacctagtgcagattcagagtggctcctggataagtcctgggatatcctgaacaattcatcatttttatgtagtagagatagagttaagatcattagtggcatggatgaagcttattatggatggatagctcttaaccacaacatggatatgcttggcacctcatcatctaaaatgacatatggttcacttgatttagggggatcatcattacaggttacatttgagaatgataaatcagtgcaggatgagacaagcattcgtctgagtattggttcagttgaacatcacctcagtgcttattctcttactggttatgggttaaatgatgcatttgataaatctgtagcacatctagtgaaaagactgggaggagttgctagcaatggcaaggttcaagtcaaacatccctgtctacagactggattcaaggaagattatatttgttcttactgccatccattgaaacaagatggaagtcccagtgtcggcgagaagaacagtggcaaagagaagcagggaatagctgttgaactggtcggagcacctcagtggaatgaatgtagtgctcttgcaaaagtaacagtcaatctttctgagtggtccagtgcaagtccagggcttgattgtaacatccatccttgtgctcttgcctctaactttccccgaccatatgggcagtttttcgctatctctggcttctatgtggtttttaaattttttaatttgactgctgatgcgactctaggtgatgttcaaaaaagaggtcaggaattttgtgaaaaaccatggaaagttgcaaagagtagtgttcctccacagccttttgtagaacaatattgcttcagagctccttatatttcatcactactgagagagggattgcagattaaagatagtcaggtgataattggctctggcagtattacttggactcatggagttgctttgctggaggctggtcaagcattgtcttcacgactagatattcaaggataccgaatactgcacagggagataaatccaaatattctcatagtactgtttctgatttcaattgtgttggtcatatgtgccatactatgcgtcagcaattcgataccaagatcattccgcaagtcttatctgccaattcataggcataattctggaggcagttctgttcttggtatgggattgcctttcaaacatttattatggaatcccattagttcaggtgatggtagaacaaagacaccactgagccctactgttgctgggtcagatcctcatccatttgcaggattaggaggcagcagtgtcgagcttatggagtcctcgaggcaatccttgggtgcctatcacagctattctgttgggagcttaggtcagatgcagttttctagcggggtgaggaaccctagccgaggtcagactacacttcaaagtcggaggtcgcaatcaagagaggatctcagttcttcacttgctgatattcattttccaaaagtgtagcactgcatcaaggaatgactagaatgagatccttacatgccataacaaactctgtaaataatagctccagagttcgaactgcttgatttcttctctaatcagaagtcaattttgtctgtccgcttacacttcaatgaggtttaggattcatataaatgaacttatgacttgtgcctatcctggacatgatacatccattcatcccattgtatgtgctcaagaacataccatagcagtgaagttctggtagtgtactggaagatatatttatgccgttcaccagactggttgaccatggctacagcctacaactttatagatcgattgtgctgcaatcagggatgttatttttttgtatctgagacataataaaggtgcatgtggtctcatgtactgttgtaccctctaggctctagtggctctgtgaggttactcttctttcctggaataccttttgataggctactctgtggtatcaactgaaatcatgaaacactgacatcagttctactggattatctagttgcgtactgtgtatacacatctattgagttttttttgttggcatagtaaaaaatttgatgacactgaaaatcagtataggaacatttgggccaatgtttttcctcgttgagctgagtttgatctgtattgcacatttgcttgtggatc

SEQ ID NO: 2719 - DNA, 3808 bp, Zea mays
  unsure (1)..(3808): unsure at all n locations
  Clone ID: PAT_MRT4577_79974C.1
ggccggccgggaacagaacccaaacctcgccgattcgctccccttcctcaccgcgcgcgtacgccgccgctgcgctcaccttaacgaaccctaaacctgagccaccgccctcccccggaggtccgccgctccgtgtgggactctaggcgtcgccggagccccctccaggggctagcggcggaggaagtcggaaaccgattacccctcccctccccttaccgggggagggagaaactagcggaggaggcgaatcaggtcagagtggggcacgatgaggatcatgatcaagggaggcgtgtggaagaacacggaggacgagatcctcaaggcggccgtgatgaagtacggcaagaaccagtgggcgcgcatctcgtcgctgctcgtccgcaagtccgccaagcagtgcaaggcccgctggtacgagtggctcgatccgtccatcaagaagaccgagtggacaagggaggaggatgagaaattacttcatcttgctaaactcatgcctactcagtggaggacaattgcacctattgtaggtcgaacaccatctcagtgtcttgaacgttatgaaaagctgcttgacgccgcatgtgcaaaggatgaaaattatgaggctaatgatgatcctaggaagctgcggcctggcgagattgacccaaaccctgagtcaaagcccgcacgtcctgatcctgttgatatggatgaagatgaaaaagaaatgctttctgaggctagggcccgcttagctaacactaggggtaaaaaggccaaacggaaggcaagggagaaacaacttgaagaagcaagaaggcttgcttcactacaaaaaaggagagaattgaaggcagctggtattgatacacgccacagaaaaagaaagagaaaggggattgactacaatgctgagattccatttgaaaagagaccaccttcaggtttttatgatactgttggtgaggacagaccacctgaacatgtacagtttccaacaaccattgaggggcttgaagggaagagaagagcagatatagaggcacaattaagaaaacaggatattgccaggaacaagatcctgcagcgacaggatgcccctgctgctataatgcaagcgaataaactaaatgatccagaagctgtcacaaagaggtcaaagctaatgctgccgcctcctcaaatttctgaccacgagctagaggagatagcaaagatgggcagtgctggtgatcctgctttagctgatgagcttggtgaaggaagcactgccacaagaaccttgcttgccagctattctcagactccaaggcttggtatgacaccattgcgaactccgcagcgaactccagctgggaagggtgatgcaatcatgatggaggcagaaaatcttgcacgtctcagagaatcacaaacgcctttattaggaggtgataacccagagcttcatccatcagatttctctggtgttacaccacgcaagaaggagatacagactccaaatccaatggcaacacctttagcaagccctggccctggtatcactccaaggattagtatgacaccatccagagaggggcacagctttggtttaacaccgaaagcaactcctcttcgtgatgaacttaacataaatgaagtggaaatgcaggacaacactaaacttgagcttcgtaggcaagccgaactgaggaaaagcctgcgatctggttttgcttctattccacaaccaaagaatgagtaccagatagtcatgccacctattacggaagatgagaaagaagaagctgaagagaaaattgaagaggacatgtcagacagactggcacgagaaagggctgaggaacaagctaggcatgaggcattgctcagaaagagatccaaagtgttgcagaggagtctgcctaggccaccggctgtttcagtagagattatccggcaatctcttattagaagtggagaaagcagaagcagaagcacctttatgcctcctacatcacttgaacaagctgatgaactaataaatgaggaactccttaggcttcttgagcatgataatgcaaaatatcctcttgatgaaaaaactcaaaaagagaaaaagaaaggaagcaagcgtcagcaaaatggaggacctcttgtccctgaaattgatgattttgatgaagatgaactaaaagaggctagctctatggttgaagaggagattcaataccttcgagtggccatgggtcatgaaaatgaatcttttgaggacttcgtgaaagcacatgatgcatgccaagacgaccttatgttttttcctaccagcaatagctatggtttagctagtgtggctggaaatgctgataagatttctgctttgcaaaatgagtttgaaactgtgaagaagcgaatggatgatgaagctaagaaggcttctcggcttgagcagaagattaagcttctgacacaaggatatcagatacgggctggaaaactgtggtcacaggtccaagatacattcaagcagatggacactgccgcaacagagctcgaatgcttccaagagctgcagaaacaggaacatctcgctgcttcatatcgaatccaaaatttgtctgaagaagtgagtaaacagaaggcactagaaaggaccctccagagccgctacggcgagctggtttctggtttccagaggatccaagaacaggtcgaggagcacaagaggcaactcaaggtacaagaggcggtagaagccgaaagtcacgctcaggaagaggaagctgcggcatcaaatcatgctgctgctgaggaagaggatgaaaggaaggaagatgatgaaaggaaggaagaggatggaagcaagtctctcagctctgaagagaaaccacagcagacaagtacggctaccgatgaagaacctgcaggaagcaaaggaaccaccgaggatcagatggacgtggacagcgggaatggagagggtggagttgtaggccctgtcccaccagcaccagacactgaagggggtaatgatgaagtatcagttcaagagatcagtgaagcccagcccttgccttgaagacggcgctcctttcccttcaagctccgctttcttctcccgcacctggcgatcttcacgatgttgttgttgcacagcaggtccggactgagtatttcctatttggttatatttttagtgcactataatatcgcaagcgaagctacaattggttgtgagctaaatttgcatatccttccctttgttgtattcccttgaacaatgaatcagaacaactgtttaccatttttctaaaggatcgacggcttatgtactcatgcagaactgcctcattgtgcctctggctgaatagcagccaagtaagcgtgacatgctctttgttcatttagtatggtccacaatgctttatggaaaaaaaaaaaaaaaaaaaaaaaaaaaaaaaaaaaaaaaaaaaaaaaaaaaaaaaaaaaaaaaaaaaaaaaaaaaaaaaaaaaaaaaaaaaaaaaaaaaaaaaaaaaaaaaaaaaaaaaaaaaaaaaaaaaaaaaaaaaaaaaaaaaaaaaaannnggggggggnannnaaaaagaaaaaaaaaataannnnannnnnaaaaaaaaaaaaaaanttttttttttnnnaaaaaaaaaaaaaaaaantggggntttttttaaaaaanttnaaaaggaaaaaccgggggggtacccaaaaattgggggtgggaaaaaaattcccttttgggaggggggggaaaaaaaaaaaagccccccccccatcccccccccaaaaatggccccccccgaaggggaaatgggccccccc

SEQ ID NO: 2720 - DNA, 2289 bp, Zea mays
  Clone ID: PAT_MRT4577_80047C.1
atataatgcgttattatcctccaccagagagagccgacgatgtccatccatgtaggcatgtagctgcagcctgcaggccccggcctctctacacacacccgtagcggagatcatgagcagcgcgcgccaagccatcaccccgtggccaagcttaaagaaacctcaccatgtgtccctcggtccctcccggtttaaggatgccgtcaattgtttagaaaccacacggctgtccctgtcgctggctaagtggttggagtgctgactagttagtgccagattagacgggcaagccatcagcagccaatgcctccgtgctgttgttgttgttgttgcatgttgttgtccattatttagctgctttgcgcgcgtgcagacaccgagctacctataggccataggctatagcaagctccgccgtcgccattgctacacaccaatctttcctgccgcggtgccgcctctcgtccatggcaaagggagcgggagctagctgacggccgcgcgctttcgtcttttgtcctttaatttcgcagcattccgcgcgcttggtctctcggaggcgtggcggtagcctgtgccggtgtgcctcggagctccggcctccgggaataaacataggggtatcgccatgcaggcggcggccaagacgaggaatggctccttggaacaccccacccggacgtcctccctgggcggtctcgaggccggccggacggcgaggatggccgagtcgcccaccggcctcagccccaaggtcgaccgccgcacggcggtgagcgccgagagagagaaaaggaggccaccgacgacgaagctatcggagctggagtcccagctgtcgcagctgcaagacgagctcaagaaggccaaggagcagctccattcctccgagctctccaggaagcgggccctgcaggaggtggacgacgccaaggcgcaggccgccgcggcgtccgcgcaggcgcgcgacaccgaggctcagctcgccgagctctcgtcggccgaggagtcccgcctcctggagctgcgtcgtctgtcgcaggagcgcgaccgctcgtggcagtcggagctggaggccatgcagaagcagcacgccgcggactcgaccgcgcttgccgcggcgatgggcgaggtgcaccgcctccgcgtccagctcgccgccacggcgcgcgccgaccgccggcaggacgtggtggaggcgctggccaccatcaacgagctcagggccaagctcaaggcaagcgaggaggccgaggcgcaggcgcgcgcgatgcacgaggagtgcaagcagcagctggaggcgagccgggccaccatcgattcgctgctcaccgacgggtccaagctgatggactcgttcagcctcgtggtgaaggagctcgaggagtcgcgtgccacggtcaaggctcttgaggacgagatcgcggagacgtcgtcgagggccgcaggcgaccactgcagctgctcgggctcggagtcagaggcctccgagctgagggcggagctagaggccgcggaggccaggtaccaagaagagaagatccttagcactgtcgagacgcagtgcgcgtacgagctcatggaccagataaagacagagtccgacctgcggcacggcaagctcgcggcggcgctcgagggcgccaagtccgaggtcatcttcctcaaggcgagtctgttcgacaaggaatccgagctacgtagtgccctggacgcgatcaagaagctacaagcggagacgagagcagacggctcggccgacgcgctgaagcagcagctgcagtgcgcgctgcacgagaacgggcagctgaagcaggagttgcaccagtacgagtccgagaagggctccgcgaccgcgaggacggcggaggccgacgcgtcggaagcggcgaagaagggtgagatggaaaccgagctgcgccgcctgcgggtacaggccgagcagtggcggaaggccgcggagacagccatggcgctgctgacggttggcaagggcgggaacggcaagttcgtggagcggagcgagtcgtgggagggcgttaagtacgcgggcctctgcgaggaattggacgacgacgcggctgtcaggaagaacggcaacgtgctcaggaggatcagcggcatgtggaagaaatgagtgcgatcgggcagctgagcggcggacgcggcgagggctgtactgatctgtagccttgggtctctctggtgtaattgttttttttaaaaggaggatgaccctatggttttagaaaaagaaaggtaacaaatataatacatgagttgccagtg

SEQ ID NO: 2721 - DNA, 360 bp, Zea mays
  Clone ID: PAT_MRT4577_80122C.1
ttgttttaagattctagaaatgaacttttcaatttcagggatggctcaaacatccgatgaaaaactttattattgctctataactaataagaaagctaaaagagggcaccaccaatgatgggatgatggtcgaacactggtgggtgtgtaaaagcaagatggttgaatggcactaatcgttgcaattgtaggagggtgccagcgtgaggcgcaacgtgctggtcgatcggaaacaactgtggttgtgataagaaggctgcggggctcacacctgctagctggctggatggtaatagatgttgctgctgtcaataaacaggcgagttcaatgctgctcgctggtggtatggaagaaattgc

SEQ ID NO: 2722 - DNA, 986 bp, Zea mays
  unsure (1)..(986): unsure at all n locations
  Clone ID: PAT_MRT4577_80301C.1
ccgggaaaacgatgaagaaaagctccgtgacgcatgggtccgtcacgttgtcaccttctcaggtgattcgagcacctctgagcttatcacaattcactccactcatcttttcgcgtttagaacctctaaaatttcccccactcgccagtcgcagcagcacctgtagccatggacgccagcggagccggtagcaaggggaagaagggtgcggccgggcgcaaggcaggcggccccaggaagaagtcggtgacgcggtccgtcaaggccgggctgcagttccccgtcggccggatcgggcgctacctgaagaagggccggtacgcgcagcgcgtgggcactggcgcccccgtctacctcgccgccgtcctggagtacctcgccgccgaggttctggagttggcagggaacgcggcgaaagacaacaagaagacgcgcatcatcccgcgccacgtgctcctggcgatccgcaacgacgaggagctcgggaagctgctggcaggcgtcaccatcgcgcacggcggcgtcctccccaacatccactccgtgctcctgcccaagaaggcggcggagaaggcggccagcgccggcagcaaggagcccaagtcccccaagaagggcgccaagtcccccaagaaggcttagaaagtagggacttcatttgcactgtgtgctgtagcatgctcgtgtctagatctgtggatgggatgtgtcctgctctagtttcgtccttgtgtcttattgtatgttcgtcttcatcgagaagatcttcagcaatcagagctcgttgtgtactaatgttccccatgttctgtttctcgttctgattctgcaattcgtcatattgttgaatttaatggttttgtggaatcactaaaaaaaaaaaaaaaaaaaaaaaaaaaaaaaaaaaaaaaaaaaaaaaaaaaaaaaaaaaaaaaaaaaaaaaaaaanaaaaaaaaaaaaaannnnttttttttttcccccttgct

SEQ ID NO: 2723 - DNA, 1964 bp, Zea mays
  Clone ID: PAT_MRT4577_80303C.1
gcacgaggatggtcagataggggtatacaaaggaacacctgctttgatgctcacgggcactgcagcgaggaggtacagccacaagtacaaagcacgattagacaattttttttgaccccattgcaacatttcacaaatttgctctcatcaagcaagagtcgtttagaacctctaaaatttcccccactcgccagtcgcagcagcacctgtagcagccatggacgccagcggagccggtagcaaggggaagaagggggcggccgggcgcaaggcaggcggccccaggaagaagtcggtgacgcggtccgtcaaggccgggctgcagttccccgtcggccggatcgggcgctacctcaagaagggccggtacgcgcagcgcgtgggcactggcgcccccgtctacctcgccgccgttctggagtacctcgccgccgaggttctggagttggcagggaacgcggcgaaagacaacaagaagacgcgcatcaaatcccgcgccacgtgctcctggcgatccgcaacgacgaggagctcgggaagctgctggccggcgtcaccatcgcgcacggcggcgtcctccccaacatccactccgtgctcctgcccaagaaggccggcggagaaggcggccagcggcggcagcaaggagcccaagtcccccaagaagggcgccaagtcccccaagaaggcttagaaagtagggtcttcatttgcgctgtgtgctgtagcatgttcgtgtctagatctgtggatgggatgtgtcatgctctagtatcgtccttgtgtcttattgtatgttcgtcttcatcgagaagatcttcagcagtcagagctccgagttttttttttttttttttttttaaatcaatagagaaacgttataatacagcccaaattgcttcagaacatacaatcgcccaatatgtccaaaacaggtgcggccaagggcgtaccgttttacaggatgcaacaaccaaagccttaagtttgggagtttgggacaagcgtcatcaaccaagtaccaaggcaactgaacatgagcattggcataccatgggcataaaaatgaaacaatccagagacaattctcagggccagtgaattccaggctgtgatccatgtgataaagcacttgcaaacaatactcaggtaaacaatatgggacgacaaataatcagccaaaatcttcactcagccaatcatagaaggtatgttcccattctctaagcattcctggttgcgatctgagactcagcctctttcttcacgggctcttccttctctgacaagatgagttcgatgtggcacggggaggacatgtaagggttgatgcgcccatgagcgcggtaggtcctgcgccgctgcttctgagcctggttcacttgaatgtgtgacacatagagggtatcgacatcaagaccttttacctcagcattgctctcagcattcttgagaaggtctagaatgaatctagcagatttgacaggccagcgtccctgcccatttgagtgacgagacttagcctgagcggtacgtccaacaccgccacaatacctgcggaacgggatggcctgcttgtgggcaatcacatcctcaaggtaccttttggccttggtgagtgacaacttcctaagggcaaaagctgtctcacgggtgttcttgaagtgaacacgtaggtcacggcccatggccttggttgacttggtggggttggttggctccgtcgaatatttcaccatggctgcagccggcgagttgggggggtcctcaaggcggtgttgagatgctcctgcggagggagcgggagccaaggttagagaacgaagcggcggcggtaggagcgcgagaaattgtgtacatgcaactatgcaagccaactactgggcaaaaaccctagcggcttcgttatgggccgagccgctcgagcttggcccacgttcatccaaggaaaaagaacctcgtgc

SEQ ID NO: 2724 - DNA, 1188 bp, Zea mays
  Clone ID: PAT_MRT4577_80350C.1
gttacagaggaaaggttgcggtggatacctaggcacccagagacgaggaagggcgtagcaagcgacgaaatgcttcggggagttgaaaatagtttcctcctccactccctcccccgcctccacaacccccctcccaggagccgcccaggtacgtcgccggcggcgatgacgacgcgcttcaagaagaaccgcaagaagcgcggccacgtgtccgccgggcacggccgcatcggcaagcaccggaagcatcccggaggtcgcggtaacgccggtggcatgcaccaccaccgcatcctcttcgacaagtaccatcccggctacttcggtaaggtcggcatgcgctacttccacaagctccgcaacaagttctactgccccgcggtcaacatcgagcgcctctggtcgatggtgcccgccgacaaggcggcggaagccggcggcgacaaggccccgcagatcgacgtcacgcagttcggctacttcaaggtgctcgggaagggggtgctgccgcccaagcccatcgtcgtcaaggccaagctcatctccaaggtcgccgagaagaagatcaaggccgccggcggcgccgtcgtgctcaccgcctagttttcagtccttattcgcctcttggttttgagatctatatctgaactagcagtgctttcttgtctcacctatttgtgttaagaagacgtagtttttaaatccattgctccttcctgtttggacagtgctttcatatcaaatatttcaggtatattagagctgaaaaaaaaaaaaaaaaaaaaaggaaggagaagaagacgagtgtcaagtgaacctgaaacttgcggtgtcactggctggtatagcctgagtgtgagtgagtgatcgagctagctgagctccgatcctcgctagctagctaggataccgccataccacaagtcttcttcacaagtttaggagtgacagcaacaagagatctcgatggcctctgccaccgtgctcaagtcctccttccttcccaagaagtccgaatggggcgccaccaggcaggccgccgcgcccaggccgcccaccgtctccatggtcgtccgcgcctccgcctacgccgatgagctcgtgaagaccgcgaaaacgatcgcgtcgccggggcggggcatcctggcgatggacgagtctaacgcgacctgcggtaagcggctggcg

SEQ ID NO: 2725 - DNA, 1918 bp, Zea mays
  Clone ID: PAT_MRT4577_80424C.1
gtcagagaacaccataagtggccgctacacctgctcactccattgcaccactagcaagtagcaacaggagcgcaggcagaactagagcggtcttggtatggcttcttccctcgcgcccgcgtcgtgggcactgccgctgcagatgggcggggctggggcggcagcggcggggccttcctgccgcgcgacgctagccgtcgtcacggagccccgctgggccgcgtcgctgcgccgggcaagggttctcgtggcgctggcgccccggtgcgtggcgctcgacgggcccggcgccagcggcgaggaggaggcgcccaagatcgaggacgagaggaagaagagcggtgagacgaagaagccggcgcgcggccggccggtgtggagccggatcctcttcgcctccaagaagacacgaagtatcatcatcctcaacgccctcacggtcatctatgcaagtgatattccggttttgaaagaggtcgaagccctgacagagcctgcggtcttcaacatggtgcggttcgttgttgcagccatccccttcgtaccattcgcgctccgttccttcggtgaccgcagtgtacgctacgcgggactggagctgggagtctgggttagcttagcttacctttctcaagcaattggattgctctcatctgatgctggccgagcatccttcatcacggccttcacggtcgtagttgtgcctctaattgatggtcttcttggtgcttcgatccccagactcacatggttcggagccatcatgtctctgttcggaattggcctgctggaatgtggtggatctcctcccagtgttggcgatattttgaacttcttcagtgccgtgtttttcgggatccatatgcttagaacagaacaaatatcaaggagtacggacaagaagaaatttttagctcttcttggcttcgaggtccttgtggttgctttctcctccgttctctggtttatgttcaaagatggctacgttgataccagcggatccagctttgaatcttggacgttcgggatgctctgggataccacagtttcgtttccttggataccagcattgtacactggagttctttctacggtgttatgcatgtgggcagagatggtggcgatgggcgatgtttcagcaaccgaaactgcagttgtttacgggttggagccagtttggggagctgcttttgcttggttcctccttggtgaaagatgggatgacgctgcatggactggagctgctctcgtattatgtggcagtttgacagttcagctatttgggtcagctcctgagaagtccaagaaagtcaaaaaacgcagcagcaatgctttagaaactccagtgaaacgacgagactacttatcgttgtctcccataccagttgattccgggaagatcataggaaggcaattagaaaggaagaacaaagcagtataggtagcccaactacaaggcaagaagaaaggaaacgctgcgatgataggggcgcgcatgtaccaaatcattgtcctgaggcatcatctgtttggctccgtcaatatggggatgctgctcgattgctccgcatggagtttttttttcctttgtccgtattgaaaatggtcgtatttggatttctgttgtctcagttgaccgtgctagagtacctcatgcgtattaggaaatgaggcattggtagtggcaactcgaggagaatacttagacacatctactggcgtagtaatggcgttcagtgagataacttagtatgttttgggcactgttaaccgtacaggttcatgtaaatatatagtggctaaatggttctagagtactgagctgagcacaccattgtatagtactgaaataacaaataccacgcatggtattatttggctcccagtcaatagatccaggaatgattttgtggccgtg

SEQ ID NO: 2726 - DNA, 807 bp, Zea mays
  Clone ID: PAT_MRT4577_8051C.1
atttaacccccacccctctcgccctcctctcgattcgatctcggcttcctctccaagccacgcgagaccagagctccggccatggccgccacgatccagtccgtcaaggcccgccagatcttcgacagccgcggcaaccccaccgtcgaggttgatgtgtgctgctcagatggaaccttcgccagggccgctgttcccagcggtgcatcaactggtgtctatgaagctttggagctgagggacggtggatctgactacttgggcaagggtgtttccaaggctgttaacaatgtgaactccattattgcacctgctttggtcggcaaggaccctaccgctcaaactgagctcgacaactttatggttcagcagcttgatggaaccaagaatgagtggggttggtgcaagcaaaagcttggtgctaatgcaatcctggctgtgtcactagctgtttgcaaagctggagccagcgtcaagaagattccactgtaccagcacattgccaaccttgctggcaacaagcaattggttttgcctgttcctgcattcaatgtcatcaatggtggatcccatgctggaaacaagcttgccatgcaggagttcatgatccttcctactggagctgcctcattcaaggaggcaatgaagatgggtgttgaggtgtaccacaacttgaagtctgttatcaagaagaagtatggccaggatgccaccaatgttggagatgaaaggtggttttgctcctaacattcaggagaacaaggagggccttgagctcttgaagaccgcaattgagaaggctggata

SEQ ID NO: 2727 - DNA, 848 bp, Zea mays
  Clone ID: PAT_MRT4577_8054C.1
ctcgagccggccgggccgggactgctacagcgaacccgcacccctctcgctctccgctccatctggtccgattcgattcgattcgatctcggcttcctctccaagccacgcgagaccagccatggcggcgacgatccagtccgtgaaggcccgccagatcttcgacagccgcggcaaccccaccgtcgaggttgatgtgtgctgctcagatggaaccttcgccagggccgccgttcccagcggtgcatcaactggtgtctatgaagctttggagctgagggacggtggatctgactacttgggcaagggtgtttccaaggctgttaacaatgtgaactccattattgcacccgctttggtcggcaaggaccctaccgctcaaactgagctcgacaactttatggttcagcagcttgatggaaccaagaatgagtggggttggtgcaagcaaaagcttggtgctaatgcaatcctggctgtatcactagctgtttgcaaagctggagccagcgtcaagaagattccactgtaccagcacattgccaaccttgctggcaacaagcaattggttttgcccgttcctgcgttcaatgtcatcaatggtggatcccatgctggaaacaagcttgctatgcaggagttcatgatccttcctactggagctacctcattcaaggaggcaatgaagatgggcgttgaagtgtaccacaacttgaagtctgttatcaagaagaagtacgggcaggatgccaccaatgtcggagatgaaggtggttttgctcctaacattcaggagaaacaaggaggggccttgagctcttgaagactgcaattgaaaaggctggata

SEQ ID NO: 2728 - DNA, 522 bp, Zea mays
  Clone ID: PAT_MRT4577_80551C.1
aaaaagtcctttttttatttttgggaaagccacaacttcaaataaaaactttttttttgacctttacctcataaaaaatttaaaaaagggccccaccaatgatgggttgtgggtaaaccactgttgggtttgtaaaaccaggttggttgaatggcaccaatggttgcagttgtaaaagggggccagcgttaggcccaccgtgctggtaaaacggcaccaactgtggttgtgtaaaaaaggtaccagggttaacaccacttacctggttgaatggtagtagttgttgttgttgtaaataaccaggaaagttcaatgctgttagttggttaaatggaaaaaattgttgggggtaggcaccaggtacctggctaaatggtagttgttgttgttgcaaataaaaaccaaagttcaatgaacctatttggttaaatggaaaaaactgttgttgttgaaaagtaggcaccagggtttgttaccccaagttgttgtaattgttgggccctgatgttttgggccaataaa

SEQ ID NO: 2729 - DNA, 129 bp, Zea mays
  Clone ID: PAT_MRT4577_80580C.1
actaactaccttcgccctgacctcaagcgtggcctactcagcactgccgaggagcagctcgtcattgacctccatgccatgctcggaaacagatggtccaagatcgctgccaagttacctgggagaaca

SEQ ID NO: 2730 - DNA, 285 bp, Zea mays
  Clone ID: PAT_MRT4577_80596C.1
gcagcaccaagaggcaccattttttccttaagattaacttagaataaagtctgacgggggtaacagcatccatcgatccgccttccacgctgactgatgcatggttatgttgaagccgaggatgaacccaaatctaccaactgccccagcgcggccttgcaatcaaaaacacagatgggcatccacaagcacatcacgaacggggataaaccctgtggcctagggcaatcgcctcgattgcaaacccgataacttggcctggcggtccccaccgctcagttcgtc

SEQ ID NO: 2731 - DNA, 685 bp, Zea mays
  Clone ID: PAT_MRT4577_8071C.1
ctcgggccggccgggctgtaaactacactcctactcctgcactgaaacacttgattgattcatgggtagctagttagctgaattacattggatcctaccaagtttcgttcgtacagcagacacgacacgacggggatgacgaccaacgcggccgctcctgtgtggaacgacaacgaggcgctgactgtgcggcctcgcggacccatcctgctggaggactaccacctgatcgagaaggcggagcacttcgcgcgcgagcgcatcccggagcgcgtggtgcacgcgcgcgtggcctccgccaagggcttcttggagtgcacccacgacgtgacgtagctgacgtgcgccgacttcctgctcgcgcccggcgtgcggacgcccgtgatcgtgcgcttctggacggtgatccacgagcggcggtccccggagacgatgcgcgacccgcgcgtgatcgccgagaagttctacacccgcgaggtcaactgggacctgctgtacaacaacttgctcggcttcttcatccgcgacggcatcaagttccccgacgtgatccacgcgatcaagcccaacctgaggccgcacgtgcaggagtactgccgggtgctctacttcctgtagaacctcccggacagcctgcacaccttcatgttcctcttcgacgacgggggcgtgctggccgactacc

SEQ ID NO: 2732 - DNA, 170 bp, Zea mays
  Clone ID: PAT_MRT4577_80753C.1
aagctcaacagtcatggtcgacatgggcaaggagcaacaacaacacgaggcggatgaggtgcaatgggaggtcgtccaagaagaagtgctagtcgggcaagagacagtggtaccggtaccgtcggatgaggacaaggtggccgaggcggcactagtgcacaagatctcca

SEQ ID NO: 2733 - DNA, 969 bp, Zea mays
  unsure (1)..(969): unsure at all n locations
  Clone ID: PAT_MRT4577_8094C.1
cattgggtacctcgaggccggccggngaaaaaaanaaaaaaaaaaaaaaaaaaaaaaaaaaaattctttccccgcttgctttccagtttggcggcatcnagtcggtggcgcctgcgatggagtctctgttcggccaatcgcagcggaggaggagggcgggcggcagcggcttcgaatcgctcaagcgtctgggtcacatctcacccgctgtgcagtcccacctcaaacatgtgtacctcaccctatgctccgcgctggccttctctgcactcggcgcgtacctccacatcctcctcaacgtcggaggcgccctcacgaccgtgggatgcgtggcctccatcgccttcctcatctccctgcccgcttcacgggaccaggagaggaaccgcttggcgctgctcatgtctgccgcgctccttcaaggcgcgtccgttggtccgctcgtcgaccttgttattgacttggattcgaggattctcgtcactgcgttcgtcgggacggcagttgcttttgcatgcttctctggcgctgccatcatcgccaagcgcagggaatacctgtacctcggcggtctgctttcatctggcctctccattcttctctggctgcagtttgctacttcaatctttggccacaccagcgcgaccttcatgtttgagctcttctttggcctcctggttttcctgggatatatggtgtttgacacccaggagatcatcgagagggcgcaccgtggggacatggactacatcaagcacgcgctgactctcttcaccgactttgttgcgatgaagaatgcacaggagaaatcccaagacgagaagaggaagaagcggtagctgctgaatgaattggatgacatatgttgttgtggtcactacttcatagtaccatgtactcctatcctattgtactaataataataataagacgaaagatgactgctgggaatgaatatttggttctgct

SEQ ID NO: 2734 - DNA, 493 bp, Zea mays
  unsure (1)..(493): unsure at all n locations
  Clone ID: PAT_MRT4577_80953C.1
cggcgccggggatcgcacatatatatttagaccaactagcaacatangcaagcacaatagtgtaccaacaatgggagacgaaatattctggctgcttatgcagcttgatattaagtgaaagtgctgctgcggtaaccattttcgccgcaatggtcacaagctcctataggttgccttctagccccgttcctctcaccagcggtaagttaggtatgtgaaaacccaattctagaaccctacaggatgcaacagacgatcagaggtggcatcttacctttatcacccttgttcctccaacaatcatcagccctattacaagagttacctttggtgcatttattggcacaaaacatcagggcacaacaactacaacaacttgtgctagcaaaccttgctgcctactctcagcaacagcagttttcttccattcaaccaaactagctgcattggaactcctgtttctttttttgcaacaacaacaactaccatttta

SEQ ID NO: 2735 - DNA, 1270 bp, Zea mays
  Clone ID: PAT_MRT4577_8095C.1
atcgacttccgcagcagcagcgtcggacacccaaagccggcgttcgcggtgtgcgacccacaacatgactagtacgtcgacccagcggggccggaaaaaaaaaaaaaaaaaaaaaaaaaaaaaaaaaaaaaaaaaaaaaaaaaaaaaagccggccgtgggccagcctgaaagcaaagagtgggccgggtggccaggaccaacgacttttccatagtcgtgctcgtcttcgtccacctcccgacccgactgagtagcaagcaattctccaaattagggtttctttccgcttgctttccagtttgcggcatcagtcggtggcgcctgcgatggagtctctgttcggccaatcgcagcggaggaggagggcgggcggcagcggcttcgaatcgctcaagcgtctgggtcacatctcacccgctgtgcagtcccacctcaaacatgtgtacctcaccctatgctccgcgctggccttctctgcactcggcgcgtacctccacatcctcctcaacgtcggaggcgccctcacgaccgtgggatgcgtggcctccatcgccttcctcatctccctgcccgcttcacgggaccaggagaggaaccgcttggcgctgctcatgtctgccgcgctccttcaaggcgcgtccgttggtccgctcgtcgaccttgttattgacttggattcgaggattctcgtcactgcgttcgtcgggaccgcagttgcttttgcatgcttctctggcgctgccatcatcgccaagcgcagggaatacctgtacctcggcggtctgctttcatctggcctctccattcttctctggctgcagtttgctacttcaatctttggccacaccagcgcgaccttcatgtttgagctctactttggcctcctggttttcctgggatatatggtgtttgacacccaggagatcatcgagagggcgcaccgtggggacatggactacatcaagcacgcgctgactctcttcaccgactttgtttcggttcttgttcgaatccttgtcatcatgatgaagaatgcacaggagaaatcccaagacgagaagaagaggaagaagcggtagctgctgaattaattggatgacgtatgttgttgtggtcactacttcatagtaccgtgtactcctatcctattgtactaataataataatagtaagacgaaagatgactgctgggaatgaatatgtggttctgctaaataaaaaaaaaaaaaaaaaagaaaaaaaaaaaaaaaaaaaaaaaaaaaactcgag

SEQ ID NO: 2736 - DNA, 160 bp, Zea mays
  Clone ID: PAT_MRT4577_8096C.1
tctttcgctagtgggcgaccgccgccgcgtccgtccgtcaggtgcccaggtgtagcctcgtccgccccttcgtcaggtcttcgttagacccctcgtcgactagcacccaccagacatgcattagagcgcgcattaaaaataatatctgttcttaccggcg

SEQ ID NO: 2737 - DNA, 1560 bp, Zea mays
  Clone ID: PAT_MRT4577_81096C.1
ccggggagattcaatgaatccatctccatcctttcataacacacctgcaatcataaagagaggtgcaacgtcttctccgtgcttaccactcgccattcctaagtcctaactacctccacccccgcacgcacaactggccgcgccaaggcaaagctagaagaagacaacgcaaagggagaggacagaggaggagcagaggacgatgggcagcggcggcgctaacactgcccccctcctcaccccctacaagatgggaaaattcgatgtttcccacagggtagtcctcgcaccactgacgagacagcggtcctacggcaatgttcctcagcctcatgccatactgtactatcagcagagggcgactaaaggaggtcttctgatcgctgaggccacgggggtttcagacactgctcaagggtacaaggacactcctggcatttggacccatgagcaagtcgaagcatggaagccgatcgtagacggggttcaccagaaaggagggatatttttctgtcagatttggcacgtagggagagtctccaattccacttttcagcctaatgggcaggctccaatttcaagcaccgataagccactaaagcctcaagtgagagccaatggtatagacgtggctactttcgcagttcctagacgcttagagactgatgaaatccctttggtcgtcaatgatttcagggtagctgctcgaaatgcgattgaagctggatttgatggtgtcgaaatccatggagctcacggttacctgattgatcagtttctaaaggacggggtcaacgaccgcacagacaaatacggtggcagtctggagaaccgctgccggtttgcactggaagtaactcaagccgtggtcgacgaaattggagctgacaaggtcgggataaggctgtcaccattcgctagctactcggaggcgccggactcagacccggaagctctgggcatgtacatggcgaacgcgctgaacgagttcgggattctctactgccacatggtggagccgcggatggtgaaactcggtgaaaagttcgaaaccccctacagccttcgcccgataagggacgctttcaggggaacgttcatcgttgccggcggctacggcagggaggatgggaatcgcgcgatctccactgggtatgctgatttggtcgcgttcgggcgcttgttcttggctaatcctgacctgcctcggaggtttgaagtagacgctccccttaacaagtacaacagagacacgttttacatccctgatccggttgttggatacactgactacccatttctttcgtcagatgtataaatgttctcttttcagcaatctgcttttttagattgagtagtaactggttggtgtaccagtaaaatattagaggaataaaccattggtctgaatgcctcattctcatatatatggacaaaagcaatatgatcgttgtaattgtgcctcaaatcttatagttgtaaaaaatattgtgaacaagatcagacaaaaaaaaagaagggcggccgctctagaggattcacagaatcacaggcaactac

SEQ ID NO: 2738 - DNA, 1693 bp, Zea mays
  Clone ID: PAT_MRT4577_81100C.1
ggtacccccgatctttggcggaccactcgccattcctaagtcctaactacctccacccccgcacgcacaactggccgcgccaaggcaaagctagaagaagacaacgcaaagggagaggacagaggaggagcagaggacgatgggcagcggcggcgctaacactgcccccctcctcaccccctacaagatgggaaaattcgatgtttcccacagggtagtcctcgcaccactgacgagacagcggtcctacggcaatgttcctcagcctcatgccatactgtactatcagcagagggcgactaaaggaggtcttctgatcgctgaggccacgggggtttcagacactgctcaagggtacgtctgtcgtctgctagaccatcaggctactacggctgcttgagatctgtgtggtcatgctaaatttcatcattcagtagtttagtcgatgtctgaataaagatgtgttttctgtatgcgcacaaggtacaaggacactcctggcatttggacccatgagcaagtcgaagcatggaagccgatcgtagacggggttcaccagaaaggagggatatttttctgtcagatttggcacgtagggagagtctccaattccacttttcagcctaatgggcaggctccaatttcaagcaccgataagccactaaagcctcaagtgagagccaatggtatagacgtggctactttcgcagttcctagacgcttagagactgatgaaatccctttggtcgtcaatgatttcagggtagctgctcgaaatgcgattgaagctggatttgatggtgtcgaaatccatggagctcacggttacctgattgatcagtttctaaaggacggggtcaacgaccgcacagacaaatacggtggcagtctggagaaccgctgccggtttgcactggaagtaactcaagccgtggtcgacgaaattggagctgacaaggtcgggataaggctgtcaccattcgctagctactcggaggcgccggactcagacccggaagctctgggcatgtacatggcgaacgcgctgaacgagttcgggattctctactgccacatggtggagccgcggatggtgaaactcggtgaaaagttcgaaaccccctacagccttcgcccgataagggacgctttcaggggaacgttcatcgttgccggcggctacggcagggaggatgggaatcgcgcgatctccactgggtatgctgatttggtcgcgttcgggcgcgtgttcttggctaatcctgacctgcctcggaggttcgaagtagacgctccccttaacaagtacaacagagacacgttttacatccctgatccggttattggatacactgactacccatttctttcgtcagatgtataaatgttctcttttcagcaatctgctttttagattgtgtagtaactggttggtgtaccagtaaaatattagacgaataaaccattggtctgaatgcctcattctcatatatatggacaaaagcaatatgatcgttgtaattgtgcctcaaatcttatagttatagttgtaaaaaaatattgtgaagaagatcagtcagttgtcaagttgtataaaaagtcagcctggttcacagaatcacaggcaactactatgcccctgttggaatcacatggcgttttcacagacaaaaaaaaaaaaaaaaaagcggcc

SEQ ID NO: 2739 - DNA, 411 bp, Zea mays
  Clone ID: PAT_MRT4577_81104C.1
ttattgagaccaactagcaacatagaaagcacaatagtgtaccaacaatggcagccaaaatattttgcttccttatgctccttggtctttctgcaagtgttgctaccgcaaccatttttccacaatgctcacaagctcctatagctttccttttttccccataccttttaccagcggtgtcttcaatgtgtgaaaacccaattgtttaaccctacaggatccaacaggcaatcgtaacaggcattttaccattatcacccttgtttcttcaacaaccgttagccctattacagcagatacctttggtccatttggtggtacaaaacattatggctcaacaactacaataacttgggcttgttaactttgctgcattctttcaactccatagtttcttcattcaaccaactg

SEQ ID NO: 2740 - DNA, 377 bp, Zea mays
  Clone ID: PAT_MRT4577_81216C.1
gctaccggtcgtctaccacctccagtcgaggttgtgccccatccccagctcccaagtcgcagctcttccggccatggcggcggcggcgcagaggctcctcgcggcgagcacgaagatcgtcggggtcgggcggaactacgtcgcccacgccaaggagctcggcaaccccgtccccaaggagccggtgctgttcctcaagccgacctcgtcgttcctccacgcgggcgtggccaccaccgccgtcgaggtgcccgagccgctcgagtcgctgcaccacgaggtcgagctcgccgtcgtcatctcacggcgcgcgcgcgacgtgcccgaggcctccgccatggacttcgtcggaggttatgctcttgctttggacatga

SEQ ID NO: 2741 - DNA, 305 bp, Zea mays
  Clone ID: PAT_MRT4577_81245C.1
gttggcttctcttgccccttcggttcggggtctggttcgggagggtatccgcggttcggtttctcgaatcagcggatcgagatggccgcgtatgatgttgactaccgctgcttcttcggcggcctcgcctgggccaccgacaaccactctcttcacaacgccttcagcacctacagcgaggtcctacagtgcaagatcatactcgatcgggagacacaaaggtcccgcggcttccgctacatcaccttcttcacagaggaagctatgccgaacgccatcgaaggcatgaatctgaaagagctgga

SEQ ID NO: 2742 - DNA, 219 bp, Zea mays
  Clone ID: PAT_MRT4577_81527C.1
atcagcttagcccgccggcgatcggcatcgcggtggagtgcgtgttcgcgccgttcctgggccgcgaatgataccagccggtggtggacgagaatgtggataagctcaagaaggtgctggaagtgtacgacgcgcgtgtcggcacgtgcacgtacctcgacggcgacttcctcagcctcgccgaactcagacgcttcacgatcatgcagtggctcatgg

SEQ ID NO: 2743 - DNA, 1751 bp, Zea mays
  Clone ID: PAT_MRT4577_81549C.1
ccggccgggttcggattctcctcctctgcctttcgcttcgtcactcgccacgccacgccaaagaccaagaaaaaaaaggacgattttttcctagctgcaacttccctcacgccatggaggaggagatgccgctgcagctgctctccgcttcctccgccgccgtcgctgtctgagctcccccttcgctcgatctctccatcgggccgggcctacctctcctagcagtgaatcaaaccatggcagctttcgccgcgctgttcgaccccctgtactgcccggaggagcacctcgatctgtaccgcgacgaacccggcgagggtgcggacgagcagtggccgggccagcacggacagcaggagccggctgtcctcgacgacgagctgccggcgctgttcgaggcacaccgggccaaggagggggtggtgctggcggaggatggcgggtacggcggcgcagctgggcgtgaggccgcggtcggctgggtttcacgcgccgcggcgcggctaggcttctccgcgctcaccgccgcgctcgccgccgcctacctcgaccgctgcttcctccccgggggcgcgctccggctcggcgaccagccctggatggcgcgcctagccgccgtcacctgcttcgcgctcgccgccaaggtcgaggagacgcgcgtgccgccgctcctcgacctccagctctacgccgccgctgacgccgcggatccgtacgtattcgaggccaagacggtgcgccggatggagctgctcgtgctctccgcgcttgggtggcggatgcaccctgtcacgcccttctcctacctccagcccgtcctcgccgacgctgcgacgcgcctgcgtagctgcgagggcgtcctgctcgcggtcatggccgactggaggtggcctcggcaccggccttcggcgtgggccgccgccgcgttgctgatcacagccgccgccggcgacggcggcgacggcgacggcgacacggagctcctggcgctcatcaatgcccccgaggacaagaccgccgagtgtgccaagatcatctccgaggtgacgggcatgagcttcctcgcctgcgatgtcggcgtgagcgccggaaataagcgtaagcacgcggcggcgcagttgtactcgccgccgccgagcccgagcggcgtgatcggcgcgctgtcctgcttcagctgcgagagctcgacgtccgccaccgctatggctgcggcggtcggcccgtgggcgccgtcggcgtccgtgtccgtgtcgtcctctccagagccaccaggtcgggcccccaagcgcgcagcggcggcgtcggcgtcggcgtcggcgtcagccggggtcgcgccaccggtccaggtcccgcatcagctaccccccgacgaggagagccgcgacgcctggccgtccacctgcgccgcgtgacgcaccgtgccggaaacggtgcctatggcgagaccgccgttcggtggcggtggagaatggagaacaaggagcatcattggctcgcgtcggtgagcaggagaacgaactattttgcccattgccgtgacagatggggggcaagagagataagaaaagatgtccttgtttgcatgcttatggcgggagtaatgtttgcatgcttgtggcagcacattttgcaatgatggttctcagagaacttagctggaggtggaagatgattagcggataatttgccgtcgagatcgatggcgatttagtatttgttgcaactgtagtgatgctagttcttgccgtgtt

SEQ ID NO: 2744 - DNA, 170 bp, Zea mays
  Clone ID: PAT_MRT4577_81550C.1
caacaaaggggagccggtatttaaaccgagtcactgaactggggtttgtccaagtccaaagacgggcaacaaaaaaaaaaaaatcccgtttaactttcttaaacaaaaagttggcagggggggggctccccgttttttaaactaaacgggagctacagtttgatttaaaa

SEQ ID NO: 2745 - DNA, 448 bp, Zea mays
  Clone ID: PAT_MRT4577_81604C.1
cctactatcaacatataaagctcaatattgttccaacaatggcagccaaaatattttggcgccttattctccttggtctgtctgcaatttctgctacttctaccattttccctaaatgctctcaagctcctatatcttcccttcttcccccgtaccttttaccagctgtgtcttttgtatgtgaaaacccaattcttcaatcctacacgatccaacattcaatcacagctggcatcttatctttattacccttgttcctccatcattcatcaatcctattacatcatttacctttgatgcatatattttctcatatcattatgttcacaacaactacaacatctagtgctttcatatcttgctgcctactctcatcaacatcagttcttttttttcaactaactatctgctatgatttctgcttcctattttactcatcattctaact

SEQ ID NO: 2746 - DNA, 2362 bp, Zea mays
  Clone ID: PAT_MRT4577_81610C.1
atacacgccaagtcgccagccagcatttccccccgaaccatccttccactccctcgccgaccctccccccgcgcccgccatggacacggcgatcggctccgtcccggcagcctccgacgcggcgcgtcacccagcgccgtccgcgtccgccccgcgcgacgcgacgctgggccggcacctggcgcggcgcctggcggaggtgggcgcccgggacgtgttcacggtgccgggggacttcaacctcacgctcctcgacgagctggaggccgagccgggcggcgtccgcctcgtcggctgctgcaacgagctcaacgcggcgtacgcggccgacgggtacgcccgcgcgcgcgccggcggggtcggcgcctgcgccgtcaccttcaccgtcggcggcctcagcgccatcaacggcgtcgccggcgccttcagcgagaacctccccgtcgtgtgcatcgtcggcggacccaacagcaacgactacgggagtaacaggatcctgcaccataccatcggcttgcctgatttcacgcaggagctcaggtgcttccagaacgtcacgtgctatcaggctgtggtgaacaacttggaagatgcgcatgagcagatcgatactgccatctccacggcaatcaaggagagcaagcctgtttacattagcatcagctgcaacctcccttcgatcccacatcccaccttcagccgccatcctgtccctttcttcctctccccaaggctatcgaaccagatgaacctggaggctgcagtggaagccgccgcggctttcttgaacaaagccgtcaagccagtgcttgtaggtgggccaaagatgagggtgtccaaagcatgcgaagccttggcagagctggcagatgcctgcggctatcccgtcgccgtgatgccttctgcgaaggggctagtgccagagcaccactctaggttcattggcacgtactggggtgcggtgagcactccattctgtgctgagatcgtcgagtctgccgatgcctacctatttgctggccccgtattcaacgactacagctcggttgggtactcgctgctcctcaagaaggagaaggccatcattgtccaaccagagcgggtggtggtcgggcatggacccgcgtttgggtgtgttctgatgaaggatttccttcatgcccttgcaacccgtctgaagaagaacactgtcgcgtatgagaactaccgtcgaatttatgtgcctccaggcgaaccactttcatctgaacctggcgagccgttgagagtgaacgtgctcttcaagcatattcaggcaatgctgtccggcgacatggctgtcatcgcagagactggggactcgtggtttaactgccagaagctgaagctaccggaaggatgtggatacgaattccagatgcagtatggatcaattggctggtcagtgggcgcaactctaggatacgcacaggctgccaaggataaacgtgtcattgcctgcattggagacggcagctttcaggtgacggcacaagaagtgtcaacgatgctccggtgggggcacaacagcatcatcttcctgataaacaatggagggtacacaatcgaggtggagattcacgatggcccttataacgttatcaagaactggaactacaccggtctggtggaagcgttccacaatggcgagggcgcgtgctacacagcaaaggttcgaacagaggaggagctgacggaggcgctggaggcagctctaggacctaagaaggactgcttatgcttcatcgaggtcatcgtgcataaggatgacaccagcaaagagcttctcgagtggggatctagggtttctgcggcgaatagccgtccacctaatcctcagtgaatacatcaggtctcccgaattgccctgtaaaccgatccgctttctggtgacgcccataacaagaagtctcggcgatgacatgctgccgatttctgaataaattgtccctgtaattcactgatgttgcaagtccttgttgtaaagatacaaagacgtttggaagaatcactgacaacgtaaactctacgtatcttacgtgaaatagccccgtgatctacatatatataaagcagattttgagagtactagaaaaaaaagcggccctcagtgaaatagccgtacatcaggtcccccgaattgcccggaagaccaacccgttttctggtgaggcccaaaccaaaaagtctcggcaaggacatcctgtcgatttctgaataaattgtccctccaattccctggtgttaaagtccccgttgtaaaggtacaaaaacgtttggaaaaatccctgacagcgtaaactctacgtatcttacgtggaaaaaaaaaaaaaaaaaaccaaaa

SEQ ID NO: 2747 - DNA, 324 bp, Zea mays
  unsure (1)..(324): unsure at all n locations
  Clone ID: PAT_MRT4577_81682C.1
ttgacccagatggccctgatgccgtgcggctcacctggaacacctggccacggtcaaaggtcgaggccagccgctgcgtcgtgccgctcgccgccaccatctcgcccggtcgcgtcccggacccctccgcggngtccccgccgccgctcccttaccctccgctccgttgcaaggctccctgctccgngctcctcaaccccttcgcgcgcgtcgacttcgccgccaagatctggatctgcccgttctgcttctcccgcaaccacttccccctgcactactctgccatctctgagtccaacgttcctgccgagctctccccgcagt

SEQ ID NO: 2748 - DNA, 411 bp, Zea mays
  Clone ID: PAT_MRT4577_81745C.1
ttatatttttttttttataatttaaaatttttttggagagcaaaaaaaaactgtaataaccaaacagctaaacagctaaaaacaaatgtaaatgttctcttctctggtctgcacttaaggaaaacaaagggtacaacataatgtacatgtacaaaaaagggcgtccttttttgcggaaagcaaaccaggtaattcattatacatacatacaaatatatatgtaaaagttgacgtgaacttccggacttcaaaaaacgttactgtcagtgccaagcagaagcagatataaacttcctgttttataaaccgagcaaaatcgcgccatacttcttttcaagggtgaactagtccaagaagaaagaaaaaagcttccagaaaaccgaattaacatacaaactcaacgggtatggt

SEQ ID NO: 2749 - DNA, 376 bp, Zea mays
  Clone ID: PAT_MRT4577_8178C.1
tgggcacgatgaccggcgaggcctagcacaaggccggctatactacatatgccaccaagcataatgcctgcgagacgactgaggctaccaagcagaaggccgtcgagacgacggaggccgccaggcagaaggcagtcgacgccatggaggcagtcaagcagaatgccgtcgaggccgggcaagtacgccaaggacaccgtcgtctccggcaaggacaagttcggcgacgtcattcaataagccactgatcaggtgaagagcgcggctgcgggcgctaaggacgcagtgatgagcactcttgttatgggcggatacgacaagcagggctacgccaacaccaacaccaaccaagactctctttaccattaccagggga

SEQ ID NO: 2750 - DNA, 398 bp, Zea mays
  unsure (1)..(398): unsure at all n locations
  Clone ID: PAT_MRT4577_8184C.1
gaaaaaaaagcccgcaggngaagccgccgccgcttttgngnccatagccaccgcaggagactgaganggggggnnnngncaagacccacaggagcaangcatacttcaagcgnnnccaggngaagnncaagagaaggcgcgctggcaagacagactacagggccaggataaggctgattaaccaagacaaaaacaagtccaatacacccaattgcgggggggttgtgcgatttaccaacctggacatcacagcacanatcatctctgctagtctagcaggtgatatggttcttgcttctgcttgctcgcatgagttgccccgttgtggtcttgccgttggtctgtcctgctttgcggcctgccttctgcgctgtccttctgttggctcgccgtgtgct

SEQ ID NO: 2751 - DNA, 685 bp, Zea mays
  unsure (1)..(685): unsure at all n locations
  Clone ID: PAT_MRT4577_81870C.1
cgggtttctggtgtgcagccagctcccactctatggcatttattcgacgactggagctgatcctttctactggatgcgtgttatcctcgcatcaaaccgtggcactgtgatggagttgggtattactccaattgtgacctctggtatggtaatgcaacttcttgtcggatcgaagatcattgaagttgacaacagtgtgagagaggatcgtgctctgctgaatggtgcacaaaagttgcttggtatcttgatcgctattggggaagctgtggcatatgtcctgtctggaatgtatggcagtgtaagccaacttggaacagggaatgctattctcattatacttcagcttttctttgctggcatcattgtcatctgtttggatgaacttctccagaaaggttatggtttgggatctggtatttctctgttcattgctaccaatatctgtgagaatatcatctggtaagtccgtgctcttcgtgaggctttctaccgccagaaccttccaaatgtgaccaatttgcttgccactgtcttggtattcctcatagttatctatttccaaggcttccgtgttgtgcttccagtgagatcaaagaatgctcgtggccagcaaggctcatatccaattaagctgttctacacttcanacatgcccatcattcttcactctgcgctgattacc

SEQ ID NO: 2752 - DNA, 680 bp, Zea mays
  unsure (1)..(680): unsure at all n locations
  Clone ID: PAT_MRT4577_81872C.1
ggggacagggtgttcgcatttcatatgctgcagctatgtcgacactgcaaactgcaatgggaaagataaaagaagcgatggctctgctcaggccccctgttgccgtttaacaaaaccaacgtatcgctaatcagttgtggaccaaaggcttctgcaatgcactatcatattaaatacattcagttgacaatctctctcttctcctcgcctcgccttggtgttcacgccgtcgctagcgcctgccgcggcgaagcttctgccctccccggcgccgggctcgggtcgtcgtcggccaggaagatggctggcggcttcagggtactgcatctggtcaggccttttcttgctttcttgccagaggtgcagagcgcggataggaagataccgttcagagaaaaagttatctacactgttatttccctcttcattttcctggtctgcagccagctcccactctatggcattcattcaacaactggagctgatcctttctactggatgcgtgttatcctcgcatcaaaccgtggcactgtgatggagttgngtattactccaattgtgacatctgngatggtaatgcaacttcttgntggatcgaagatatttgaagttgacaacagtgtgagagaggatcgtgctctgctgaatggtgcacaaaaagtgcttggtatcctgattgc

SEQ ID NO: 2753 - DNA, 701 bp, Zea mays
  Clone ID: PAT_MRT4577_81875C.1
aaaaaaaaaacaaaaaaaaaaaaaaaaaaagaaattgcatcttgtttaccagagtcgcatgtcagaaacttggagtctttgctgtcatacggttatatttatatgagacttctatcggtaaaaaaaaaaaaaaaaaaaaaaaaaaaaaaaaaaaaaaaaatctcttttttctcctcgcctcgccttggtgttcacgccgtcgttagcgcctgcggcctgccgcggcaaagcttttgccctccccggcgccgggctcgggtcgtcgtcggccagaaaaatggctggcggcttcagggtactgcatctggtcaggccttttctggctttcttgccaaaggtgcaaagcgcggataggaagataccgttcaaagaaaaagttatctacactgttatttccctcttaattttcctggtctgcagccagctcccactctatggcattcattcaacaactggagctgatcctttctactggatgcgtgttatcctcgcataaaaccgtggcactgtgatggagttgggtattactccaattgtgacatctgggatggtaatgcaacttcttgttggatcgaagatcattgaagttgacaacagtgtgagagaggatcgtgctctgctgaatggtgcacaaaagttgcttggtatcctgattgctattggggaagctgtggcatatgtcctgtctgaaatgtatggca

SEQ ID NO: 2754 - DNA, 2031 bp, Zea mays
  Clone ID: PAT_MRT4577_81878C.1
cctcgaggccggccgggccggggctagagtgacagttgcgagaacgctactgtacgaacaaataggatagggatgtgaaatgatctaggaccgcgggtttattttgacaaactacaagggattctttgtatctctctcctctcatctccacctctcctccggctagggtgttcacgcctgccgcggcgaagcttctgccctccccggcgtcgcgctctggtcgtcgtcggccgggaagatggctggcggcttcagggtacttcatctggtcaggccctttctggctttcttgccagaggtgcagagcgcggataggaagataccattcagagaaaaagttatctacactgttatttctctcttcatttttctggtgtgcagccagctcccactctatggcattcattcgacgactggagctgatcctttctactggatgcgtgttatccttgcatcaaaccgtggcactgtgatggagttgggtattactccaattgtgacctctggtatggtaatgcaacttcttgtcggatcgaagatcattgaagttgacaacagtgtgagagaggatcgtgctctgctgaatggtgcacaaaagttgcttggtatcttgatcgctattggggaagctgtggcatatgtcctgtctggaatgtatggtagtgtaagccaacttggaacagggaatgctattctcattatacttcagcttttctttgctggcatcattgtcatctgtttggatgaacttctccagaaaggttatggtttgggatctggtatttctctgttcattgctaccaatatctgtgagaatatcatctggaaggcatttagccccacaaccatcaacagtggtcgtggcgctgaattcgaaggggctgtcattgcactgttccatctgttgattacgagaaccgataaagtccgtgctcttcgtgaggctttctaccgccagaaccttccaaatgtgaccaatttgcttgccactgtcttggtattcctcatagttatctatttccaaggcttccgtgttgtgcttccagtgagatcaaagaatgctcgtggccagcaaggctcatatccaattaagctgttctacacttcaaacatgcccatcatccttcactctgcgctgattaccaacctctattttatatcccagcttctctacaggaagtacagtggaaacttccttgttaaccttcttgggaagtggaaggagtctgaatactctggccattctattcctgttggtggtcttgcttactatgtaactgccccatcaagtttggctgatgtccttgcaaatccattccatgcactgttttatgtggtcttcatgctgtcagcctgtgctctgttctcaaagacatggattgaagtttccggttcatcagcaaaggatgttgctaagcagctcaaggaacaacaaatggtgatgccaggccatcgtgagtcgaacttgcagaaggaacttaaccgatacatccccactgctgctgcatttggtggtgtatgcattggcgcattgaccgtcctggctgatttcatgggtgcgattggttcaggaactggtatattgctcgctgtgacaatcatataccaatacttcgaaacctttgagaaggaaagggcgactgagcttggtttctttggtttttgattagtagctgtggaaccttaacttggctatagctgaattttcttgtaagtccctgtagtgcttagccagttgtaacttaaagagttctgtttaggttgccttcttgcggccacaatcatgtagcagaatgtgcgtgtgtttcaggttagcgtgggggtatgtgcatctgtccaaagagagtctgcaatttggcaaccggatattttgttatcaatttcagttacttcgaactgagcatgttctcattcccactttctgtttcggtctgttactaatttctcagaacattagatgctcacaggcgctttattctaatgtctctatttcatgacgagatatgaacatctctgaatctgattgcttca

SEQ ID NO: 2755 - DNA, 2648 bp, Zea mays
  unsure (1)..(2648): unsure at all n locations
  Clone ID: PAT_MRT4577_81879C.1
gccggccgggccgggagctccgcctcccttaaacccaccgctgttcgcgtcctcgtttctctcaatctctctcttctcctcgcctcgccttggtgttcacgccgtcgctagcgcctgcggcctgccgcggcgaagcttctgccctccccggcgccgggctcgggtcgtcgtcggccaggaagatggctggcggcttcagggtactgcatctggtcaggccttttctggctttcttgccagaggtgcagagcgcggataggaagataccgttcagagaaaaagttatctacactgttatttccctcttcattttcctggtctgcagccagctcccactctatggcattcattcaacaactggagctgatcctttctactggatgcgtgttatcctcgcatcaaaccgtggcactgtgatggagttgggtattactccaattgtgacatctgggatggtaatgcaacttcttgttggatcgaagatcattgaagttgacaacagtgtgagagaggatcgtgctctgctgaatggtgcacaaaagttgcttggtatcctgattgctattggggaagctgtggcatatgtcctgtctggaatgtatggcagtgtaagccaacttggaacagggaatgctatcctcattatacttcagcttttctttgctggcatcattgtcatctgtctggatgaacttctccagaaaggttatggcttgggatctggcatttctctgttcattgctaccaatatctgcgagaatatcatctggaaggcatttagccccacaaccatcaacagtggtcgtggtgctgaatttgaaggggctgtcattgcactgtttcatctgttgattacgagaaccgataaagtccgtgctcttcgtgaggctttctaccgccagaaccttccaaatgtgaccaatttgcttgccacagtcttggtcttcctcatagttatctatttccaaggcttccgtgttgtgcttccagtgagatcaaagaatgctcgtggccagcaaggctcatatccaattaagctattctacacttcaaacatgcccatcattctgcactctgcactgattaccaacctctatttcatatcccagcttctctacaggaagtacagtggaaacttccttgttaaccttcttgggatgtggaaggagtctgaatactctggccattctgttcctgttggtggtcttgcttactatgtaactgccccatcaagtttggctgatgtccttgcaaatccattccatgcactgttttatgtggtcttcatgctgtcagcttgcgctctgttctcaaaaacgtggattgaagtttctggttcatcagcaaaggatgttgctaagcagctcaaggaacaacaaatggtgatgccaggacatcgtgagtcaaacttgcagaaggaactgaaccgatacatccccactgctgctgcatttggtggagtatgcatcggcgcattgactgtcctggctgatttcatgggtgcaattggttcaggaactggaatactgctggctgtgacaatcatataccaatacttcgaaaccttcgagaaggaaagggcaacggagcttggtttctttggtttttgattagtagctgtggaaccttgaaccgatagctgaattttcttgtaaggccctgtttggaagcaacccggttttttagaaaccagtttttatattttagctaggagaggccagcttcttggtttttaagaaactgagaatctaatttctataaacttagtcataaactagtatgtttggaaccacctcaatttctataaaccagtttcttaaaaactgggtgtttccaaacagggcctaagtcactgtagtgcttagccagttgtaacttaagagagttctgttaggttgccttgtggccacaatcatgtagcagaatctgtccaaagagcgtgctcatcccatccacaatcagtaatccgcactctacagtttgctcataggttaccctggcaactggatgttctgtgttcaatttcagttacttttgaactgtaaggtctgttattactagtttcccagaacttagatgctcacgtgcgctttatttcaatatctattttgtgatgttgcatgattatctctgaatctgattgcttgtttgctaacagaccttacaatggnacttttttgttacattgcatgctgcattactgaagcaatatattttgctactgttacaatatgtgtgttcaatcccctccatggggtgcgacagtttctccccaagggacgcaccccttggggaggcactagttcgcctgtatatataagcattgtcttacttgcaataaagacaactgtcattctgtctctgtcatttgcacaatctctcagtctcgttaccactaccctctaacaatcagataacatttatggtaccatcagatggagccgtattattatcttcgtcagccacaaccctttggtcattcccgtaaacatacctggaggcgaagaagacctatactaatagcgacacccagctcaagaactgctagcaaccaataaaatcggccaagtttccccttgttcaagttggacccatcaagccaacctcctgtgccatcgcagagtcttggaactcggtttgccacttga

SEQ ID NO: 2756 - DNA, 2176 bp, Zea mays
  unsure (1)..(2176): unsure at all n locations
  Clone ID: PAT_MRT4577_81883C.1
tgcagtgagctcatctgcgtcgtcggttggttgttggtcggtcggcagatcagagtgaagaggtgcagtttattaatgttgattttggtggacaaggattacgaggggatgtatgtgggaaatttcccttactatgtacattgaatagcaagaaaaaaaaaaaaaattctctcatctccacctctcctccggctagggtgttcacgcctgccgcggcgaagcttctgccctccccggcgtcgcgctctggtcgtcgtcggccgggaagatggctggcggcttcagggtacttcatctggtcaggccctttctggctttcttgccagaggtgcagagcgcggataggaagataccattcagagaaaaagttatctacactgttatttctctcttcatttttctggtgtgcagccagctcccactctatggcattcattcaacgactggagctgatcctttctactggatgcgtgttatcctcgcatcaaaccgtggcactgtgatggagttgggtattactccaattgtgacctctggtatggtaatgcaacttcttgtcggatcgaagatcatttgaagttgacaacagtgtgcagagaggatcgtgctctgctgaatggtgcacaaaagttgcttggtatcttgatcgctattgggggaagctgtggcatatgtcctgtctggaatgtatggcagtgtaagccaacttggaacagggaatgctattctcattatacttcagcttttctttgctggcatcattgtcatctgtttggatgaacttctccagaaaggntaatggtttgggatctgggtatttctctgttcattgctaccaatatctgtgagaattcatctggaaggcatttagccccacaaccatcaacagtggtcgtggtgctgaattcgaaggggctgtcattgcactgttccatctgttgattacgagaaccgataaagtccgtgctcttcgtgaggctttctaccgccagaaccttccaaatgtgaccaatttgcttgccactgtcttggtattcctcatagttatctatttccaaggcttccgtgttgtgcttccagtgagatcaaagaatgctcgtggccagcaaggctcatatccaattaagctgttctacacttcaaacatgcccatcattcttcactctgcgctgattaccaacctctattttatatcccagcttctctacaggaagtacagtggaaacttccttgttaaccttcttgggaagtggaaggagtctgaatactctggccattctattcctgttggtggtcttgcttactatgtaactgccccatcaaggtgaaaatctagttccttcagtggggactggggaggccttctcgccatgatcatttttgttgtttttgttattcaataattaggtattcttttgactaacaatagcacattggaaaccacacagtttggctgatgtccttgcaaatccattccatgcactgttttatgtggtcttcatgctgtcagcctgtgctctgttctcaaagacatggattgaagtttctggttcatcagcaaaggatgttgctaagcagctcaaggaacaacaaatggtgatgccaggccatcgtgagtcgaacttgcagaaggaacttaaccgatacatccccatttgttgttccttgagctgcttagcaacaaatggtgatgccaggccatcgtgagtcgaacttgcagaaggaacttaaccgatacatccccactgctgctgcatttggtggtgtatgcattggcgcattgaccgtcctggctgatttcatgggtgcgattggttcaggaactggtatattgctcgctgtgacaatcatataccaatacttcgaaacctttgagaaggaaagggcgactgagcttggtttctttggtttttgattagtagctgtggaaccttaacttggctatagctgaattttcttgtaagtccctgtagtgcttagccagttgtaacttaaagagttctgtttaggttgccttcttgcggccacaatcatgtagcagaatgtgcgtgtgtttcaggttagcgtgggggtatgtgcatctgtccaaagagagtctgcaatttggcaaccggatattttgttatcaatttcagttacttcgaactgagcatgttctcattcaaaaaaaaaaaaa

SEQ ID NO: 2757 - DNA, 162 bp, Zea mays
  unsure (1)..(162): unsure at all n locations
  Clone ID: PAT_MRT4577_81890C.1
gtgggattgtgggaagatgcctccncatggggcgcgggcagaccctcctccggagcgcgtcnagatggacgaggtggtagaagcggacccggatacggaggcggaggatcacgaggagaggtgggcgaagctgcttccagagctgctctaccacatggtgcg

SEQ ID NO: 2758 - DNA, 403 bp, Zea mays
  Clone ID: PAT_MRT4577_81929C.1
atctcttttgttactttattttttttttttttttttttttttttttttaaaaaatggactttcttatttctgggaagccccaaacatcaaacaaaaaacttttttattgaactataactcataaaaaatctaaaagagggcccccccaataatgggttgttggtaaaacccttctgggtttgtcaaaacaagttggttgaatggcaccaattgttgcagttgtaaaagggtgccaccgttaggcccaacgtgctggtaaaacggcaaccactgtgggtgtttcaaaaagggagcagggctcacaccacctaactggctaaaagggaataattgttgctgctggaaataaacaggaaaattcaatgcttccccttggttgaatggaaaaaattgctgggggtag

SEQ ID NO: 2759 - DNA, 308 bp, Zea mays
  Clone ID: PAT_MRT4577_81979C.1
gtttcattgattcttgaaatagacgagcttcttttgcaccacaaggtcgaggatgtcttgcaactgcggatcaagctgcggctgcggctcaagctgcaagtgcggcaagtaagtaccctgacctggaagagacgagcaccgccgcgcaggccaccgacatcctcggcgtggacccggagaagaggccgtgcccgatttcatttaggccacggtggtatccaaccgaggacgtccacggctgcatctgtaacggcaactgcaaagtcgaccactgcaactactgatcacattataactacaaccatgga

SEQ ID NO: 2760 - DNA, 321 bp, Zea mays
  Clone ID: PAT_MRT4577_81984C.1
ttcttatcgatctgcaagtctcgctacgtagcagtgcaataaaaaaagcagccgcaatggcgagcagcaccatggccctctcctccacggccttcgccggcaaggccgtgaacgtgccgtcttcgtccgccttcggcgaggcccgcgtgacgttgcgctagactgcggctaaggccaagcctgcggcggcttccgggagcccgtggtactgcccccaccgcgtgctgtacctgggcccactgtccggcgtgccggcgtgctacctgaccggcgtgttccgggtcgactacggctggaacagcccagggctgacggttgacc

SEQ ID NO: 2761 - DNA, 421 bp, Zea mays
  Clone ID: PAT_MRT4577_82033C.1
gacccacgcgtcccctgaggcatcaataacttccagtctgctgcttactccaactgcgcgaaaaacccatcctagaatgcctttttgcttcctcatatctactactttaccatttcttttctgacactttgattctcaccaatctctctggcctgctgcttcctgataatctaccacgtccccattcttgctccttgcactcctccctacatctgcaacattgtgttctcattcaccctctccaatgcctgttctttcttctgctgatgcttcccccgtctcacctatcagctttgaagactattacaaacgccttgacatcacattctctgatgcacctgcctttgtggaccctcatgggcgtacttcgcgtgccctctccacagcccatattgactctcttctagatctcgcacagagc

SEQ ID NO: 2762 - DNA, 707 bp, Zea mays
  unsure (1)..(707): unsure at all n locations
  Clone ID: PAT_MRT4577_82069C.1
tttgctggtatgtgttgtttcttgaaatatttaccgccttctctttttatgggaaaccctcattggacctacagataccaatagttgtacctttgtgtggtaaaatgtattttatataagtgaccatgtgcacttttttgctatcaccaaatggtgaaatactactgattgtttatgttcttttggttgctgttatattctaaacaaaccaccttgtacttgaaatattcctgtagaataatcttagatcttgctgttgtttttccacgtgtctttctttaactttattaagaactcctaaaaaactcgacccttgtattaataactctatttatcttagctgtgtgtcttgaaccggaagggcgggcctggcgcagcggtagagcctaccgtctgtaaccggaaggtcccgtgttcgagccccagcctctgcatattacgcgggtaaggcttggcgcttaaagataccctttcccagaccccgcacagtgcgggaagcctacgacactgngtacgccctttgtgtgtcttgaactaaatggattttcttcccaagtggaaacaaaaagggatcttatggatggaccttaaagaagtatgtgtttctatcttaagataacagatgatgcatggatgaaccttaaatatgtgctaatgcaatatcagatgatacaaggaagaaccttgaaagtagtatgtgtttctac

SEQ ID NO: 2763 - DNA, 275 bp, Zea mays
  Clone ID: PAT_MRT4577_82076C.1
gtgagccctgctaccttcttgatacaaccacagttgttgccgttctaccagcgggcggggcctaacgctgtcacggctgttacaactgcaacaattgctgccattcaaccaacttgctttgacaaacccagcagcgttctaccaacatcccatcattgttggtgcccttttttagattacttatgagtaatagtacaataatatagttgcttgtctgatgtatgaggctttccagaaatatgaaagtacatttgtagataatgctgaaataagga

SEQ ID NO: 2764 - DNA, 393 bp, Zea mays
  unsure (1)..(393): unsure at all n locations
  Clone ID: PAT_MRT4577_8212C.1
ggtgggttggcttctcctccccctccggttcgggttcgggttcgtgaggttctccggggttcgggttcgagggtgagcggatcgagatggcggcgtcggatgttgagtaccgcttcttcatcnacnncctcacctaaaccacggaccaccactccctccacagcgccttcaggcaccgaccgcaaagncctcnantccaaaatcatcctccatctttaaacccataagtcccacggcttctgcttcttcaccttcttcacggaggaggcgatgcggaacgccatcgatggcatgaacggcaaggagctggacggcccgaacatcaccgtcaacgaggcccagtcccgcggcggccgttgaggcggcggcagtgggaactgtgggtggccgtgg

SEQ ID NO: 2765 - DNA, 283 bp, Zea mays
  unsure (1)..(283): unsure at all n locations
  Clone ID: PAT_MRT4577_82255C.1
cggntacatgcggnatgtacagntgtgtgatgaaggaacaatatcttcaagctttttcccattgaatatgtctatggcgacaaagtggcntttggcgtggccatgcttaccagtcttgttttttgaaacctccacaaccttgctggggcgggtcttgntgacgatgaagccgttcttacggncggtgccngcctgctgcgggttggtcttggncgccccngcgtcggccttcngttcgggtggtgctcgtgcgngtccgncntggcgttccttgtcttggttg

SEQ ID NO: 2766 - DNA, 3067 bp, Zea mays
  Clone ID: PAT_MRT4577_82317C.1
ccgtgcggtataatctaggcactgaacagcggtgcatgctttgctttgccgtgctaatggcgcccgctccatgtggccgttcgtcgcagagggtgttccacttcggcaagggcaagagcgagggcaacaagaacatgaaggagctgctgggcggcaagggcgcgaacctggcggagatggcgagcatcgggctgtcggtgccgccggggttcacggtgtcgacggaggcgtgccagcagtaccaggaggccgggcgcgccctcccgccggggctctgggcggaggtcctcgacggcctgcggtgggtggaggagtacatgggcgccgccctcggcgacccgcggcgcccgctcctgctctccgtccgctccggcgccgcggtgtccatgcccgggatgatggacacggtgctcaacctggggctcaacgaccaagtggccgccgggctggcggccaagagcggggaccgcttcgcctacgactccttccgccgcttcctcgacatgttcggcaacgtcgtgatggacatcccccacgcgctgttcgaagagaagcttgaagccatgaagaaagccaaggggctgaagaacgacaccgacctcaccgccaccgacctcaaagagctggtgggccagtacaaggacgtctacgtggaggctaagggagagccattcccctcagaccccaagaggcagctggagttggcagtgctggccgtgttcgactcgtgggagagcccgagggcaaagaagtacaggagcatcaaccagatcaccggcctcaggggcaccgccgtgaacgtgcagtgcatggtgttcggcaacatggggaacacctctggcaccggcgtgctcttcactaggaaccccaacaccggagagaagaagctgtacggcgagttcctggtgaatgctcagggcgaggatgtggttgctggaatcagaaccccggaggatcttgatgccatgaaggacgttatgccacaggcctacaaagagctagtcgagaactgcaggatactggagagccactataaagaaatgcaggacatcgaatttactgttcaggagagcaggctgtggatgttgcagtgcaggacagggaaacgtacgggcaaaagcgccgtaaagatcgccgtggacatggttaacgagggccttgttgagcgccgtgcggcgatcaagatggtagagccaggccacctggaccagcttctccatcctcagtttgagaacccatcggcgtacaaggaccaagtcattgccacgggcctaccggcgtcacctggggccgctgtgggccaggttgtattcactgctgaggacgctgaaacatggcattcccaagggaaatcagttattctggtgagggcggagaccagccctgaggacgtcggcggcatgcacgcggctgcaggaatcctcacagaaagaggtggcatgacctcccatgccgccgtggtcgcacgcgggtggggaaaatgctgtgtctcgggatgctctgggattcgtgtaaatgacgcagagaaggttgtgaagattggaggcaatgtgctgcgcgaaggtgagtggctatcgctgaatggatcgaccggcgaagtgatcctcggaaagcagccgctctccccaccagccctcagtggcgatctgggaacattcatgtcctgggtggatgacgttagaaagctcaaggtcctggcaaacgcggatacccctgaggatgcattggctgcgcggaacaacggggcagaaggaatcgggttatgccggacagagcacatgttcttcgcttcggatgagaggattaaggctgtgaggcagatgattatggctcccacagttgagctgaggcagcaggcgctggatcgccttctgccttaccagaggtctgacttcgaaggcattttccgtgctatggatggactttcagtgactattcgacttctggaccctcccctccacgaggttccttccagaagggaacgtcgaggaaatcgtgcgtgaactgtgttctgagacgggagccaaccaggaggatgccctcgcacggatcgaaaagctttcggaagtaaacccgatgcttggcttccgtggctgcaggcttggtatatcgtaccctgagctaacagaaatgcaagcccgtgccatctttgaagctgctatagcgatgaccaaccagggcgttcaagtctttccagagataatggttcctcttgttggaacaccgcaggaattgggacatcaggtggcccttatccgtcaagtcgctaacaaagttttcaccagtatgggtaaaactattgggtacaagatcggaacgatgattgagattcccagggcagctctagtggctgacgagatcgcggagcaggctgaattcttctcctttggaacgaacgacctcacgcagatgacctttggctacagcagggatgatgtggggaagttcatccccatttatctggctcagggcatcctccagcatgaccccttcgaggttctcgaccagagaggagtgggcgagctggttaagcttgctacagagaggggccgcaaagctaggcctaacttgaaggtgggcatttgtggagaacatggtggagagccttcatcggttgctttcttcgccaagactgggctggattacgtttcttgctcccctttcagggtcccgatcgctaggctagctgcagctcaggtgcttgtctgaggggctgcctcctcgttggcagccggatcgcctgctgttggtgcatctggtgattaataatactactatgacagagccatatgctctgtgaagagtattagtagcagcgctcataaaagctacagttccatctattttctcagctatgtaaaacttccaaactgttcatgcttaaaactgagggttttcgtggtgtgagatgtgcatgtcgttgttgaggccattgctgcacattccacctattgaggccctcctcaaattaagcctcgaaaaagctgatatcttttcgtagaactctagactccggtgaatgcaactggctggtttgcttccgaggcaaaaaaaaaaaaaaaaaaaa

SEQ ID NO: 2767 - DNA, 132 bp, Zea mays
  Clone ID: PAT_MRT4577_82627C.1
gcttctaaggatctcaaagtaaagcgtatcactccgcgtcacttgcagcttgcaatccgtggtgatgaagagttggattctcttatcaaggctaccatagctgggggtggtgtgatccctcacatccacaaa

SEQ ID NO: 2768 - DNA, 292 bp, Zea mays
  Clone ID: PAT_MRT4577_82701C.1
cccacgcgtccgcggacgcgtgggcctttttttcctctctctactctccaagttctcgtggggcgtcgaccgctctacacgtgggttgccaacctggacaccgaagtggaagaaggaagcagtcagcatatggattcatggatcagcagccagccttctgtgagccttgacctgtgcgtgggccttgccccgttcagacttcaccaccaggcgccggtggccgtcttctttcccaggcccaagctgcttgtcgaggagaactttctcctgccgccttcaaagaaagaaccat

SEQ ID NO: 2769 - DNA, 340 bp, Zea mays
  Clone ID: PAT_MRT4577_82704C.1
tacaacacctatagtgagtcgtattaagtggatcggagacacacgattcgcggaaggacgaggaagtccgatctgccctcgtgtcgcagagctcgacgaacaatgtcgcggagacgccgtggatgcgcatacgagtccttcacacgggagctccgggacaccttccagggctttcacttcggatctggaggcaggagtagcagcagccagtgctgctcgttcggtggcagcaccagctatgagacagcggtcttctctgggattcgtgtagaagggaacgagacgactgaagcgcgaggttgcaagagtgacgtgccggggctgaagtagggagatgtgg

SEQ ID NO: 2770 - DNA, 557 bp, Zea mays
  Clone ID: PAT_MRT4577_82761C.1
accaactgaatagtcacagaaaattccgtttgcgcaaacctagagctacctccgccgccgccgccggcaatcaagacagctgatggatcctatgcagtcatcggtgagaggccgcaggtcttcgttgcatgctgatgctgtcataactattggaggagtccgacctgcaccacccccacaaacatccacacatgtatgtcaagatgaggcgatggtcagcagcggggatccctcctggatgtctggttacaggagtgtggaagagagcagggtcaactggagggaacaatggaggtggtggagcgatgccctgtgcggcgccaaggctctgcatgtactggaacatctccgccatcctctgatgatctgcccggcgctccgcctcccgctccgccatcatcctcgcctccatctcgtgacgttccctcctctcttcttctagttgggtctgtaatattacaagtcaatgttatagtaactcaaagagaaggtatataactcaaggaaggacgagttacagaagcactaacctcgagttgtcaaacattaattaattt

SEQ ID NO: 2771 - DNA, 223 bp, Zea mays
  Clone ID: PAT_MRT4577_82965C.1
atgaattacattgaggaggaccttgtttccaccgattaccagggtgacagcaggtctagcatcggggagggtaatgttgggagtggcgggaacggtatcttcatgaaaattgtgtcctggtactacaactagtggggatacagcacccgcgtggtcaaactgattcgtcacatgaacagtaccaactaagaagaagaacttatagtaagggctggtgatacga

SEQ ID NO: 2772 - DNA, 508 bp, Zea mays
  Clone ID: PAT_MRT4577_82975C.1
ccggccgggagtcaacaggaatcggagaggaggttggtcaggtgattcaattctcgtaccatcacgctgctctggagtaccgcctccgccccataattcaccagcgtggtgctacgcatatttcccatcgtcttctccctagcgccatcagattccgcatgccagtgtggaccatgatctccccggacaccatccgcagggccatcggagcgatcggcaatggaactgcactcgtgatcttcctctcgcgagtgactacgttcatacacatgtggaagaaagggtcggtggagtacaactcgccgatcccgaacgagccgacagtgcagaactgcatgatgtaggtgctgtacgggatgccggcggtgcacctgcacagcatggtggtgatcactatcaacggcaccggcatggtgatccaaatgacctacgtggtgctcttcctcctctactaagcattggcagatctgagcaatgagttcctgctgctgcacgccgaggtgggctt

SEQ ID NO: 2773 - DNA, 768 bp, Zea mays
  unsure (1)..(768): unsure at all n locations
  Clone ID: PAT_MRT4577_83132C.1
acgacgactcggagctgctcgcgctcatcaatgccnccgaggacgagacccccacgcgtccgaagatcatctccgaggtgacaggcatgagcttccttgtctgcgacgtcggcggcatgatcgccgggaataagcgtaagcacgcggcggcgcggatgtactcgccgccgctgagcccgagcggcgtgatcggcgcgctgtcctgcttcagctgcgagagctcgttgtccgccacagcggactcgcgcaccctcgctactacggctgcgggggtcggcccgtgggcaccgtcagcgcccgtgtccgtgtcgtcttcccctgagcccccaggtcgggcccccaagcgcgctgcggcggcgggggtcccgcatccgcttccccccgacgaggagagccgcgacgcctggccgtccacctgcgccgcgtgacgcaccgtgccggaacggtgcctatggcgagatcccccgctcaggtagtcaggtggcggtggggatataaaggagcatcagaatctcgcgccggtgacgagaacgaaccattttgcccattgccgcgagagatggggggctagattgcaagaagaaaaggatgtaatgtctgcatgctcatgtatggcagcacattttgcaatgatggttctcgatcgtaactgttgggggggatcgtaactgttcggctggctacaagccgacactgttgcagctgtttggactgctgcagctgcaatccatagagagaaaatactgtagaagccgcagccgcagccgg

SEQ ID NO: 2774 - DNA, 371 bp, Zea mays
  Clone ID: PAT_MRT4577_83176C.1
aaaaaattataattttggggcacaaccaaaaagcaccattttttccttaggaggaaccaaaaacaaaccctgacgggaggaacagcatccatcgacccacagtccatgcgggttgaggcatgggcccgcgggaccccgggaggaacccagcactaacaacggacaaagagggaccttgctttcaaaaacacggaggggggacaccaaacgagacgaacgaagataacccctctggacaaggggaaacatcacggaagcgaacaggataactgggccgggcgggccccaccgatcagttcctccagatcccgccggagtggccgtagccgccgccacggggggcaccgccgtagccgccaccaccaccaccg

SEQ ID NO: 2775 - DNA, 318 bp, Zea mays
  unsure (1)..(318): unsure at all n locations
  Clone ID: PAT_MRT4577_83422C.1
cggcaacacagaaagcacaagagcgcaccaacaagggcagccaaanaagggggggcgttatgctccttggtcatactgcaagtgctgctaccgcgaccatttcccgcaatgctacaagctcctaagcgttccttgttgcccggacctattaccagcggagtcttcggaatgtgaaaacccaattcttcaaccctataggatccaacaggcaatcggagctgtcatcttacccttatcacccttggtcctacaacaatcatcagccctattacagcagttagccttgggggcatttattggcacaaaacattagggcac

SEQ ID NO: 2776 - DNA, 1585 bp, Zea mays
  Clone ID: PAT_MRT4577_83725C.1
ggcgattgggtctcccgaggccggccgggaggcggcaacgcaacacccccccgtgctttattataacccagcggcccctcccgcatcaggcaaccgagacgggacgagtccagcagccggccaccagcccatccgaaccctgctgcccccctctccgggttcgcgtgaggctgtgtgctgctgggaggagaggggaagcggcggcggggcgccatggaggccgagaagaaggcgccggcggtgtcagacgtgggcgcgtgggcgatgaacgtcgtcagctccgtcagcctcatcatggccaacaagcagctcatgtcctcctccggctacgccttcgccttcgccaccacgctgaccgggttccacttcacggtcacggcgctcgtcgggtggatctccaacgccaccggctactccgtctccaagcacgtcccgctctgggagctcgtctggttctctctcgtcgcaaacacctccatcaccgggatgaacctcagcctcatgctcaactccgtcggcttctaccagatctccaaactgagcatgattccggtggtctgcctcatggaatgggtgctgaacagcaagcactacaccaccaaggtcatctcggcagtggttgtcgtggccgccggtgtcgggatttgcacggtcacggatgtcgaggtcaatgccaaggggttcatctgcgcttgcgtggcagtgttctgcacgtcgcttcaacagattacaattggttcctttcaaaagaagtacaacattgggtcatttgagctgctgagcaaaactgcaccaatccaggcaatttcactcattatactgggcccctttgtggactactatctaaatggacggtcattgttgaactaccctttttcgggaggggcaactttcttcatcttgctttcctgctccctggccgtcttctgcaacatgagccaatacctctgcatcggccggttctcagcgacctcgtttcaggtcctgggccacatgaagaccgtgtgtgtgctgatcctcggctggatcctgtttgactcggccctcaccgtgaagaacatcctcgggatgctgctcgccgtgatgggcatggtggtctacagctgggccatggaagcggagaagaaggcggcagcccctgtcccccggatcaagagcgaaatgctcgacggcgaggacgtacccctcaaggccagggtgagcggcgtgcccgcggtcgacctcgaggacggcgagatgaagagctagctgccgccgccgccgctgattcgttcattcttcttgttcttttgtaactgtgcgcgcgcgatcgctcgatccaaagttgcttgtccgtcagccctcagctatcgacactacactgttaattttggccccttgttggggagagtccagttcctaggtgacgacgaccacccccagttcggcgtagatcaaacacacactagcagaatgcagatttttaggatttttttcaggcggcggggtgatccattcattgtcatgttgacaagactcataatagaaatacaggtaacatatgtatcctccgtggtaggattgataaggaatcatttatccaaaa

SEQ ID NO: 2777 - DNA, 1959 bp, Zea mays
  unsure (1)..(1959): unsure at all n locations
  Clone ID: PAT_MRT4577_83726C.1
ggtaccctccttgggcacgagaagctgcaggggaaatgcaccatgcagcgcggctcggccccagcccccagatccaggcacgcaaccgagccgcggcccggctgcgcccttgtcgtcgccgcaccgtccgtccccgcccgcgtcaatccgtcgtcgtcgtcgtctcctcgtcaccccgcgagcttttttcaccgctgccctgccctgcccccgcgcccgttgacgtttccggcccccaattcgaaagcctcgcgctccccgttgctcccttccttgcctaggcggcaacgccctcgtgctttataacccagcggcccctcccgcgtgaggcaaccgagacgggaggagaccagcagcagcagcccatccgaaccccgcctcctcctcctcctcccgggttcgcgtgaggctgtgtgctgctgggaggcggcgccggcgccggcgccatggaggcggagaagaagccgccggcggtgtccgacgtgggcgcgtgggcgatgaacgtcgtcagctccgtcagcctcatcatggccaacaagcagctcatgtcctcctccggctacgccttcgccttcgccaccacgctcaccgggttccacttcaccgtcacggcgctcgtcgggtggatctccaacgccaccggctactccgtctccaagcacgtcccgctctgggagctcgtctggttctcgctcgtcgccaacacctccatcaccgggatgaacctcagcctcatgctcaactccgtcggattctaccagatctccaaactgagcatgattccggtggtctgcctcatggaatgggtgctcaacagcaagcactacaccactaaggtcatatccgcagtcatcgtcgtggccgccggtgtcgggatttgtactgtcacggatgtcgaggtcaatgccaaggggttcatctgcgcttgcgtggcagtgttctgcacgtcgcttcaacagattacaattggctcctttcagaagaagtacaacattggatcatttgagctgctgagcaaaactgcgccaattcaggcactttcactcattatactgggcccctttgtggactactatctaaatggacggtcattgttgaactaccctttttcaggaggggcaactttcttcatactgctttcctgctccctggcggtgttctgcaacatgagccaatacctctgcatcgggcggttctcagcgacctcgttccaggtcctgggccacatgaagaccgtgtgcgtgctgatcctgggctggatcctgtttgactcggccctcaccgtgaagaacatcctcgggatgctgctcgccgtgatgggcatggtggtctacagctgggccgtggaagcggagaagaaggcggcagccccgatcccccggaacaagggcggcatgctcgacggcgaggacgtgcccctcaaggccagggtgagcggcgtgcccgcggtcgacctcgaggacggcgacgtgaagggctagccgctgatccgttcattcttctcgttcttttgtaactgtgcgcgcgcggtcgctcgatgcaaagttgcttgttcgtcggttctcagctatcgacactacactgttaattttgttggccccttgttggggggagtctgctcgtaggtgaccccccccccccctcccccgggttcgacgtagatgaaacacacgcgggcagattgttaggatttttcaggcggggaggtggcgacatgctgttatagatggtgacaagactttatataatggaaatgcaggtgtttttgaaaaaaaaaaaaaaaaaaaaaaaaaaaaaaaaaaaaaaaaaaaaaaaaaaaaaaaaaaaaaaaaaaaaaaaaaaaaaaaaaaaaaaaaaaaaaaaaaaaaaaaaaaaaaaaaattattaataaaaaaaaaaaaaataaaaaaaaaaaaaaaataaaaaaaaaaaaaaaaaannnntnnattnaaaaaaaaa

SEQ ID NO: 2778 - DNA, 272 bp, Zea mays
  Clone ID: PAT_MRT4577_83846C.1
ccccacctaaacaatgagtgttcctggccagcagcctgatttttataattacatatgtgtccaacgtaagggtcagggcatcccatgagggcatacatacatatttggcgtacatacccatcacatgcctggatatttacatttgtccaatggaggcgttagggccccccatgagggtatacatacatattttgcgtacttacacacttaacatgactggagaatcttgcagagattttttatctcagccaaaatcaggaacgatgaagtag

SEQ ID NO: 2779 - DNA, 679 bp, Zea mays
  Clone ID: PAT_MRT4577_83935C.1
cacgctttccctcctctcacttcggattctgctctgccttcgcctctcgcctcgtcactacccacgccactgcatagaccgagaaaaaggacgaattttttcctcgccgcaacctcacaccatggaagaggcgatgccgccgccgccgccgccgctctcatcttcctcctccgccgccgtggcctgagctctcccatcgctcgctctctccatcgggcctacctatcctagcagtgaataagtcatggcagctttcgccgcgttgttcgaccccctctactgcccggaggagcacctcgatctgtaccacgaaggacccgtcgaggttgtggacgagcagtggcaggaccagcgcggacagcagcaaccggcggctcttgacgacgagctgccggcgctgttcgaggcgctccgggacaaggagggggtggtgctggcgggtgatggggaggaggatgggtacggcggctcggcaggccgggaggccgcagtcggctgggcgtcacgcgccgcggcacggctgggcttctctgcgctcacttccgcgctgtccgccgcctacctggaccgctgcttcctccccgggggcgcgctccgtctcggcgaccagccctggatgtcgcgcctcgccgccgtcgcctgtgtcgcgctcgccgccaaggtcgaggaaacgcgcgtg

SEQ ID NO: 2780 - DNA, 1717 bp, Zea mays
  Clone ID: PAT_MRT4577_83940C.1
gatctgtaggggacctcgaagcttcgagcacgccacaacccaacgccgcgcgggcggcgggcccgtgctgccctggtgtgtactgctccctcacgccccgcgccgccacccccggcccccgccaccactcctcccggcctccccgacggcgctccgggcagcaggaacaagatgtccaatcgggccggccaggggccgtatcactcactacccgcggcccgcgcccgatcgggcgcactgccctgtggtgtactggtgtgtcacgcccctcgtcactcaccccgtcacccgcaaccccatcttctattcttcccgacggcgctcctggcagcaggaacaagatgtccaatagggccacacattggtgttatgcctgtcggcggccaattcgtctccgtgggcaggatatcgtatgccccaactgcaatgatggttttatccaggaaattagtgagatgggtggcatattgaacacttatgggctaattgaaccagactttgaagagcgtcgagctagaagattcggaatgatggatgccatgtcttcccttatgcggcaacggatggaagaaatgggaagagatggtttgtttgatattcgtggtagacaaggaacaggtactgaatatggaaggaggccaactgctgttcctacattggtatttggcggcatcccttctcctggagttggtagcggtgatgttaatgttgtcctcaggggaggccgcagagctggcgctgcccaaccaaatttcagtagcttagttgttggtcccagtctggaagctctttttgagcagctacttctccagaacaaccgtcaaggcccagcacctgctccacagtcagctattgactccatgcctgtggtaaagataaaccgcaggcatcttgacgacgatccacagtgcgcagtttgcaaagacaaattcgaggttggagcagaggcacgggagatgccatgcaagcacctgtaccatactgactgcatcatcccctggctggttcagcacaattcttgccctgtttgccgccatccactgccatcacagagatcaggcagtaccagtagcgcccggccttcagcttactacaacgaagccgctgatcctcctggggtcaccagagcagatcttgaacctgctccaagagacggtggcagggaaagccaggaaaggcgccgctccttctcgtttctgtggccgtttggcccgtcgagttccagatccagttcttaccagtacgaacagaatgttgatgagcctgcagtatacgatccaaaccagatagcatattctgagtggcactatgaccactgactgaaaccctgcagcaagtgcaagctatctgcaattcgtgccttcaaccctcagctttggagaggcattcatcagctgtaatggctgcttgccgtataaaaaaaggatggttcttgcctgttatattgtgttcagtgcatagccttgctccgtatgtccgtcgtatatataatcccttgcgtgtagtaagcgatgaactgaatgcatccagaatatcatgtcatgataaacttgaatatagtttcatggttgttatttcagactgaaaataaaatcagtcttctgttccggttatactgattctgaaagaattctagacctccgttctttctttcaagacctccgttcttgaatatttgttgtctgttttaaaaaaaaaaaaaaccataaaaaagaat

SEQ ID NO: 2781 - DNA, 408 bp, Zea mays
  unsure (1)..(408): unsure at all n locations
  Clone ID: PAT_MRT4577_84205C.1
acctanattttttttttttttttttttttttttggggtggttttttggggggggcccgagcttttccatccaaggtccacaaaaataacggggctaaatgcttcgaaagacaaaacaaaacttttttattcaaggttcagggtacatatccttgaacccatcttaagcatacctagccgatttcaaaaggcaacccccccatcatgggggattggcccccagagctgaccatgggaacatttttactagagatgacccacccatgcgaagaaaatttgtgacccatcaaggccccttcttggaagaagggccagaatccggggttttttttctttttttgagaggctaaacctttccccttttctttgttttggccatcttcatagccctataaaggcctctttggtt

SEQ ID NO: 2782 - DNA, 2391 bp, Zea mays
  Clone ID: PAT_MRT4577_84221C.1
ttgggaccctcgaggccggccgggctttttagctgcttgtggctgcgcccggcgggcgacgccatttatcacacctcacctccgccacccgggtgcttacgtggcgcggcaccaccagctgatcctgatcggcgcaggaagccaggatcggagtaaacgcttgctggctctctaatccccgtccctcatccctcaccctttgcaaaaatcacagcggcaggggacagcaaaaatctccatgcccacgctcggcctagatctccggcgagccggccccgcgcggtagccgattcactctccgaccccgacccgatgggcggcgaggtgccggagccgcgccggctgagccgctcgctcagcttcggctgcggcggcgtccccgaggaggcgctgcacctcgtgctcggctacgtggacgacccgcgcgaccgggaggcggcctcgctcgtgtgccgccgctggcaccgcatcgacgcgctctcgcgcaagcacgtcaccgtcggcttctgctacgccgtggagcccgcgcggctgctcgccaggttccggcggctcgagtcgctcgcgctcaaggggaggccccgcgccgccatgtacgggctcatccccgaagacttcggcgcctacgcggcgccctgggtcgccgagctcgccgcgccgctcgactgcctcaaggcgctccacctgcgccgcatgaccgtcaccgacgaggacatcgccgtgctcgtccgcgcgcgcggccacatgctacaggtgctcaagctcgacaagtgctccggcttctcaacggacgccctccgcctcgtcgcccgctcctgcagatctctgagaactttgttcctggaagaatgtataattgccgatgaagggagcgaatggctccatgaactcgccgtcaacaattctgttctggtgacactgaacttctacatgacagaactcaaagtggagcctgccgatctggagcttcttgcaaggaactgtaaatcattgatttctctgaagatgagtgactgcgatctttcggatttgattggttttctccaaacctccaaggcactgcaagaattcgctggaggcgcttttttcgaagtcggagagtacaccaagtacgaaaaggtcaagctcccacctaggctatgcttcttggggggtcttaccttcatgggtaaaaacgagatgcccgttatctttccgtattctgcgtcgcttaagaaactggacctgcagtacactttcctcaccactgaagatcactgtcagcttatcgctaaatgccccaacctactggttctcgaggtgaggaatgtgattggggatagaggactggaagttgttgccgatacatgcaagaagctacgaaggctgagaatcgagaggggggacgatgaccccggccaagaagagcagggaggagtctctcagataggcctgacagccgtagctgtcggctgccgggaactggagtacatagcggcatacgtatccgacatcacaaacggggcgctggagtccatcggcaccttctgcaagaacatgtacgacttccggctcgtcctactcgacaagcagaacaaaataacggatctgccgctggacaacggtgtccgagctctactgaggagctgtaccaagcttcggcggttcgccttgtacctgagaccgggagggctctcggatgcaggcctcggctacgtcggacagtacagcgggaacatccagtacatgctgctcggcaacgtcggcgaatcggacaacgggctgatccggttcgcgatggggtgcgccaacctgcggaagctggagctgaggggctgctgcttcagcgagcgggccctggcggtggccgtgctccagatgccctcgctgaggtacgtatgggtgcaggggtacagggcctctcagacgggccgggacctcatgctcatggccaggccgtactggaacatcgagttcgtgcctccccgtcccgagagcgcgtgtcgggtgatggcggatggacagccttgtgtcgacacccatgctcaggttctcgcgtactattccctcgctggaaggaggccggactgtccgcggtggctggttactttgcatcccgcgtgactgtagatacggcaaggtgtccgagtgtggttactgttactaccagctgcttgtgtaccgtaatgaactgtagtgccgacgtactgtagcggaggtgtagtgtagtgcaataataagttgcggtgttgcttgtactggtatctagtcctaggaggatgtatactaagttatgctgtgctttcttctccccggaattgtattctgttgcttccactgtaaatatcagaaatggctttttgctagtttgggttgaaataatggacctcacaggtgcattgcatgcacaac

SEQ ID NO: 2783 - DNA, 2411 bp, Zea mays
  Clone ID: PAT_MRT4577_84224C.1
gccggggtgaaaccccggctgatcggcgcaggaacggagtaaacgcagcctccattccccgttcctcgctggccgctactactcatccctcgctcttgcggaggcgaggcagaggcttgctcctccctccaataattcccttccgcctctcctcccgtcctctcgcaagcccacaccacacctgcagaaatcacagcggcaggtgcagcaaaaatctccatgcccccgctcggctagatctccgacgagccggccccgcgcggtagcagattcgctccccgatcccgaccgatgggcggtgaggtgccggagccccgccggctgagccgcgcgctcagcttcggctgcggcggcgtccccgaggaggcgctgcacctcgtgttcggctacatggacgacccgcgagaccgggaggcggcctcgctcgtgtgccgcctctggcaccgcatcgacgcgctctcgcgcaagcacgtcaccgtgggcttctgctacgccgtggagcccgcgcggctgctcgccaggttcccgcggctcgagtcgctcgcgctcaaggggaggccccgcgccgccatgtacgggctcatccccgaagactttggcgcctacgcggcgccctgggtcgccgagctcgccgcgccccttgactgcctcaaggcgctccacctgcgtcgcatgaccgtcaccgacgaggacatcgccgtgctcgtccgcgcgcgcggccacatgctacaggcgctcaagctcgacaagtgctccggcttctcaacagacgccctccgcctcgtcgcgcgctcctgcaggtctctgagaaccttgttcctggaagaatgtataattgaggatgaagggagtgaatggctccatgaactcgctgtcaacaattctgttctggtgacactgaacttttacatgacagaactcaaagtggagcctgctgatctggagcttcttgcaaagaactgtaaatcattgatttctttgaagatgggtgactgtgatctttcagatctgattgggtttttccaaacctccaaagcattgcaagaattcgccggtggtgccttttttgaagttggagagtacaccaagtacgaaaaggtcattttcccacctaggctatgcttcttagggggtcttaccttcatgggtaaaaacgagatgccagttatctttccgtattccacaatgcttaagaaactggacttgcagttcactttcctcaccactgaagaccactgtcagcttattgctaaatgccccaacctaagtgttctcgaggtgaggaatgtgattggggatagaggactagaagttgttgctgctacatgcaagaagctacgaaggctcagaattgagcgtggcgacgatgatcctggccaagaagagcagggaggagtctctcagataggtttgacagccgtagccgttggctgccgcgaactagagtacatagctgcctatgtatctgatatcacaaatggggcgctggaatccattggcactttctgcaagaatctctatgatttccggcttgttctacttgacaaacagaagaagataacagacctgccacttgacaacggcgtccgtgccctactgaggaactgcgtcaaacttcggaggtttgccttctacctgagaccgggagggctttcagacgtaggcctcggttacattggactatacagtgggaacatccaatacatgctgctcggcaacgttggtgaatctgacaacggattgatccagtttgcaacgggatgcaccaacctgcggaagctcgagctgaggggctgctgcttcagcgagcgagctctggcagtggccgtgctccagatgccctcgctgaggtacatatgggtgcaggggtacagagcctctcgaacgggccaggacctcatgctcatggccaggccgtactggaacattgaattcgcgcctcccattcccgagagcgcttatcgggtgatggcagatggacagccttgtgttgacacccatgcccaggtccttgcgtattactcccttgctggaaggaggccggactgccctcagtggctggtgactttgcaccctgcgtcactgtaaatacgtcaagctgtcccgagtgtggtttttgtaccagctgcttgtgtaccgtaataaactctagtactgtagtggtggaggcgtagtgcaataaagttgcagttgttgcttgtactagtgaatctaatcctaggaggttgttgccctgtgctttcttttccccggaattgtatctttgctccactgtaaatatcagaaatggcctgtgctagatgagttgaatcaaaaaaaaaaaaaaaaaatacccggttatgctgtgctttcttgtccccggaattgtattatgttgcttcccctgtaaatatcagaaatggctttttgct

SEQ ID NO: 2784 - DNA, 384 bp, Zea mays
  Clone ID: PAT_MRT4577_84251C.1
cgcctatcttatttctgggaagcgcacaaacatcataacaaaaaactttattattgaactggaactcataagaaatctaaaacagggcaccaccaatgatgggttgctggtgtaacactgctgggtttgtcaaagcaagttacctgagtgggggcaattgttacaattcttatagggggccagccttaggcgcagcgtgctgggacaacggctacaactgtggctgcgtcaagaaggcagcagggctcacaccagctagctggctaaatggtaatagttgttgctgctgtaaataagcaggagagttcaatgctgccaggtggttgaatggaagaaactcctccgggtacgcagcagctagctggttaaatggtagttgttgtt

SEQ ID NO: 2785 - DNA, 404 bp, Zea mays
  unsure (1)..(404): unsure at all n locations
  Clone ID: PAT_MRT4577_84370C.1
accgggtccgagccagcgcgtctcgggagaagcgaccaccactttcttcaaccaccacaatgaaggacgaggagacagcccggcggcgagtacggggtactctcgagtaccgatagtggtcaaccgtccaccggcgagggcgagtaccgagaggtacatagaagggangagaaaggagcaccaagcaccaagcagcactcttcggcgaggccggctgccattcgccgnncggcgccttcgcacttcttacgagaanngcacgaggcganagaaaggaaccccgagcactgcgcacaaggcaccaagatcacggganngaggtcgcttgccgcggcgggccgtcgggcgccgggcggctacgtatttccacgagcacccacgnagaagaagaagggacccacaag

SEQ ID NO: 2786 - DNA, 1190 bp, Zea mays
  Clone ID: PAT_MRT4577_84406C.1
cattgggtacctcgaggccggccgggctcccggcctgtcccctcacctccctccccctatctctccaccgccgcagctagctgcgacgtcatgcactcgccggcgccaccgccaccgcatactatctacaattagccagccgtaggcttacctatcctgtgtcaagcaagcctctcgcaagcaacaaggaaggaagctagctagttttatagctgctgtcggcggcggcggctgaagcgacgtgcctgagctaggatttaggttgagatcaggagagggagaaggcggcggcgatggggcgcgggaaggtgcagctgaagcggatcgagaacaagatcaaccgccaggtgacattctccaagcgccgctcggggctactcaagaaggcgcacgagatctccgtgctctgcgacgccgaggtcgcgctcatcatcttctccaccaagggcaagctctacgagtactctaccgattcatgtatggacaaaattcttgaacggtatgagcgctactcctatgcagaaaaggttctcatttccgcagaatatgaaactcagggcaattggtgccatgaatatagaaaactaaaggcgaaggtcgagacaatacagaaatgtcaaaagcacctcatgggagaggatcttgaaactttgaatctcaaagagcttcagcaactagagcagcagctggagagttcactgaaacatatcagaacaaggaagagccagcttatggtcgagtcaatttcagcgctccaacggaagctcgcggagaagcagaaagaccagcggcagcaagtgcaacgggaccaaactcaacagcagaccagttcgtcttccatgtccttcatgttaagggaagctgccccaacaacaaatgtcagcatcttccctgtggcagcaggcgggagggtggtggaaggggcagcagcgcagccgcaggctcgcgttggactgccaccatggatgcttagccatctgagctgctgaaggtttgccctcaccgtcgcgatgtgatagcccaaaatccagcaagtcttccccggaccccggactgtccccgcttctccgcctggtgcagtatcgtcgtgatcgcgagaagcagcagcagcggtttgccgtattttttaccactgtgtataagtagcatatctgcaatgtgtatattttgttcaccgttcctgctggggc

SEQ ID NO: 2787 - DNA, 1419 bp, Zea mays
  Clone ID: PAT_MRT4577_84407C.1
caccgctttaaatccgcctcctcccagcgtctccctcctcccggcctgtcccctcacctcctccccctatctctccaccgccgcagctagctgtgacgtcatgcactcgccggcgccaccgccaccgcatactatctacaattagccagccgtaggcttacctatcctgtgtcaagcaagcctctcgcaagcaacaaggaaggaagctagctagttttatagctgctgtcggcggcggcggctgaagcgacgtgcctgggctaggatttaggttgagatcaggagagggagaaggcggcggcgatggggcgcgggaaggtgcagctgaagcggatcgagaacaagatcaaccgccaggtgaccttctccaagcgccgctcggggctactcaagaaggcgcacgagatctccgtgctctgcgacgccgaggtcgcgctcatcatcttctccaccaagggcaagctctacgagtactctaccgattcatgtatggacaaaattcttgaacggtatgagcgctactcctatgcagaaaaggttctcatttccgcagaatatgaaactcagggcaattggtgccatgaatatagaaaactaaaggcgaaggtcgagacaatacagaaatgtcaaaagcacctcatgggagaggatcttgaaactttgaatctcaaagagcttcagcaactagagcagcagctggagagttcactgaaacatatcagaacaaggaagagccagcttatggtcgagtcaatttcagcgctccaacggaaggtaaattgttgagcttgctaaagttggctgttcgaacttcctcttttaagaattgtatgatttctttagctggccattagatgggcatggtttattgcaagtgttaactactttggttgccttgttacatccacaaaatatctctgctcttgcgctgtgctgcgatgcattgttaccgcaggagaagtcactgcaggaggagaacaaggttctgcagaaggagctcgcggagaagcagaaagaccagcggcagcaagtgcaacgggaccaaactcaacagcagaccagttcgtcttccacgtccttcatgttaagggaagctgccccaacaacaaatgtcagcatcttccctgtggcagcaggcgggagggtggtggaaggggcagcagcgcagccgcaggctcgcgttggactgccaccatggatgcttagccacctgagctgctgaaggtttgctctcatcgtcgcagtgtgctagcccaaaatccagcaagtcttccccggaccccggactggccaagcttctccgcctggtgcagtatcgtcgtgatcgcgagaagcagcagcagcggtttgccgtattttttaccaccgtgtataagtagcatatctgcaatgtgtatattttgttcaccgttcctgctg

SEQ ID NO: 2788 - DNA, 1264 bp, Zea mays
  Clone ID: PAT_MRT4577_84409C.1
ctcgaggccggccgggaccgctttaaatccgcctcctcccagcgtctccctcctcccggcctgtcccctcacctcctccccctatctctccaccgccgcagctagctgtgacgtcatgcactcgccggcgccaccgccaccgcatactatctacaattagccagccgtaggcttacctatcctgtgtcaagcaagcctctcgcaagcaacaaggaaggaagctagctagttttatagctgctgtcggcggcggcggctgaagcgacgtgcctgggctaggatttaggttgagatcaggagagggagaaggcggcggcgatggggcgcgggaaggtgcagctgaagcggatcgagaacaagatcaaccgccaggtgaccttctccaagcgccgctcggggctactcaagaaggcgcacgagatctccgtgctctgcgacgccgaggtcgcgctcatcatcttctccaccaagggcaagctctacgagtactctaccgattcatgtatggacaaaattcttgaacggtatgagcgctactcctatgcagaaaaggttctcatttccgcagaatatgaaactcagggcaattggtgccatgaatatagaaaactaaaggcgaaggtcgagacaatacagaaatgtcaaaagcacctcatgggagaggatcttgaaactttgaatctcaaagagcttcagcaactagagcagcagctggagagttcactgaaacatatcagaacaaggaagagccagcttatggtcgagtcaatttcagcgctccaacggaaggagaagtcactgcaggaggagaacaaggttctgcagaaggagctcgcggagaagcagaaagaccagcggcagcaagtgcaacgggaccaaactcaacagcagaccagttcgtcttccacgtccttcatgttaagggaagctgccccaacaacaaatgtcagcatcttccctgtggcagcaggcgggagggtggtggaaggggcagcagcgcagccgcaggctcgcgttggactgccaccatggatgcttagccacctgagctgctgaaggtttgctctcatcgtcgcagtgtgctagcccaaaatccagcaagtcttccccggaccccggactggccaagcttctccgcctggtgcagtatcgtcgtgatcgcgagaagcagcagcagcggtttgccgtattttttaccaccgtgtataagtagcatatctgcaatgtgtatattttgttcaccgttcctgctggggcggccctc

SEQ ID NO: 2789 - DNA, 1536 bp, Zea mays
  Clone ID: PAT_MRT4577_84415C.1
cattccgaccctcgactgcggccgggctgctccctcctcccctcccctccgatcaagtcggggcaacgcgcatcactcgctttaaatccgcacctcccggccggtccccttatcacctcaccttctcctttgagtcctctctctccgccgccgcagctagctgtgacgttatgctctcgccggcgccatagcgccagcgcctaccgtctacaactatccagccttaggcttacctatcccgtcaatcaagcctctcgtaaggaacaaggaaggtagctagctagttctatagctgctgtcgtcgtcgtcatcggcggcggcggcgcctgttcttagaggataaggttgtcctagcggagagggagctagccaggatttcggttgagatcaagagggggagcaggcggcggcggcggcgatggggcgcgggaaggtgcagctgaagcggatcgagaacaagatcaaccgccaggtgaccttctccaagcgccgctcggggctgctcaagaaggcgcacgagatctccgtgctctgcgacgccgaggtcgcgctcatcatcttctccaccaaagggaagctctacgagtattccaccgattcatgtatggacaaaattcttgaccggtacgagcgctactcctatgcagaaaaggttcttatttcagcagaatctgaaactcagggcaattggtgccacgagtatagaaaactaaaggcgaaggtcgagacaatacaaaaatgtcaaaagcacctcatgggagaggatcttgaaacgttgaatctcaaagagcttcagcaactagagcagcagctggagagttcactgaaacatatcagaaccaggaagaaccaacttatgctcgagtcaatttcggagctccaacggaaggagaagtcgctgcaggaggagaacaaggttctgcagaaggagctcgcggagaagcagaaagcccagcggaagcaagtgcaatggggccaaacccaacagcagaccagttcgtcttcctcgtgcttcgtgataagggaagctgccccaacaacaaatatcagcatttttcctgtggcagcaggcgggaggttggtggaaggtgcagcagcgcagccacaggctcgcgttggactaccaccatggatgcttagccacctgagcagctgaaggtttcagcaactcttcccgtttatccgcctggtgcagtatagtatcatcgtgatcgcgagagcagcagcagtgggtttgccgtatctttttttaccaatgtatgtctatatatgtaagtatcaaatctgcaatgtgttaatcaccatttccgctggggcggccctcgtgcagtatcgtcgtgatcgcgagaagcagcagcagcggtttgccgtattttttaccactgtgtataagtagcatatctgcaatgtgtatattttgttcaccgttcctgctggggcggccgcacggtactttacgcatgtaatatatgtgcttcatcaaatcactttcactaccatagcatgtgccggtttgtggtagtttcatgtctcaca

SEQ ID NO: 2790 - DNA, 1245 bp, Zea mays
  Clone ID: PAT_MRT4577_84416C.1
gagggccgccccagcaggaacggtgaacaatatatacacattgcagatatgctacttatacacggtggtaaaaaaatacggcaaaccgctgctgctgcttctcgcgatcactacgatactgcaccaggcggagaagcggggccagtccggggtccggggaagacttgctggattttgggctagcacaccgcgacggtgagagcaaaccttcagcagctcaggtggctaagcatccatggtggcagtccaacgcgagcctgcggctgcgctgctgccccttccaccaccctcccgcctgctgccacagggaagatgctgacatttgttgttggggcagcttcccttaacatgaaggacgtggaagacgaactggtctgctgttgagtttggtcccgttgcacttgctgccgctggtctttctgcttctccgcgagctccttctgcagaaccttgttctcttcctgcagtgacttctccttccgttggagcgctgaaattgactcgaccataagctggctcttccttgttctgatatgtttcagtgaactctccagctgctgctctagttgctgaagctctttgagattcaaagtttcaagatcctctcccatgaggtgcttttgacatttctgtattgtctcgaccttcgcctttagttttctatattcatggcaccaattgccctgagtttcatattctgcggaaatgagaaccttttctgcataggagtagcgctcataccgttcaagaattttgtccatgcatgaatcggtagagtactcgtagagcttgcccttggtggagaagatgatgagagcgacctcggcgtcgcagagcacggagatctcgtgcgccttcttgagcagccccgagcggcgcttggagaaggtcacctggcggttgatcttgttctcgatccgcttcagctgcaccttcccgcgccccatcgccgccgccttctccctctcttgatctcaacctaaatcctagcccaggcacgtcgcttcagccgccgccgccgacagcggctataaaacaagcagcttccttccttgttccttgcgagaggtttgcttgacacaggataagtaaggctacggctggctaattgtagatagtatgcggtggcggtggcggtggcggtggcgccggcgagtgcatgacgtcacagctagctgcggcggtggagagatagggggaggaggtgaggggacaggccgtcccggccggaccgggagggtaccc

SEQ ID NO: 2791 - DNA, 1602 bp, Zea mays
  Clone ID: PAT_MRT4577_84417C.1
ccggccgggatcccggtttcgctataccccctccccctccgatccgtcgcggcagcgctcatcaccgctttaaatccgcctccttcgaggccggccgggctcccggcctgtcccctcacctccctccccctatctctccaccgccgcagctagctgcgacgtcatgcactcgccggcgccaccgccaccgcatactatctacaattagccagccgtaggcttacctatcctgtgtcaagcaagcctctcgcaagcaacaaggaaggaagctagctagttttatagctgctgtcggcggcggcggctgaagcgacgtgcctgagctaggatttaggttgagatcaggagagggagaaggcggcggcgatggggcgcgggaaggtgcagctgaagcggatcgagaacaagatcaaccgccaggtgacattctccaagcgccgctcggggctactcaagaaggcgcacgagatctccgtgctctgcgacgccgaggtcgcgctcatcatcttctccaccaagggcaagctctacgagtactctaccgattcatgtatggacaaaattcttgaacggtatgagcgctactcctatgcagaaaaggttctcatttccgcagaatatgaaactcagggcaattggtgccatgaatatagaaaactaaaggcgaaggtcgagacaatacagaaatgtcaaaagcacctcatgggagaggatcttgaaactttgaatctcaaagagcttcagcaactagagcagcagctggagagttcactgaaacatatcagaacaaggaagagccagcttatggtcgagtcaatttcagcgctccaacggaaggagaagtcactgcaggaggagaacaaggttctgcagaaggagctcgcggagaagcagaaagaccagcggcagcaagtgcaacgggaccaaactcaacagcagaccagttcgtcttccacgtccttcatgttaagggaagctgccccaacaacaaatgtcagcatcttccctgtggcagcaggcgggagggtggtggaaggggcagcagcgcagccgcaggctcgcgttggactgccaccatggatgcttagccatctgagctgctgaaggtttgccctcaccgtcgcgatgtgatagcccaaaatccagcaagtcttccccggaccccggactgtccccgcttctccgcctggtgcagtatcgtcgtgatcgcgagaagcagcagcagcggtttgccgtattttttaccactgtgtataagtagcatatctgcaatgtgtatattttgttcaccgttcctgctgctgtggcagcaggcgggagggtggtggaaggggcagcagcgcagccgcaggctcgcgttggactgccaccatggatgcttagccatctgagctgctgaaggtttgccctcaccgtcgcgatgtgatagcccaaaatccagcaagtcttccccggaccccggactgtccccgcttctccgcctggtgcagtatcgtcgtgatcgcgagaagcagcagcagcggtttgccgtattttttaccactgtgtataagtagcatatctgcaatgtgtatattttgttcgccgttcctgctggggcgc

SEQ ID NO: 2792 - DNA, 1379 bp, Zea mays
  Clone ID: PAT_MRT4577_84576C.1
cggacgcgtggggccaaaaggcactgaagaagccagtcaatagcgagttctactactagtagctagcctgctgatctgttctgttgtttagttcgcaaagccttctgtttcggcgaccatggaggatgagaggaacacacagccttctcggcaggaagaagcacgacgacgaccaggagaagaagaagcagacggatgagctggcgaccggcatggagaaggtcacggtgtccgagcccgagaagcacgggcacaaggaggaggagcacgaggtcgtcggcgagaagaaggagggccttctcgccaagctgcaccgcaccagttccagctccagctcgtcgagcgacgaggaagaggaggcgatcgatgagaacggcgagattatcaagaggaagaagaagaagatgggcctcaaggagaagctcaaggagaagctgccgggccacaaggacggccaccacacggccgcaccgtccccggcgcccgcgcccgtggagacgcatgcccaccaccaggaggaagcgcacaggccgcacgtcgtcccgaccccggccccgccgcctccaccgcacgtccaccagcacgaccacggcgtcgtcgtccaggacgacgtgaagaccgggaccccgccgcatgcaccggaggaggagaagaaaggcctgctggacaagatcaaggagaagctccccggtggccacaacaagaagcctgaagccgctgccgctgccgcaccggctccgcccgtccacgcgccggcgccggcgccgcaggcggagaacgtgagcagcccggatggcaaggagaagaagggcggcttgctgggcaagatcatggacaagatacccggctaccacaagagctcagctgaggaagcagaccacaaggcggacgccgccggcgagcacaggaccagctcctaaggtcgcagtcgcagcgcgtgtcctggccgtggccgggccttgggcgatcagaaggtagctagcgttggcatgtgggttcggttctggtttgcttttaccaaaagtttgtttcaaggtggatcgcctggtcaaggtccgtgtgctttttaaggtggatcgcgtgactggcagtgagtgttgctgcttgtgtaggacgtggtacgtacgggttttattttggttccaagtcaaaagtcacggtcggtctggatgttgtgtactgggtttgttgaattatgagcagctgcgcgttgtaattcggctgggctacctggatgcgttaataattgctttggtttctgcccagcgcgcgaacgtgttagcgtgtaatctctattttgcactatccagcgactaataaaaagaaacggatatatatatatatatatatcaattatcatttggatgttggtactgtgg

SEQ ID NO: 2793 - DNA, 1614 bp, Zea mays
  Clone ID: PAT_MRT4577_84578C.1
cccacgcgtccgaaaaggcactgaagaagccagtcaatagcgagttctactactagtagctagcctgctgatctgttctgttgtttagttcgcaaagccttctgtttcggcgaccatggaggatgaatccctaattaagccaaaaggcactgaagaagccagtcaatagcgagttctactactagtagctagcctgctgatctgttctgttgtttagttcgcaaagccttctgtttcggcgaccatggaggatgagaggaacacccagcagcaccagggcggtgaggcccagcaggacgccgccgatcaggtggacgtgaaggatagggggctcctggacagccttctcggcaggaagaagcacgacgacgaccaggagaagaagaagcagacggatgagctggcgaccggcatggagaaggtcacggtgtccgagcccgagaagcacgggcacaaggaggaggagcacgaggtcgtcggcgagaagaaggagggccttctcgccaagctgcaccgcaccagttccagctccagctcgtcgagcgacgaggaagaggaggcgatcgatgagaacggcgagattatcaagaggaagaagaagaagatgggcctcaaggagaagctcaaggagaagctgccgggccacaaggacggccaccacacggccgcaccgtccccggcgcccgcgcccgtggagacgcatgcccaccaccaggaggaagcgcatcacaggccgcacgtcgtcccgaccccggccccgccgcctccaccgcacgtccaccagcacgaccacggcgtcgtcgtccaggacgacgtgaagaccgggaccccgccgcatgcaccggaggaggagaagaaaggcctgctggacaagatcaaggagaagctccccggtggccacaacaagaagcctgaagccgctgccgctgccgcaccggctccgcccgtccacgcgccggcgccggcgccgcaggcggagaacgtgagcagcccggatggcaaggagaagaagggcttgctgggcaagatcatggacaagatacccggctaccacaagagctcagctgaggaagcagaccacaaggcggacgccgccggcgagcacaggaccagctcctaaggtcgcagtcgcagcgcgtgtcctggccgtggccgggccttgggcgatcagaaggtagctagcgttggcatgtgggttcggttctggtttgcttttaccaaaagtttgtttcaaggtggatcgcctggtcaaggtccgtgtgctttttaaggtggatcgcgtgactggcagtgagtgttgctgcttgtgtaggacgtggtacgtacgggttttattttggttccaagtcaaaagtcacggtcggtctggatgttgtgtactgggtttgttgaattatgagcagctgcgcgttgtaattcggctgggctacctggatgcgttaataattgctttggtttctgcccagcgcgcgaacgtattagcgtgtaatctaaaaaaaacactatccagcgactaataaaaagaaacgggtataaaaatatatatatatatatatatatatatatatatatatatatatatatatatatatatatatatatatatatatatat

SEQ ID NO: 2794 - DNA, 1616 bp, Zea mays
  Clone ID: PAT_MRT4577_84736C.1
ttgggaccctcgaggccggccggggccgtggagtagaggagcacaagtgagctagctagctctagctaggccacgcactgctgcctccttcatcatcaggtcgtgctagctagctagctatagctgggccgggggacgtacgacatcagcgcgcggccatgggcgtggggaagctgatgaacgacgtgaagccatacctggcgatggtgctgctgcaggtggggttctccgggatgtacatcgtctccgtcgcctccctcaagcgcggcatgaaccacttcgtcctcgtcgtctaccgcaacctcgtcgccaccgtcgtcatggcccccttcgccctcctcttcgagaggcgagtgaggcccaagatgacgccgctcatcttcctcaagatcatggggctcgccgtgctcgagcctgtgctcgaccagaacatgtactacctcggcgcgaagctgacgtccgcgaccttcgcctcggcgctggtcaacatcctccccgccatcacgttcctgctggccctcgccctgaggatggagaggctgaggctccggagcctccgcagccaggccaaggtggtcggcacggtctgcaccgtcgccggcgccgtgctgatgatcctctaccacggcccggtggtgccgttcccgtggtccgcgggtcgtcttcaccaccacgtccccgcggcggcggtggagagccagagcagcgcctcctggctcaacggcatctgcatgatcatcggcagctgcctgtgctggtccggcttcttcatcctccagtcgaacacgctgcagagctaccctgcggagctgacgctgacgactctgatctgcttcctgggctcggtgctgaccggcggcgtggcgctcgtggcggagcgccgcgacatgagcgcctgggtcattggcttcgacacccgcctcttcaccgccgtctactccgggatcgtgtgctccggcgtggccttctacgtgcaggggatcgtgacgcaggcgcgcgggccggtgttcgtgacggcgttccagcccctgtgcatgatcatcaccacggttcttggctccaccatactgaaagaggagaccaccctgggaagcgtgattggcgcggcgatcatagtggtggggctctactgcctcatctggggcaagagcaaggaccacctcggcagcaacggcggcaagcccggcgccgcggccgtcgccgagctgcccctgacctcgtcggctcctgcttggtccaacggcaagcaagctctggccgtcgtcgagacgacaccgccttcgtctttgcccaacaagtgcgttcactgacgcgcggatcggagctccatgcatgatgcggaccgtacaccaccgcacactactagtagtgcattgccagtgactgtaagccgccggccgtgtatgatcatgcatgcataccgtcataccgatatgatgtcccatactcccatcgttgcgtttaacactctcgagtttttgataacgtacttgcgtgtgctctgctgtgtgccactgccagtgccaccacaaccaatagtctaatactactacgacaattaagctttgtttagtttgtgcaaggaaagaagagaattaattactactattcgagtc

SEQ ID NO: 2795 - DNA, 1244 bp, Zea mays
  Clone ID: PAT_MRT4577_84738C.1
tacctcgaggccggccggggccgaggagaggaggagaggagcagcacaagtgagctagctgttcatctagctacgccactcctgcctgccttgcctccctccctcagcacgtcgtgctagtaatcgatcagaggggggcgtgacgtacgtacagcagccatgggcgtggggaagctgatgaacgacgtgaagccgtacctggcgatggtgctgctgcaggtggggttctcggggatgtacatcgtctccgtcgcctccctcaagcgcggcatgaaccacttcgtcctcgtcgtctaccgcaacctcgtcgccaccgtcgtcttggcccccttcgccctcctcttcgagaggagagtgaggcccaagatgacgccgctcatcttcctcaagatcatggggcttgccgttcttgagccggtgctggaccagaacatgtactacctcggcgcgaagctgacctcggcgaccttcgcctcggcgctcgtcaacatcctccccgccatcacgttcctgatggcgctggtcctgaggatggagaggctgaggctgcggagcctccgcagccaggccaaggtcgccggcacggtctgcaccgtcgtgggcgccgtgctgatgatcctgtaccacggccccgtggtgccgttcccgtggtccgcgggccaccaccaggcctcagccgccgccgccgccgcggcagcggagagccagagcagcgcatcctggctcaacggcatcgtcatgatcatcggcagctgcctgtgctggtccggcttcttcgtcctccagtcgaacacgctgcagagctaccccgcggagctgacgctggcgacgctgatctgcttcctgggctcggtgctgaccggcggggtggcgctggtggcggagcgccacgacatgagcgcctgggtcattggcttcgacacccgcctcttcaccgccgtctactccgggatcgtgtgctccggcgtggccttctacgtgcaggggatcgtgacgcaggcgcgcgggccggtgttcgtgacggcgttccagcccctgtgcatgatcatcaccacggtcctcggctccaccatactcaaagaggagaccaccttgggaagcgtgatcggcgcggcgatcatagtggtggggctctactgcctcatctggggcaagagcaaggaccacctcggcaacggcagcaagccggccgttgccgagctgcccctcacctcggctcccaacggcggcggcaccaacggcta

SEQ ID NO: 2796 - DNA, 459 bp, Zea mays
  Clone ID: PAT_MRT4577_84900C.1
ttcgaaaaggaccaggtttcattctcatctctcgcaccatcgaccttcaagtctcgctacgtacctagcgaataaaaaaagcagccgcaatggagagcagtaccatggccctctcctccacggacttcgccggcaaggccgcgaacgtgccgtcgacatccgccttcagcgaggcccgcgtgactatgcgcaagacggcgttgaaggactagtcgacgacggcgtccggcatgccgtggtacgggcctcgaccgagtgctgtacctgggcccactgtccggcaatgcgccgagctacctgacgatgcgagttcccgggcgactacggatgggacaccgcggatctgtcctacgacccagagacggtctccgagaaccagtagatgaaggtgtgccactcctgctgcatcatgcattgttgcctctttatgacagtttccacgaacagatcaaccaaaaa

SEQ ID NO: 2797 - DNA, 858 bp, Zea mays
  Clone ID: PAT_MRT4577_84959C.1
ttgggtacctcgaggccggccgggagccagaggatccaactccccttgctatttgggatttctccccgcacggcctgcgagagaaattgtacacatattccctgcctctcgctagcgccttccctccgcaaacggaaggctctcgtgaccaccgggatgtccgccatggagaccgacatcaacgcgccgccgccgcccgccccagctggcgagggatcctctgcggccggtccgtcctcctcccgcaagcccaacaagcgcttcgagatcaagaagtggaacgccgtcgcgctctgggcatgggatatcgtcgtcgacaactgcgctatctgccgcaaccacatcatggatctatgcatcgagtgccaggcgaaccaagccagcgcgaccagcgaggagtgcactgttgcttggggagtctgtaatcatgcttttcacttccactgcatcagcaggtggcttaagactcgtcaagtgtgcccattagataacagtgagtgggagttccagaaatatggccactagttcctgggcaccctcatgtgatgttggggcttacttctagtgactgctaccactcgagtgtatttttttctgccaaacagctccatcttttactgctttggatgcttgcatgtatcacaggtcaattatcactagtagtacgtccacctgggactgtatttggattgttcgttgagaggatagtagttccattttataaatgttatgtggattttcataagtgagcttgaattgtgatgtggtaccatgtctaaaggctggtgtggtcttgtcttgatcttgacttaaggagaaaaagttcgttttactctcaatccatgtggattagccagc

SEQ ID NO: 2798 - DNA, 521 bp, Zea mays
  Clone ID: PAT_MRT4577_84993C.1
atgagttatagttcaataataaaggttttttcacaaagtactttcttatttctggtgaagcgcacctaacatcacacaaaaaactttattattgacactctccctcgattggaaatctaaaagagcccccaccaatgatggaatgctggtagaacgctggtgggtttggcaaagcaagttggtatgaatgccaccaattgctccacttgctagagggtagccagccttcggcgcatcgtgctggtagaacggcaacctctgaccttgtatcaagataggtagcagggctcacaccatcttgctggctgaatggtaagagctgttgctgctgtaaataaacaggaaaattcaatgctgccagttcgttgaatggaagaaatgctgggggtaggcagcatgtaactggctgaatggtagctgttgatgttgcaaataaaaagcaaaaaacaatgcatcttgttgagttgaatggaaggaaactgctgctcctgagagtaggcagcaagggccgctagcacaag

SEQ ID NO: 2799 - DNA, 4136 bp, Zea mays
  Clone ID: PAT_MRT4577_85039C.1
atttggtatcgggtcttttactcacctctatatacaagcaatatagccaactaacagagatagctttgtacaactaatcatgcaggtttagcaaaacaacaaacatatatgagttgttgagtggctattttatttggtatacatgggacaataatggtaggctccgtttttccctgcgaatggtgacagctcttgatttgtcaaaacataacgtcgcacgcagcagcaaactgctccgtgtacccttttcatgctgcacccctgtaatggtgctgctttggccataaatcttgtaagcaagaataaatctcttatatactgtaggaatcaaaggaaaataagcattagcaatttagcattggggtcagctagcggactgtcgatccgatctcctccaatttgggccttccagaaacctccaggatccgactccaatcgaatcgccaaagcagacaggggcgctcgcgggggcgccgagctcgacggggcgagatggccgggaacgactggatcaacagctacctggaggctattctggacgctggcggggccgcgggagatctctcggcagccgcaggcagcggggacggccgcgacgggacggccgtggagaagcgggataagtcgtcgctgatgctccgagagcgcggccggttcagccccgcgcgatacttcgtcgaggaggtcatctccggcttcgacgagaccgacctctacaagacctgggtccgcacctcggctatgaggagtccccaggagcggaacacgcggctggagaacatgtcgtggaggatctggaacctcgccaggaagaagaagcagatagaaggagaggaagcctcacgattgtctaaacaacgcatggaatttgagaaagctcgtcaatatgctgctgatttgtctgaagacctatctgaaggagaaaagggagaaacaaataatgaaccatctattcatgatgagagcatgaggacgcggatgccaaggattggttcaactgatgctattgatacatgggcaaaccagcacaaagataaaaagttgtacatagtattgataagcattcatggtcttatacgcggggagaatatggagctgggacgtgattcagatacaggtggtcaggtgaaatatgttgtagaacttgctagggctttaggttcaacaccaggagtatacagagtggatctactaacaaggcagatttctgcacctgatgttgattggagttatggggaacctactgagatgctcagtccaataagttcagaaaactttgggcttgagctgggcgaaagcagtggtgcctatattgtccggataccattcggaccaagagacaaatatatccctaaagagcatctatggcctcacatccaggaatttgttgatggcgcacttgtccatatcatgcagatgtccaaggtccttggagaacaaattggtagtgggcaaccagtatggcctgttgttatacatggacactatgctgatgctggtgattctgctgctttactgtctggggcactcaatgtacccatggtattcactggtcattctcttggcagagataagttggaccagattttgaagcaagggcgtcaaaccagggatgaaataaatgcaacctataagataatgcgtcgaattgaggccgaggaactttgccttgatacatctgaaatcataattacaagtaccaggcaagaaatagaacagcaatggggattatatgatggttttgatctaactatggcccggaaactcagagcaagaataaggcgtggtgtgagctgctttggtcgttacatgccccgtatgattgcaatccctcctggcatggagtttagtcatatagcaccacatgatgttgacctcgacagtgaggaaggaaatggagatggctcaggttcaccagatccacctatttgggctgatataatgcgcttcttctcaaacccccggaagccaatgattcttgctcttgctcgtccggatccgaagaagaatatcactactctagtcaaagcatttggtgaacatcgtgaactgagaaatttagcaaatcttacactgatcatggggaatcgtgatgtcattgatgaaatgtcaagcacaaatgcagctgttttgacttcagcactcaagttaattgataaatatgatctatatggacaagtggcataccccaagcaccataagcaatctgaagttcctgatatttatcgtttagctgcgagaacaaaaggagtttttatcaattgtgcattgattgaaccatttggactcaccttgattgaggctgctgcatatggtctacccatggttgccacccgaaatggtgggcctgtggacatacatcgggttcttgataatggaattcttgttgacccccacaatcaaaatgaaatagctgaggcactttataagcttgtgtcagataagcacttgtggtcacaatgtcgccagaatggtctgaaaaacatccataaattttcatggcctgaacattgccagaactatttggcacgtgtagtcactctcaaacctagacatccccgctggcaaaagaatgatgttgcagctgaaatatctgaagcagattcacccgaggactctctgagggatattcatgacatatcacttaacttaaagctttccttggacagtgaaaaatcaggcagcaaagaagggaattcaaatgctttgagaaggcattttgaggatgcagcgcaaaagttgtcaggtgttaatgacataaaaaaggatgtgccaggtgagaatgctaagtggtcgtcattgcgtaggaggaagcacatcattgtaattgctgtagactctgtgcaagatgcagactttgttcaggttattaaaaatatttttgaagcttcaagaaatgagagatcaagtggtgctgttggttttgtgttgtcaacggctagagcaatatcagagttacatactttgcttatatctggagggatagaagctagtgactttgatgccttcatatgcaacagtggcagtgatctttgttatccatcttcaagctctgaggacatgcttaaccctgctgagctcccattcatgattgatcttgattatcactcccaaattgaatatcgctggggaggagaaggtttaaggaagacattaattcgttgggcagctgagaaaaacaaagaaagtggacaaaaaatatttattgaggatgaagaatgctcatccacctactgcatttcatttaaagtgtccaatactgcagctgcacctcctgtgaaggagattaggaggacaatgagaatacaagcactgcgttgccatgttttgtacagccatgatggtagcaagttgaatgtaattcctgttttggcttctcgctcacaggctttaaggtatttgtatatccgatggggggtagagctgtcaaacatcaccgtgattgtcggtgagtgtggtgacacagattatgaaggactacttggaggcgtgcacaaaactatcatactcaaaggctcgttcaatactgctccaaaccaagttcatgctaacagaagctattcatcccaagatgttgtatcctttgacaaacaaggaattgcttcaattgagggatatggtccagacaatctaaagtcagctctacggcaatttggtatattgaaagactaaatctttgatctttgctggtcagcagaggaatcaaagcagggaatgtaggatcgaggagagtgacaggacttcccctctgtgcacttcgccgaaaagtaataatgggattgctatgcatggcccttgttgtacactagaaaattgggcacgcaaacttgtgtcagtttttccgctgttgcgaaattcagtgatggtgtttttgtaactataccaacctgtgtcagttttgccgttgttgcaaaactcagtgatggtgttttttgtaattattatacatccgaataataagactggtgtttccagacagactatgcaagctaaggggaaatcacgattttcctagatcaaatatgtaatatgttcttttccaaaaaaaaaaaaaaaaaaggccaaaaaaaaaaaaaaaaaaaaaaaaaaaaaaaaaaaaaaaaaaaaaaaaaaaaaaaaaaaaactcgaggagggg

SEQ ID NO: 2800 - DNA, 457 bp, Zea mays
  Clone ID: PAT_MRT4577_85042C.1
ttttctctttctgcaagtgctgctaccgcaacgggttttccacaatgctgacaaggggctatagcttgcttggttcccccatacctctgaccagcggggtcctcaggatgtgaaaacccaatccttgaaccctacaggatccaacaggcaatcggaactagcatcttacctctatcacccttgtgcctccaacaaccgtaaggcctattacagcatttacctttgttgcattcggtggcacaaaacatgaaggcacaacagctacaacaacttgtgctaggaaaccttgctgcctactctcaggaacagcagtttgttccattcaaccaactggctgcattgaactctgcggcttatgtgcgacaacagctaccattcagtcagctagctgatgcctacccccagcaatttcttccattgaaccaactggcagcagtgaactctgctgcttatttac

SEQ ID NO: 2801 - DNA, 268 bp, Zea mays
  Clone ID: PAT_MRT4577_85072C.1
gcctcctctcgagttcgatctgtttgctcccccaaacatgtcggcccgcggcaaggaaggcaaggccctgggtaaggccggcccaaaacgccaccgaagggtgctccgcaacaccatccagggcttaacaaacccggccatccgaaggctgccccccagggccggcttgaaccccatttccggcctaatttacaaggagacccgcggcgtgctaaaaatctttttggagaacgtaatccggaacgccgtaacctacacggagcacgcc

SEQ ID NO: 2802 - DNA, 1325 bp, Zea mays
  Clone ID: PAT_MRT4577_85143C.1
acctcgagccggccgggataccaattgttcttgacgtcgcttgcattctattccaccgctcaccacaagaagccacctcaggctcacgccgcggttccacacgagcaaatcccgccgcttcctccccacgcaccccttcccatccttcccgaagcacgaggcgagccgggccgccggatatggcgccggcggcgccgtacggcggggccgagtcgcagcggcaggcggacctactcaagcaggagggcaacgcctttttcaggaaggaacgcctcagcgccgccatcgacgcctacaccggggccataactctttgcccaaatgttgcagtatattggaccaaccgagcactttgctataggaagcggaatgagtggactagagttgaggaagattgcagaacagctatccagcttgacagccagtctgttaaggcacattacatgctcgggttatctcttgtcaacagccaaagattatcagaaggaataaaatcactggagaagtccttggagcttggaaggggtgcacatcctgcaagctacatggttgaagagatatggcaggagctttctaaagcaaaatacatcgaatgggagagcttatcaagagaccgaacttgtcaactgcaaaagctgaaggtagcatgtaaagaggccctaacgagttacaacagccttgataacccagccgcaggtgcgccagtagaacagctaaatgagctcgaggaagttttcaagaaggctgcaaagactgatactccagcagaagtacctgaccatctctgttgcaaaatcacacttgatatcttcagagacccggtgatcaccccgagcgggattacctacgagagggccgtacttctcgaccaccttcaaacggtggggaggtttgaccccgtgacccgtgaggctcttgaaccgcaccagctggttcctaatcttgccatcaaggaagctgtgcatgcgtttttgagtgagcatggttgggcttacaagattagatgatcgctttggaatacaggttttggatactgtcggatgtgacggtgggatttttttgttcactgttggggggcagattttaatctgggatggctgcgtacagattcaccttctccagttgtgtacatatgagatgctcattatgatagtaattgtgaacagtacaccaaaggaagtgaagttgagcgtctgagttcctgactgcatcttcaaaaaaaaaaaaaaaaaaaaaaaaaaaaaataacgagggcgcggccccccccccaaaaaaaaaaaaaaaaaaaaaaaccccgccccccccctctttttgttttttttttt

SEQ ID NO: 2803 - DNA, 293 bp, Zea mays
  Clone ID: PAT_MRT4577_85159C.1
ctggcttctcctccccctcttaccaagtccttctcgggttagggttccttagggtattgtggaggggcgatggctgcggctgatgtggagtaccgatgcttcagttgcgggcttgcctgggccaccagcaacgagtcgctggagaatgccttcgccttctacggtgagatcctcgactccaatgtcattaccgaccgggagactggggagtttccgtgtcttatggcttctttaccttttcttttgagaactccatgcttgtcgctattgtgatcattatctgtaatggtgtt

SEQ ID NO: 2804 - DNA, 157 bp, Zea mays
  Clone ID: PAT_MRT4577_85189C.1
ttttagaggatccaagtttacgtccgcgtgcatgcaacgtaatagtttttttatggggtcacctaaattaaattcactggccgtggtttaacaacgtcgggactggaaaacccttgccgtacccaaattaaacggcttggaagaaatcccccttttc

SEQ ID NO: 2805 - DNA, 1870 bp, Zea mays
  unsure (1)..(1870): unsure at all n locations
  Clone ID: PAT_MRT4577_85206C.1
agccttctccgttcctcctcgacgcgtctcttccacagccgcaacctctatccctcgtctggtatcgtctctcccacacccctctgccccaacccagaaaaaccctcgaaaagcggcggcggcgcgacatggcggaggtcgaggctccagctgctgcggttgcggcggcgacccctgaggtggcgacggtgaccgagggcggagccgctacggaggcgaagggtccgcacaagctgcaccgccagtggaccttctggtacgacatccagtccaagcccaaacccggcgctgcgtggggcacctccctcnnnnnggcgtacaccttcgacaccgtcgaggagttttggggcttgtatgatcatgttttccgtccaagcaagttgcctgggactgctgattttcacctattcaaggctggagtagagccaaaatgggaagacccagagtgtgcaaatggtggcaaatggactgtcccatgcaacagaaagccaacctttgagaccatgtggcttgaaacgttgatggctcttgttggggagcagtttgatgaaacagatgacatttgtggaattgttgctagtgtccgtccaagaggagataagcttgcattatggactaggactgccagcaatgaagctgtccaggtaaacattggcaagaagtggaaggatgtcatcgactacaacgacaagatcacgtacactttccatgacgactcgagaagggataagccaagcagaggtggacggtacaccgtgtaagttgcacacgaagaaggtcgttgttgttgattggaagtggagagcggaggtggggattttcttctgggatcgtcgccgacttcatttaatacagcctcagcttacctgaggcaattttcgcacctgttatgatgttattttgctctcagacagcttatgtagcacaagaaagagatgttggagacattgacgatttctgtatggcactagatttctatcttaatatgccccgattcaacagcacccagtcgagtcannnnnnnnnnnnnnnnnnnnnnnnnnnnnnngaattcggcacgagcccaagtatacaacacttaagcccttggctgatagagtgcttgtaaagattaactcttccgaggagaagacaactggtggaatcttgctccctacgactgctcagtccagacctcaaggtggcgaggtagttgctgttggagaaggaaggataattggggataagaaagttgatgtcagcattcaggttggagctcaggttgtgtattctaagtacgctggaaccgaggtcgcgttgaacgatcacagccatctggttctcaaagaggatgacgttataggtatcttagaaactgatgacgtgaaagacatgaagcctctgaacgaccgtgttctaatcaaggttgctgaagctgaagacaaaactccaggaggcctactgcttacggaaactgccaaggagaagccatctatcggaacggtcgtagcggttggcccaggnnnnntggacgaggatggcgagaggctcgcgctgtccgtctccgcggggagcactgtcctgtactccaagtacgccggcagcgagttcaagggcgccgacggcacgaactacatcgtgctgagggcgtcggatctgatggccgttctctcctgaactgggcttgggctggaggacgaacgaggtgcaggtgcaggagcaggcttagcaataccgtaggattcctcnnnnnnnnnnnnnnnnnnnnnnnnnnnnnnnnnnttgtcttgtttgactgtcttctgaggaaccgaacaacagtaataagcacaccgatgccgttcatacagatcacagtctnnnnnnnnnnnnnncacgacgtcgtgccgaa

SEQ ID NO: 2806 - DNA, 1237 bp, Zea mays
  Clone ID: PAT_MRT4577_85208C.1
cattgggtacctcgaggccggccggggtttttccccttcgcgtatcttcgtccgccgcaacccttcacgtatcgtctctctctcacacggtcacacccctgacctctctcccctccccctccccctccccctcccagaaaagacccctcgaaaaacggcggcgctgcgacatggcggaggtcgaggctccagctactgcggtcgaggctccagctgctgcggtcgcgacgacgacccctgaggtggcggcgcccgaggccggagccgctacggaggcgaagggtccgcacaagcttcaccggcagtggaccttctggtacgacatccagacgaagaccaagtccggggctgcgtggggcacctccctcaaaaaggcctacaccttcgacaccgttgaggagttctggagcatgtatgatcagatttttcgtccaagcaagttgtctgggaatgctgattttcatctattcaaggctggagtagagccaaaatgggaagacccagagtgtgcaaatggtggcaaatggactgtcccatgcaacagaaaggcaacctttgagaccatgtggcttgaaacgttgatggctcttattggggagcagttcgatgaaacagaggacatttgtggaattgttgctagtgtccgtgcaagaggagataagctggcattatggactaggactgccagcaatgaagctgtccaggtaaacattggcaagaagtggaaggatgtcatcgactacaacgacaagatcacgtacactttccatgacgactctaagagagacaagcccagcagaggtgggcggtacaccgtgtaagctggacgtcaagaaggccgttgctttggattggaattggagagcggaggtggggattttcttctgggatcgtcgccgactttcgtttgattcagcttttacacgaggcagttttcgccgctattacaatgttattttcctctcagacagcttatgtggtacaagaaagagacgttggagacattgacggtttctgtatggcactagatttctatcttaatatggcccccccggttcagtagcaaccccaacgagtcatttgctttttggagatccctgcaatgcatggccatgttttagatcttatatatattgtactgtatataaaacgtttgtgatctgtggagccattggcaccttgcatgcaaatgtgccctgtcggtaaggtattggcatttaaaaaaaaaaaaaaaaaa

SEQ ID NO: 2807 - DNA, 1167 bp, Zea mays
  Clone ID: PAT_MRT4577_85212C.1
agtcaaactcccaacacccatctttatctcatcgtcatcattagaaaggccgaagccttctccgttcctcctcgacgcgtctcttccacagccgcaacctctatccctcgtctggtatcgtctctcccacacccctctgccccaacccagaaaaaccctcgaaaagcggcggcggcgcgacatggcggaggtcgaggctccagctgctgcggttgcggcggcgacccctgaggtggcgacggtgaccgagggcggagccgctacggaggcgaagggtccgcacaagctgcaccgccagtggaccttctggtacgacatccagtccaagcccaagcccggcgctgcgtggggcacctccctcaaaaaggcgtacaccttcgacaccgtcgaggagttttggggcttgtatgatcatgttttccgtccaagcaagttgcctgggactgctgattttcacctattcaaggctggagtagagccaaaatgggaagacccagagtgtgcaaatggtggcaaatggactgtcccatgcaacagaaagccaacctttgagaccatgtggcttgaaacgttgatggctcttgttggggagcagtttgatgaaacagatgacatttgtggaattgttgctagtgtccgtccaagaggagataagcttgcattgtggactaggactgccagcaatgaagctgtccaggtaaacattggcaagaaatggaaggatgtcatcgactacaatgacaagatcatctacactttccatgacgactcgagaagggataagccaagcagaggtggacggtacaccgtgtaagttgcacacgaagaaggtcgttgttgttcggactggacagagggtgagagtggagttttgtgctgagatcggcaccagctttcatttaatacagcctcagcttacctgaggcaattttcgcacctgttatgatgttgttttgctctcagataggtttatgtagcacaagaaagatatgttggagacgttgacgattttgtatgcaactaaatttctatcttaatatgccccgattcaacagcacccagtcgagtcattgcgttctggagattcttgcagcgcatttccatgtttaagaccttattataaatgtctggcattcgtggatcaaaaaaaaaaaaaaaaaagtggtc

SEQ ID NO: 2808 - DNA, 342 bp, Zea mays
  Clone ID: PAT_MRT4577_85296C.1
acctgatccttactttccgtatttctcacacactaccctgagccttgctgccacgagagtgagccgcagagggtacgtggcgaggctgctcagatacgtctgaggcctgtgcagctgcgcccgatcgatatcaagatcaaccgccaggtgaccttctgcaaacgcctgaacgggctgctgaataaggcccaccagatctccctgctctgcgacgcagaggtcgcgctcatcgtcttcttcactaaggggaagctatacgagtactctagccattccaacatggaaggcattcttgagcgttaccagcgttactcatttgaagaaagggcaactcttaaccca

SEQ ID NO: 2809 - DNA, 215 bp, Zea mays
  Clone ID: PAT_MRT4577_85406C.1
caatactctatagtgagtcgtattaagtgtcaggttacgagcaacaacgcagtgatgaggtcatccagcagcaatgtccagcatcgggcagtccttctacgctggcgacgccgaggcggagggcgagtaccacgtggagcacgcggtggagtgcgtcaacgacaccgccggagccgcggacgacatctcgcaggtgtagcagcaccgcgccacca

SEQ ID NO: 2810 - DNA, 464 bp, Zea mays
  Clone ID: PAT_MRT4577_8543C.1
ctcctttttcttcactccgcttttgcttggttccatcgggccggcacgggagaagctagctagctagcatcagctctggtggtgtgtgtgtgtgtgtgtgtgtgggagggtagctgcacttggggctagctggaaggtcgggagccatggggaggggcctggtggagctgaagcgggtcgaaaacaagatcaaccgacaggtcaccttcgccatagcgcctcaacggcctgctgaagaaggcgtacgatctctccgtgctctgcgacgcccatattcgtgctcatattcttctccaaccgaggaaagctatacaagttctgcatcgtaccgagcatcacgagaacacttgagaggtactaaaaaaacaattatgcaggcccacatactgctgtacagaacacatagaacgatttaactcacaacactcccaacgagtaccttaaactgaaagcaaaggtggata

SEQ ID NO: 2811 - DNA, 1981 bp, Zea mays
  unsure (1)..(1981): unsure at all n locations
  Clone ID: PAT_MRT4577_85444C.1
ccctcgtaggctggccgggaaaaaaaaaaaaaaaaaaaaaaaaaaaaaaaaaaaaaaaaaaatcagtgcctttccccttccttgtttgctgaagtccctggtgtggaccgtggagtctcagggagaagcgcatgcgcacgccaatcggcaatccaccaaagattccgttctcccagtcgcctctcccagtcccagatctcgttcactcgcactcgcgcaaccccgcggccccgcgcctaatggcatcctgtggcgccggcgacgccgcgtcagcgcagccgagggccagtatctcgcacgtcatcttcgatatggacggccttctcctcgacacggagggcttctacacggaggtgcaggagaagatcctagcgaggtacgacaaggtgttcgactggtcgctcaaggccaagatgatgggcaagaaggcggccgagtctgcccgcatcttcgtcgacgagtgcggcctcaacggcctcctcacccccgagcagttcctcgaggagcgcgagagcatgctccaagcgctcttcccatcctgtaccaggctgccaggagtactacgtttggtccatcatcttcatgccaacggagtaccgatggctgttgcgacaggatcccataaacgccattttgcactgaagacccagaatcaccaggaaatgttttccctgatgcatcacgttgtcatgggtgatgatccagaggtgaaggctggcaaaccatcccctgatatttttcttgctgctatgaggaggtttgagggcggcgtagaacctagcaagtgcttggtttttgaagacgctccttcgggtgtagctgcagcgaaaaatgccggaatgtctgtagtgatggtcccggatccaaggctggatgtttcgtatcacaaaggagctgaccaagttctcagttcattgctggacttcaaacctgccgaatggggcttgccggcatttaaagagtagacattccatacaagattacaagattataagagtctagtgaagaagaatgtgagatactccctaagatgcaaattaaagagtacaattctataagatgctgctcaaggaaaattccataaaatgttggtcaaacatacaattgaacattcttgtcgcctcttaactatgtctcaccaaattactctgaattagttcggttacgattccgatataataatatccaagnctgtagttttgtgccaactttgaagcgtgtagtgagaaagttgtttcagagctagttggaagcgaaaggctggggagcaacaacagtgccgaattgnnngctgaattgctggagagtatggaaaaggctgaaaatgttcgttttggcgggaatggagttagtcaaggtggccttccagaagagttagaggtatgaacaaggatacatcgtggaaatcattactgaggatcagtggcgtcaacgacccaaaattgaaggaagaattgtggagatagccaagttctaccgcttgctgggtggaatggtaagtagctcaactcccaagtttccttctggacccagatttgcaattgcggaggtttctctgacaggagatggtcgaaaatcatgccttgtaacggcatggcnnnnnccaccaaagaagatttcgtgtaagggcatagtcgaatattatgtcttgctggtacactctagatcagcatggacttttagnnnnnagnnnnnncttgttgagcagctggcttcccagagttgacttgtttgagtctgtgatgcccctgccatgctgttttctagaatagaactagatgagatgctgtgtcccctaaggcccttttgtacctctcnnnnnnnnnnnnnnnnnnnnnnnncnnnnnnnnnnnntggtacccttcatgtgatgattttgatgagttataaggtcagattttctgttttggtgctnnnnnnnnnnnnnnnnnnnnannnnnnnnnnnnnnnnnnnnntcgagagtcttctagacgccgcggg

SEQ ID NO: 2812 - DNA, 1773 bp, Zea mays
  Clone ID: PAT_MRT4577_85466C.1
cctcccactagtgcactgtctctcttcaaagcagctgcattggccgaggccggccgggctactgtgccgcgcgccctcccttctctctaatgatagcatagggagagaaggcatactccgaggcatccttctcctttccctctccttccccaaacccttttcctctttccctcgccccaagaacttcatctcatctccaggcgccccttttgcgcttgcgcaggaggagctcacggggacagtgggcggagagctcgatcgctgcaccactacttcactggaggtccgcccactcccatggaggagatcacccaacactttggagttggcgcaagcagccacggccatggccacggccagcaccaccatcatcaccaccaccaccacccgtgggcatcctccctcagcgccgtcgtagcgccgctgccgccgcaaccgccaagcgcaggcctgccgctgaccctgaacacggtggcggccactgggaacagcggcggtagcggcaacccggtgctgcagcttgccaacggtggcggcctcctcgacgcatgcgtcaaggcgaaggagccctcgtcgtcgtctccctacgcaggcgacgtcgaggccatcaaggccaagatcatctcgcacccacactactactcgctcctcactgcctacctcgagtgcaacaaggtgggggcaccaccggaggtgtcggcgaggctgacggagatagcgcaggaggtggaggcgcggcagcgcacggcgctcggcggcctggccgctgcgacggagccggagctggaccagttcatggaggcgtaccacgagatgctggtgaagttcagggaggagctgacgaggccgctgcaggaggcgatggagttcatgcgaagggtggagtcgcagctgaactcgctttccatctccggaaggtcgctgcgcaacatcctttcatctggctcttctgaggaggatcaagaaggtagcggaggagagaccgagctccctgaagttgatgcacatggtgtggaccaagagctgaagcaccatctcctgaagaaatacagtggctatctaagctcgctcaagcaagaactgtcaaagaagaagaagaaagggaagctccccaaggaggctcgccagcagctccttagctggtgggatcagcactacaaatggccttacccctcagagactcagaaggtggcactggctgagtctaccgggcttgacctgaagcagatcaacaactggttcatcaaccagcggaagcggcactggaagccatccgaggagatgcaccacctgatgatggacgggtaccacaccaccaatgccttctacatggacggccacttcatcaacgacggcgggctgtaccggctcggctagccaccggtatctcgcttccatttcacaccccacggcctagctataaagactaatggttccaggtgtctgaagtactgaagacaggggggctagctatctaatgtttgtgccgcacgcatgagctgtaaggaggccatgcttaattattctgttgccgttgctactctatctatatgcgcctatgcctccgtgcatgaactatgctttaggtggttgctgctccacactgtggtggtgtgcttttgcttttgtgtggtcgtattgtatgcgtaacctgacagatggatccctgattgctacatgtttgaataatttgcatgatctagctagtttctgcctaaaaaaaaaaaaaaaaaaaaaaaaagacaaaaaaaaaaaaaagaaaaaaaaaaactc

SEQ ID NO: 2813 - DNA, 357 bp, Zea mays
  Clone ID: PAT_MRT4577_85513C.1
ataatgcacattattgtaccaacaatggcagccaaattattttgactccttatgctccttggtctttctgcaagtgctgcttcgggcaccatgttcccacagtgctcacaagctactatagctttccttcttcccgcgtacctgttaccagcggcgtctttacgctgtgaaaaccacacattttcaaccctatgggatccaacaggcaatcggcgctggcatatgacctttatcacccttgttgctacaacattaatacaccctattacagcagtgtccttcggtgcattgattggcacaaaacatcaaggcacaacaactacaacaacttgtgctagctaaccttgctgactactc

SEQ ID NO: 2814 - DNA, 1282 bp, Zea mays
  Clone ID: PAT_MRT4577_85555C.1
cctcgaggccggccgggaatctcgcagtcctttcttcctccgacggtccgacctccgcagcgaatcggaccaggggatagggttccgccgcgcctctccaaccaggcgccactcgccagggtctaggctgatcatggaaggaaacgccgcagccgggaagaggtcccggacggagacggcgaacggggctgccggcggcgggaagcgctccaaagacatggagtcatttcaaactggtctatcaagcaaatcgaagccttgcaacaagtttttcagtacgattgggtgcccgtttggtgagggatgtcgttttctgcactttgtccctggcggttacccggcagttgcaaaaatgctcaatctaggtagccctgctgtatctgcgccatcaagaactcatgtggatcacgccgctcttactggcgcctctcattcagcttcgtcaggcaagacacgcatgtgcaccaagtacaatactacagaaggctgcagatttggtgataagtgccactttgctcatagcgaaagagaacttgggaaaccagcgtacatgccttatggagaacctcctatgggcggtcgatttggaggccgacctgaacctgtgcagccagctgccatgggccctccagcaggaaactttggtgcctcggcgactgccaagatcagtgtggatgcgtctcttgccggtggcataattggtaagggcggggtcaacactaagcagataagcagagttacaggcgtcaagctctgtatccgcgaccacgagtctagccccaacctgaagaacattgagctggaaggcaattttgaccagatcaagcaagccggcgaaatggtgagggacctcatcgcgaccatcagcacgagcatgctggcgaaaaactcatctgctgccgtggctccatctggaggccgaggcggtggtctgggtggcaagagcaactacaagacgaagctatgcgagaacttcgtgaagggtgcttgtactttcggcgagcggtgccactttgcccatggcgagaacgagcagcggagaggtgctgtttgagagttgaggtgccaactccaggcatgacatgtcctgtgctctccatttgcttctctgaatttcctccttgtagcgttagacggttagactgtcgtattgctatttcaatggtttcaactgagttcagctttaagaaaacgttaatctgttgtgcccctgaatgttgtgacttgtcagtaagttagcagctgctagccaatcttgtttggacggtcatacattcatctt

SEQ ID NO: 2815 - DNA, 205 bp, Zea mays
  Clone ID: PAT_MRT4577_85632C.1
gcctgcgagggaggagcacaagacggggggcatcctggatcgctcggggggctccagctccagctcgccggaggacgacggcctgggcggacggcggaagacgggcctcaaggagaacatcaaagagaagctgcccggaggccacaaggaccaccagcatgccacggcgacgaccgggggcgcctaccggcagcacggacacacc

SEQ ID NO: 2816 - DNA, 214 bp, Zea mays
  Clone ID: PAT_MRT4577_85749C.1
gggacctctccctccttcaaccttggctagctagccagggagggagtccatgaattccaggagaagcctcctctcttcgcccctctttgctagctcgtctccaaacttgaggagcagtgcttccgtgtactcctccccatccccatcccgcaccacagttccaatgatacatgacaccagcagcaggagagcattcacggcgtgccactactgg

SEQ ID NO: 2817 - DNA, 487 bp, Zea mays
  Clone ID: PAT_MRT4577_85964C.1
ctctcaccaatggtgtgttcggtatgtgaaaacccaattctttaaccctacacgatccaacaggcaatcgcagctgtgatcttacctttatctcccttgttcctccaacactcatcagacctattacagaagatacctttggggcatttatagtgacacaacatcagggcacaacaactacaacaacttgtgctatcaaaccttgttgtctactctcagaaacagaagattctttcatttaaccaactatatgcattgaactctgctttttatttgcgacaacaacaactaccatttagacagctatatgttgtctacacccagcaattttttttattttaccaactgacagcattgaactctcctgcttatttacagcagcaacaactactatcatttagccacctatctgttgtgagacctgctatctttttgacacaaacacacatgttgtcgctctatcagaacgctgtgcctatagctgtga

SEQ ID NO: 2818 - DNA, 270 bp, Zea mays
  unsure (1)..(270): unsure at all n locations
  Clone ID: PAT_MRT4577_85988C.1
tctctttccgatccgccgagtgcacaccagcnttgcctcactccgatcgagatggagggccgccnagggcgagaagaagatgatcaccctcaaaagctccgatggcgaggagttcgaggtgagaagaggcggtggctatggattcgcagaccattcgccacatgatcgaggatgactgcgccgacaacggcatccctctttctaacgttaacttcaagatcctatccaaggtaatcgagttctgcaacaagcacgtacattgcctcgtcg

SEQ ID NO: 2819 - DNA, 383 bp, Zea mays
  unsure (1)..(383): unsure at all n locations
  Clone ID: PAT_MRT4577_86049C.1
ggggggggggcacatggcggctctctgtttgacactagggtaccatacactaatcaccggcgttcgtcgcaggtggcgagcccanaggaggaaggcgaacaagaagaaccgcaggagaaaagactaantacgcctcctagcggcaatggnccctcctggtagtncggcgccaagctagacccagcntaagaagatgaagaaaaaaactaaaagctagctctaggcggggcggacgcgcttgtggccggngccggcgccggcgcggccgttattgccggggccggaggagtcgccctcgggggacgcgtggtccatggtgcgcgcgaggggggcggngaggtcggngtaggggccgcgcgcgcggcggctgttggtggtgggct

SEQ ID NO: 2820 - DNA, 1920 bp, Zea mays
  Clone ID: PAT_MRT4577_8623C.1
ccggccgggaaaaaaaaagacggactttttcttagaggagccctagagctgaaacctgcagaggaagccccgttaatctattctccttgcatccacaccgacgggcaattggtgcgccgtcttctccgtccgcggcggccatcttggtagcggcccgcatcccctcggccctccaaatcaacgaaccagcgcgtccccgctcctccccacgccacgggaaacttccagcaaaaggtcgcgccatcgataaggggagaaaaggagaagtgtcgccgtccccgtcagcgacggcgctggtaccgacggtccccgcgtcgtgtgccttcctcctccgcgagttcgacgacccgctgtgcgtctgctctcttccgcgcgcccaatcctcgtcgagtcgtcgtgccgctgattgacacagcctagatgtgacagatctactttgttccttgctactttttggcatggtcactccctatttgccatcatcgcacaaccatcgccgaaggctgccaattctattgaaaataggatttttgttaatgatgggagaaaataaattgatgggcaaaagatgggaggacatggacactgatgtccttgtgaagatattcaaggaactaaatttggttgagttgtcaccggtatctcaagtttgtcgtttgtggcgcttggcctgttcagatccacttatttggggcactcttgactttggattgttaaaatccaattttattcagacaagagcatcaccatatatttgggttgatgataggtctgacaggagacttgcaagaatactacgggtggctatggcaattagctgtgggaacgtcaactgcatgatatttcattacaatttgttcatgaaagatgagcaccttcatttcatctcagaaagatctcctcatttaaaacggttggttatgccagcatggaaccgcatcaccaaagtgggaatatgtaatgctatccaaaggtggcaggcgctggagtccttgacaatgcctaccatcggacatcctccatatattatggaagagatagcaaggagctgcaagaatttcacagaacttaagatcatgggctcatttgatcaacaatttgcctcggcgattttgcagttccttccaaagctgaaagtgctgagccttcgttgctcgaaggtgtccatggatgcactgcaatgtttgctgaactcgatggagtatcttgaggttctgaatatttcacactgcctgctgttggttgtcgcggcaaatgggcggaagcaagtggttcatgaactggacagccaaattctcgagagagcttcacggctgcgtgaattccactactgccaaagtaggttgtgcgtcgcgtgccagcggatggtggtggatgaaggcatcatgcgctggtacaggtacgaggattggttttggcgtcgggatgaggtgaggtcccttgatctgcaggattatgggaagctgtttgatgttggttgcgagaggttgacgtctgtggattagatgctaataataggggagcaaaacccgccctcctcagtctagaaacttgtttattggcattcataaaacatagcaagtgatgaggggtaacagtagattaataatatcgataacaatgtgcgtgaatggtgtgcgcgtgtttagctactgtaaatccatgaatagttcgtgttgtttggaggagtttgttatagccagtatggtgtcaagagtatctctgcaatttgtttttaagtgatgtggcattggacatgaatagtatttggctttatacgctagagcgtaaaaggctagacctgatactgctagttaggctgtggccagtgcacacgcaaaacactgttttatattgcagattgtactgtttataggatatggagtttgaaaaaaaaaaaaaaaaaaggcccctagggcc

SEQ ID NO: 2821 - DNA, 671 bp, Zea mays
  Clone ID: PAT_MRT4577_86264C.1
gtcggtcgggtcgggaagcttatcacttatcatccccgtccagcacctctctccatgtctctgctccgccggctccttcttgatccagccgaaccagtgatcatcatgtgcggtctcgcgcggagtaccacgttcaaatccaagggcgacgccgccgcgtgcatgaggtagccgcagaacgctggaaccgcccggaataacggattcatcgtcatcaagaaccgcccctgaaagggtgtggaggtttctacctcagcatactgggaaaaatggacatgccaaatgccactttgttggcatagacatattcaacgggcaagagctcgaagatattgatccttcgtcacacaactgagatattccacatgcgcaccgaactgagtaccaactgtattgatatatcacacgatggattggatatccttcttacttcaaatggcaacactaaggaggatcttagactcccaactgatgacactcttgggtgccagatcgatgaacggtttgcaagcgtgcatgatcctggtgagaatgtccagactgctatggaggaggagcatatctgcgcgctgaatgatgaagtccccgatcaacttccctgccttggaatactgtatctcttaacctaaatcgacaccacaagtgtatcaaggattgctacagagacctcc

SEQ ID NO: 2822 - DNA, 261 bp, Zea mays
  Clone ID: PAT_MRT4577_86377C.1
cccatttcgacccatgcgtacggcgaacatacaaagcacattagtgtactaacattttcagccaaaatattttgcttccgtatggtccttgatctttctgcaagtgctgctaccgcaaccattttaccacaatgctcacaagctcctatagcttcctttctttccccatacctatcaccatcggtgtcttcagtttgtgcaaaccctattctttaaccctacagcatccaacaggctttttgtagcacgcatattaccttt

SEQ ID NO: 2823 - DNA, 944 bp, Zea mays
  Clone ID: PAT_MRT4577_86526C.1
attggcttgttgaggtttcggacgaatataagcttgtggcagatacactttaccttacagtatatcttattgaccaatttctttctcagaactgtatccaaacgcacaagctgcaacttcttgggataactagtatgctgattgcctcgaaatatgaagagtattctgctcctagtgctgaagaattttgtaacataacggctggtacatatgcaaaggctgaggttctggaaatggagcaacaagtgcttaatgatctgggctttcatttatctgttccaacaacaaacacatttctcaggagattccttagagcagcacaggcttctcgtacagtaagatcagtacccaaaccacattgcaacgagtcctttcagtctatatgtattgtcctcaacactaagttggcaagctacatttccaggctcatctgaccactttgaattatctggcgagttatcttgccgagttgactttaatcagttacgatttcatgaaatttcttccctcagaggtggcagcatcttcgattttccttgcaaaatggacacttgaccaatctgaccatccttggaaccctactcttgagcactacacgtcttacaaaagcttcgatattagaacttgcgtgcgggctctacaggaactgcagcacaacaccagtaattgccccctcaacgccatccgtgagaagtatgggcagcagaagttcgagtgcgttgccaacctcaggtcaccggagctgctgcggtcgctcttcagttgatgtgctcccctgcactctgctgattcactcgccatttgctgcaacgatcctgacactgtataaaatatttcttcagtttctgttccatttccaaactttcttcagtttgaacatgcattctgtgacttgggtcaccgacaaaagaggcgcgacacactaatatatcaatttgtaactc

SEQ ID NO: 2824 - DNA, 2920 bp, Zea mays
  Clone ID: PAT_MRT4577_86577C.1
cctcgagggccggccgggccgggatgacattaacccgtctttggtcccggagggaaaaggacaaatcactcacacagagggaacaaaagggcacaggaatcgcgacagcgtgggaggcgtacggcgcaccgcccggccgccggatctgcgccggcgacgcgcccggacgtcggatctacgccgccgcaggaggagggaggcggcgctctggccgttccttgcccgcgagcgcccagatccgtcccgccgccggatatatatatcaatcaatgcccctgtgatatcgagcttcagttgatgcagtggtgaaaacatcttctcgaaaaactgctggctgcaagttgcaaaagtttgtctttcccttgttgtgttgttgcttccttctctggtggagtacacgggagaagtttgcagatacaggcagctcctttcaaatctcctatgtccagggatttggactgtcctgttcagacacagatggctgtggcagtcctggaccggagctttagcagcgaatatcctggaggtagcagaattgaggggaggcaactgagctggaagagagtatttgtccaaactgacaatggttctgtccttggcatcgagctggagagaggagaaaacgtacaaactgtgaaaaagaagctccagatagccctcaatgtgcccactgatgagagctcattgacctttggtgacctagttctgaataatgatcttagcagcattcgcaatgactcacccttgtttctcaaaaggaatcagattcaccggagcaattccacaccttgcctctcccctacaggtaagaatgttttgcaaagagaccggagtggacccattgaaatccttggctgttcaagtccttcatctcggatgaagcagcttgctaaggatgtcattaaagccataatgaatgatgttgacccagtcgctgttaacagtgggatgggtggtgcctactacttcaagaacatttggggagagcgtgtggcaattgtcaagccaactgatgaggaaccatttgctccaaataatccaaaaggttttgtggggaaagctctgggacagccgggcctgaaaaggtctgtacgggttggggagacaggcttcagagaggttgctgcttacctcctcgactatggtcactttgcaaatgttcctcccaccatgctggtcaagataacacacacaatcttcaatgtgaacgactgtgttggctgcaaaagtaaagtgttctgcaacaaatcagaggctgtgagcaagattgcatcgctgcaggagttcattcctcatgatttcgatgccagtgaccatgggacctcaagcttccctgtatctgcagtgcataggattggcatccttgacattagaatcttcaacactgacaggcatgctggaaatcttctggtcaagaagcttggtcctggcgccgacaattttggagagcagacagaactcattcctattgaccatggtctctgtcttccagaatgcctagaagacccatacttcgagtggatccactggccgcaggcatctgttcccttctccgaggaggagcttgagtacattgcaagacttgatcctgtaaaagatgcagaaatgctacgcatggagctacccatgatacgagacgcatgtctcagggtgctggtgctatcaacagtatttctcaaggaagctgcagcgtctggcctctgcctctcggagattggagacatgatgagcaggcagttcactgcgaaggaggaggaaccgagtcagcttgagctgctctgcatggaggcaaggaagtgggttgaggaaagagagtcctttcttcccaacgaagccggagttgaagatgacgatgatgacttcacccagttccttatcgacgacgaggatgattatccggatgccttggaaccatcagctttctgcaagtttggtagcatgaaggcaagttctaggaatccactgtccaagctagatgagcgtgacgaggaagacggagacgggaccgaggaggacgacgacgacgacatcttgaccggtgcattgcctcagaggatctcgtctatctccaagctgtcgtcatccatgaaggggcttggcttcattgggaaacccaagccctaccgcacgtgccttcggaagggtaaagcgacaggcagaactaagtacaccggcaaagccagcgagcatcagtccgggagcaggagcgccaacgagctgctcccgcccagcgccagtttcgtgaagctgtcggacatgagccctaaacagtggagcgcattcctcgacaagttccaggagctgctcccaggtgccctgagcgcccggaagcacgctgccggtgtcgtcggccagcgctcgatgccgaggctgggcacgtcttgccagttttgagagtagcagaagagaagccaccgaacccaaggtatgacgaacgcgcttctgttcgagctctggtgtgcagcagccaagcaggtacggagtattatatatgcttgtagtaggtgtctggagccggtggtggtagagagggtccgagaataagatcatccatggcatgtgagatgaggttgcgggagaaggaagggggttgtgtgtgtttgtgcatagtgtttcgcataagagatccgttgttcttttttcttcttctctgtatatagttaagtactcctactgctactgcatcgcagcaccgggcacgggctgggatctcggccgttgttacctgaacgatggtggtgagtgtgctggcgtcgcctgctctctgctctgtctttgccgctgtaccattttggaggcgcttaccatattatgaactttgaactatgatatgatgttcgctataaatatcacatgttctctgtataccaaaatgaaaagatgttcgctacaaaagaaaaaaaaaaaaaaaaaagcggcc

SEQ ID NO: 2825 - DNA, 3011 bp, Zea mays
  Clone ID: PAT_MRT4577_86650C.1
ccttagatcccttcttttatttcgatattagtgcggatcaaaatcgatgcaacgaaaacgaatgcatatccaaagacaaatataaaataaatatagaacaaataatatcgctatctatccgatatccggctctcggcctcttggctcgtcttccgttttaacgccacctcgcgacgcggcccccaacccccaccgctgcggtgctactgctaccgtgctacaccatcaggaatcggacgcgggacgctacaccaccaccacagctccccacctccaccctcgccgcgagttgctcagtcgcagactcgcagcgagcgaggcgggggcctcactcagcgcggggcgaggcgagcgtcccgggtgggcagcgtcgcggtcgcgggctcgatcgggttgggacggggaggtagggaggaggggccagggatctccactctcgtccgtgcgggagcgcgggcgtcgcatgcggcggcgcgccggggcaaatgcgggtaacctcacggtcggaggagcgctgacgcggcggcggcagccagggagcgatgcaggcgccggagcagcagcagcagcaccagcagcggcagaggaagggttcatcagagatggacttcttcagtgaatacggtgatgctaacagatacaaaatccaagaggtcattggcaaaggaagttatggcgttgtttgctcagctgttgaccaacatactggcgacaaagtggcaatcaagaaaatacacaatatcttcgagcacttatctgatgctgcacggatcctacgtgagatcaaactacttcggctattacgccatcctgatatagttgagatcaagcatataatgctgcctccatcaaggagggacttcaaagatatctatgttgtatttgagctgatggatacagatctccaccaagtcatcaaggcaaatgatgatttaaccagagagcatcatcagttctttctctatcagatgctccgtgcactgaaatacattcataccgctaatgtttatcatcgtgatttgaagccaaagaatatattggctaatgctaactgtaaacttaaaatatgtgattttggattggcaagagtggcattcaatgacactcctacaacagtattctggacggattatgttgctacaagatggtatagggcccctgaactgtgtgggtctttcttttctaagtattcaccagctattgacatatggagtatcggttgcatttttgcggaaatcttaactgggaagcctttatttcctggaaaaaatgtggtccaccagttagatttgatgactgatctcttgggtactccatcacttgatacagtttccaggattcggaatgagaaggcaaggaggtacttgagtagcatgaggaaaaaacagccagtaccatttactgaaaagtttcctaaagcagatcctgctgcactcaaacttttgcagaggcttttggcatttgatcccaaggataggccaactgctgaagaggcattggctgatccgtattttaaaggcctcgcaaaagtagagagagaaccatcatgccagccaataacaaaaatggagttcgagtttgagcgaaaaaaggcgaccaaagaggatgtcaaggaacttatattcagggagatattggagtatcatcctcaacttctcaaggattacatgaatgggactgagaaaacaaactttctatatcctagtgctgttgacaatttccgaaggcaatttgcaaacttggaggaaaatggaggaaagagtggggcacacgccgcttcatcagacaggaagcatgtttcgctcccaaggacaaccacagttcattctaatccaatccctccaaatggaacctcccaagttcctcaaaagattcccacaggtagaccaggaagagtggttggtccagtaataccatttgagaacgcagctgcagttgatccatacagccaacgtagggtctcaaggaatccagtacttcctccaaccacgtcgaacatgtcagcctatgcctaccaccggaagtcagacaactcagacagagagctccaacaggagctggaaaaggaccgcatgcagtaccagccagcacagcggttcatggacgccaaggtagtatcacagatgtcccctgacttgaggtcttcctactacataccaaaaggtgtcccaaaggctgatcccgcagatagaaccgctctgcattctagcatgattcatgggatcgcccctttcagtggcattgcagctgttggaggtggctacaacaaggtcaatgcagttcagtatggagtttctaggatgtactagttctagttgcattggccatctccgaattcctcagctgatgagttgaagtaataacatggcgaagaccagatgtaggtaccgaagaactgccataccggctctgagccaaagatagaaaacatggaatacggatctcggatcgaggacgtgtccgtcagattgaaaacagatactgggcagcagtcatggttctgtccattggacctagcttttcgggaagcaatgccatcgccccgcggaaacggtaaaataaaaggagaaaaaaaaatgcagtactgtcagttgattgctgcttataaagaagcaaagggggcagagacgacgatttttacaggtaaaattatgtactttgcaaggagggaaacatgtgggaataagtagtgagcctacgtttagctctgtatataaagtgacttgattttatatgtactattacggctggtgaaacacgcttctttaattcaaagctatggagttttggcctaaataccataggcagctcagattgatacaaaaaaaaaaaaaaaaaaaaaaaaaaaaaaaaaaaaaaaaaaaaaaaaaaaaaaaaaaaaaaaaaaaaaaaaaaaaaaaaaaaaaaaaaaaaaaaaaaaaaaaaaaaaaaaaaaaaaaaaaagggggggggggttttgggggttaaaattttattttggggtgtttggaagttattattttttttatggg

SEQ ID NO: 2826 - DNA, 312 bp, Zea mays
  Clone ID: PAT_MRT4577_8668C.1
ggaagccacaagcatatggccatgcaagacactggtttgcactataaattattctggttacataaaaacttttaaaaaaataaaaaacgggtcccagtaaaaagctccaggggatagcctaagggttcaaagacccatcaaaattcaatttggtgacttgcctgaaaccaggggggggtttattggttattatgttccacagttccgggttcagcttctccgaaaaaaaaagagatctctctgtttggagattttggggaatccgaaccatgcccgcattttttttcagagtccaccccacacattgtttta

SEQ ID NO: 2827 - DNA, 441 bp, Zea mays
  unsure (1)..(441): unsure at all n locations
  Clone ID: PAT_MRT4577_86803C.1
ttattatccccctctagatatttctttatttccgtgatcctccgcctccttgttgatccccccaagncagggatcttcatgtctgactcggaggagcactacttcgaatcgaagaccgacgccggagagttcaagacctacccgtagcaggctgacaccgtccgtaagaacgacttcatcgtgatcaaaacacgcccctgcaaggctgtgcaggtttctacctccaagactggtaagcatggccatgataaatgccactttgttgccatatacatattcgacgggaaaaagcttgaagattctgttccttcatcacacaactgagaggttccgcatgcgaaccgtactgagcacacggtgattgatatatctgaggatggccttctgagccttcttacttcggatgtccacactaaggatgatcttacactcgcaagtgat

SEQ ID NO: 2828 - DNA, 325 bp, Zea mays
  Clone ID: PAT_MRT4577_86949C.1
acagcccacgcgtccgcgcacgcgtccgctgctacccccaatttttgcatcagatgagagcacttcttgttcacaatggaacacagccatggaaaaacgtacacgatggacaagacaggaagttgtcggtaactttcgtattggagatgtgtttggaaattgttgtcgactcaacggcctacatgcattgacatagttcacagttgtcactcacaatgctatagaccgacatgattctgagaagttccctttctcaattttcgacaagaatggcaagtagtgtgcatgccttatcgactgccaccacactgagcaacacggatgg

SEQ ID NO: 2829 - DNA, 1384 bp, Zea mays
  Clone ID: PAT_MRT4577_87182C.1
gtatattctatctccacctgacctccctccatcaagatgttccttgaaaacacggtcaaaagcacggcagaggtccagtatggtgtccagttgagcccctggatcagcagccacagctctccttatgatgtccagctctgattcaagttcgtctatagttttgttgattgtcgctgtgatactaggaatgtgtgctttgataacagattcaagatgctgagaaagaagcttagcaagatatccagaacccatacgacttgataaatgagcatagtcaggacttgtttcaaaatattccctttctttttccctcgctgaaatcatgtcaaccttcctattaatatctgcttgtgagcgattgacgattccaacccaaggattctgcagccgataggctcttccctcaagaacatcgagagcatttgttcctttgtccattaagtccagttttgtcaacacaccgaacgtcctttcacctgttggatcaacttcttttgagagcttaattgcatcagaagttgcaatatcctgatttgctggagatatagccaaaataatacagttgggcttatcaacatatgagcgaaccatattctctatatcttgcacaatactttcagattgtccctctacagcaacttttgtcaacccaggaagatcaatcattgttaagttcacaaccttgggcgagtagatgctgagatgaatagggacaggagatatttgcttagtttttccagtcagcctatccgtctcatcagcaatttcttggcgaacaagggcaaagtctgaaaaccttcttttgggcatatgcaagaactctgcatattcctgagatccatcctctgtctgttgcagctgcaacactaaaggccttcgcgtgacaattcccgatcctcggggaagaaaatcggtgccaacaatgctctcaagtacagaggacttgcccgagctctggcctccgacgacggcgatggttgggagcgactcccagagggtgggcaagtcgcttcctcctccgtggtctccgagggcggtgcaggcgcgctggatgcggttcatcatcccgatcaggctctccatggacgccatactcttgttgacttgcttgccaagttcgccggttttccagtatggtcgggactattccgttgcgtttgtgtggggaagaagaggagccaaggacgactgactggaagagcaaggttcgaagaaacagagtcggccggaaagaaagaaaacctcctagcgaaggaagccaagccattccaaggacggcgacgacttccggtatccagaagaggacacggcggagctttgaattctccacggggagaggcaaggctgggtccacatatgttcgttcagccgcccaagatcccgg

SEQ ID NO: 2830 - DNA, 390 bp, Zea mays
  Clone ID: PAT_MRT4577_87375C.1
agacctcctgtgccggcacgcgctgacactgcatgtcggcatgcagatgttagtctaccacatcgtgggcggcacgctgatggcgcgccagctctggacctccggcgtgggctagatgtcgcgatccaacgcctgggtgctggcgctctgcatctgcctatacttcgcctggttagcctggtcgtggaggccgctgggctggctcatcccttcggaggtgttggtgctgtaggttcggtcggcggggcagagcatgcgcctgtgcgtcaacaggctgctgaccttcatgatcggccatgccttactcagcatgctgggctcgctcaagttccggctcttctacgtcttacccgggtggatgttcattatgaccaccttcaatcgccattt

SEQ ID NO: 2831 - DNA, 544 bp, Zea mays
  Clone ID: PAT_MRT4577_87463C.1
ggccgcttttttttttttttttttggaagggtacttattgattaatgggaagccacagacataatgcaaaaaacggcactattgtactataactcataagcaatctaaaagagggcaccaccaatgatgggtcgctggcagaacactggtgggtttgccaaagcaagctgattgaatggcagtaattgatgcagctgtatgagggggccagcgttaggcatagcgagatggtagaacgggaacaactgacgctgtgtcaagaaggcaggagggttcacatcagttagttggctgaatggtagtagttggtggtggtgttaataagcagcagagctaaatgctgctagtgggttgaatggaagaaattgttgggggtaggcagcaggtacctggctgaatggtactggttgctgcaaataagctgcacaggtcaatgcagccagctgcactaatggaagaaactgatgttgcttgagagtatgcagcaaggtttgctagcacacggtgctgaagcctgagtgccctgatgtactgtgccaccaaa

SEQ ID NO: 2832 - DNA, 2197 bp, Zea mays
  Clone ID: PAT_MRT4577_87571C.1
aaaaaaaaaaaaaaaaaaaaaaaaaaaaaaaaaaaaaaaaaattttccttggccttctctagatctttcaagctatccttggcttcctagctccctttggcgtgctgtaccggacgacaggggtaggtaggtaggtaggtgtagctagctcggcgagcgagggagcaatccggccaacagcacacgcgtcgatcgccatgccgagcagcgactcatgacgatcctcagacgatgatgatgctgagcaagtcgtgctcgctcaccgacctcctcgacagcatcgactacgcggcgctctcctcgcagatgctcctcctcgacgcgccccacccccacgctccctcctcgtcgctcctataggtgggtggccccctcgagccggcgggaaaatttcaatgcctctctagatctttcaagctatccttgcttcctagctccctttggcgtgctgtaccggacgacaggggtaggtaggtaggtaggtgtagctagctcggcgagcgagggagcaatccggccaacagcacacgcgtcgatcgccatgccgagaagcggcggcggcggcaatggcggtggcattagtagtagtagtagggtgatgcccaacctcccggccgggttccgcttccaccccacggacgaggagctcatggtgcactacctcatgaggcaggccgcctccatgccgtgccccgtccccatcatcgccgaggtcaacatctaccagtgcaacccctgggatctccctgccaaggcattgttcggcgacaaggagtggtttttcttcagcccccgggaccgcaagtaccccaacggcgcccgccccaaccgcgccgccgggtccgggtactggaaggccaccggcaccgacaaggccatcctgtcgtcgtccacgcccacgagccacggcggcgccaacatcgtcgtcggcgtcaagaaggcgctcgtcttctacggcggcaggccgcccaagggcaccaagacggactggatcatgcacgagtaccgcctctcgggcgcggcggacgacgactgcaagggcagcaccaggcgcagagtgtcttcctcctcgtcgtcctccatgaggctggacgactgggtgctgtgcaggatccacaagaagagcaacgatttccagttgtcgtcgtcgtcggagcatgagcacgagcaggaggagccggcggcgggcggctcagcgacgactgtggaggaactagacgctctcgtcgtcgtcgacaacagcagcagcagcgacaccaccaccaccaccatcaccaccaacgacaacaactctactgaaacagctgcgactcatcacgatcctcagacgatgatgatgctgagcaagtcgtgctcgctcaccgacctcctcgacagcatcgactacgcggcgctcctcgcagatgctcctcctcgacgcgccccacccccacgctgatgacccgccgccacacatggtctactacccaccggcggcgtcggcgacgcaccagcaagcaataatagctaataacaccaacagtaatgacgactactatgacgacgacaacttgttgccgactgctgctgctactgcggtagacgcggcggcggcggcggtgctactcagctcgtcgcctgcagacaccaacggtgtgaacaagtcggagcgagtgacggccgtggactactacggcgccgctgaaccgccgaccttcttccaccaccacctcgatgatggcggcaacagcttcttcagtacgaccaagaagctcaagccgccgccgccaagtgattcgaggcatggcggccatttcggcaccgccacagcgagcagctaccgcgacagccagcagctcgtggacagcgcgagcagcagcggcgtcttcttccatcagtatgggtacggctacagcagcagcaacccgttcttgaacttgaaccagcagcagcagctgctactcaacagccacatcgggatgcagtagagctcgagagatcgagagagagagagagagagagatgatatatcattggaaggatcagcacgcgtacgtgcagattaattgcagcgagttctatcttgtttgctttcattattatatactccgtatgtgtcgttcatgtaaaattagtttaaattgtaaattagtgtgctgaaattcatgtgcctgctctctgctcatcaatgaatggatgatgacgacccatgcacgtt

SEQ ID NO: 2833 - DNA, 828 bp, Zea mays
  unsure (1)..(828): unsure at all n locations
  Clone ID: PAT_MRT4577_87573C.1
cattgggaccctcgaggccggccgggaaatttcatgcctctctagctagatctttcaagctatccttgcttcctcctttcactttcttattgagcgctctctggcgtgctgctgtaccggacgacaggggtaggtaggtgtagctagctcggcgagcgagcgagcaatccggccaacagcacacgcgtcgatagccatgccgagcggcggcaatggcggtggcagtggcagtagtcgtagtagagtgatgcccaacctcccggccgggttccgcttccaccccacggacgaggagctcatggtgcactacctcatgaggcatgccgcctccatgccgtgccccgtccccatcatcgccgaggtcaacatctaccagtgcaacccctgggatctccctgccaaggcattgttcggcgacaaggagtggtttttcttcagccctcgcgaccgcaagtaccccaacggcgcccgccccaaccgcgccgccgggtccgggtactggaaggccaccggcaccgacaaggccatcctggtcgtcgtcgtcgtcgtccacgaccacgagccacggcggcgcccaacgtcgtcgtcggcgtcaagaaggcgctcgtcttctacggcggcaggccgcccaagggcaccaagacggactggatcatgcacgagtaccgcctctcgggcgcggcggacgacgactgcaagggcagcaccaggcgcagagcgccttccctcctcgtcgtcctccatgaggctgggacgaactgggtggctgtgcaggatccacaagaagagcacggatttccagnttgtcgtcngtcgtcggagcatgag

SEQ ID NO: 2834 - DNA, 2073 bp, Zea mays
  Clone ID: PAT_MRT4577_87628C.1
cattgggtacctcgaggccggccgcaaccgcgcatctcccccccgccggggtcttccccgacccgcgtttctttattatattttcccccaaattccacctccaccaacctcctctcccaccaccgcccccgccgtcgcctgctgttccatgaaggactaatccgtcggtccacttctcagctatggcgcagctcgcggtgcggtcgctgctgctgtccctgctcctggtctcgccagttgtggcttcacctggtattgtgaagctcaactcgtcgtcgaccctcttcggcatcgagttcccgccgttcaacaccgccgtcgccgcgaccggctgcgacagcaagctggttgcagccgacgaggcgggggatgagcagaagcagccggcgagctcgtccccgtcgctgcagctgcgcatgaagcaccggtccgcggaggggggcaggacacggaaagagtcgttcttagataaggccgagaaggatgccgtccgcatcgagacgatgcaccggagggcggcgcgctccggcgtggcccggatgccggcgtcttcgtctccgcggcgggcgctgtcggagcggatggttgcgacggtggagtccggcgtggcggtcgggtccggcgagtacctgatcgacgtctacgtcggcacgccaccgcggcgtttccggatgatcatggacaccggcagcgacctcaactggctgcagtgcgcgccgtgcctggactgcttcgagcagcgtggcccggtgttcgaccccgccgcgtcctcctcctaccgcaacgtcacctgcggcgaccagcgctgcggcctcgtggcgccgcccgaggcgccgagggcgtgccgccgccccgcggaggactcctgtccgtactactactggtacggggaccagtccaacactaccggcgacctggccctggagtccttcacggtcaacctcacggccccgggcgcgtcccgccgtgtggacggcgtagtgttcgggtgcgggcaccgaaaccgcggcctcttccacggcgcggcggggctgctggggctcggccggggcccgctgtcgttcgcgtcccagctccgcgccgtgtacgggcacaccttctcgtactgcctggtggagcacggcagcgacgccggcagcaaggtggtgttcggggaggactacttggtgctggcgcatccgcagctcaagtacacggcgttcgcgcccacgtcgtcgccggcggacacattctattacgtgaagctcaagggcgtgctggtgggcggcgacctgctgaacatcagctcggacacgtgggacgtgggcaaggacgggtccggcggcacgatcatcgactccggcacgacgctgagctacttcgtggagccggcgtaccaggtgatccggcaagcgttcgtcgatctcatgagcaggctgtaccctctgatcccggacttcccggtgctgaacccgtgctacaacgtctctggcgtggagcgaccggaggtgccggagctgtcgctgctgttcgccgacggtgccgtgtgggacttccccgcggagaactacttcgtccggctggacccggacggcatcatgtgcctggcggtccggggcaccccgcgcaccggcatgtccatcatcggtaacttccagcagcagaacttccacgtcgtgtacgacctgcagaacaaccggctgggcttcgcgccgcggcggtgcgccgaggtgtagtgtatagccgccggcgaggcctcctgagactgagaggacgaacaattcgaactcagtcctcgcttgattgattggattgggaggcaaattgggtgtagaaatttttggttgggaaggacggtggcacgtacgcaagctctaatacatagttttttttgttgcatttatctccaaggagagaaggttagggatattttattaaggaccgtgcaggtgggttgtaacgggaaaatactgattttgttcccatgtacaatacccgtttcttcactcaaattttagaaattgtaagttgtagattaagaatgagagtgcacacaatcttttttaaaaaaaaaaaaacgtcgaccaaggaaaa

SEQ ID NO: 2835 - DNA, 401 bp, Zea mays
  Clone ID: PAT_MRT4577_87657C.1
ggcaatcgcagctggcatgttacctttatcacccttgttgctgcaacaatcatcagtcctattacaacagttacctggggcgcattgattggcacaaaacataatggcacagcaactacaacaacttgagctagcaaaccttgctggctactcttagaaacagcagactattccattcaaccaacttgggtcatggaactctgcttgttatgtgcaacaacaacaactaccattcagccagatacctgctggctaccgccagcaatttacttccatcaaaccaaatagcaggattgaactttcctgcttatatacagcagcagcagctactaccattcagccagctagctggtgtgagccatgatgccttcttgacacaaccacaggtggtgccgtgctac

SEQ ID NO: 2836 - DNA, 1093 bp, Zea mays
  Clone ID: PAT_MRT4577_87713C.1
gcttttgctcctgtatcagcgcacagtgatgcatctctcctggagtctcaagaagcacttgatgtctcctcaacactgtctaatgaagaggacgagagggcaacacatggcactgtttctatagagtgtgatggtgatgaagctgagactgtatctaaaagaaggaagctggaactagatgctttagaagctactcttactgctactacctccaccaccagtaccatcgacatggggcctgcagcctcaagagctgtccgggagcctagggttgttgttcagaccacaagtgaggtagacattcttgacgacggttatcggtggcgcaagtatgggcagaaggttgttaagggcaatccaaatccaagtgcgcaagcatgtggaaagagcatcgcacgatctgaaatcagtcatcacaacgtatgagggaaagcacaaccatgaagttccagcagccagaaatagtgggcaaggcagttccagcgctccatctgcatcacaagctggtggttctcaccgtaggcaagaacctgcacaggccagctttgctcacttcggtacggcttctttcagctcgttcggtctcccaccgagtggtcagttgggaccaacaactggcaatttcggcttcgggatggttcccccaggcatgacgatcccagtgccctctctaggatcgcttgcccctgtaaagatggttggaaattcatcagctatgcaggggtacccagggcttatggtgccgggagaaccaaaggtagagcctgtctcgcaaccactcatccaaatggcaaatgcatctccaccagcttaccaacagatattgagcaggcctcctttcggtcaccagatgtaaataataggaaagagaaaggggataatagatttgcttcagcttgtatacatgatagctacgctgcaacatggctttagtgttcatggatcgtccaattttttatttctattttatttttctgcccacgcatgtctttgaagcaaagaatgctgaggatgataccctgtcgtgcctgttgtaatcacgtaaaggatacctttcgtctttttgagactcgaaattggaaaacgatcaatc

SEQ ID NO: 2837 - DNA, 1340 bp, Zea mays
  Clone ID: PAT_MRT4577_87716C.1
tgccaccccttccttcccctaatcccctcctcggtcaaaccgcctcactctcctactcttctctccctagtccctacccggctctctccctcccccctctctctaaaaaaagtagcgcccggagaaccgagaggctggagaaataaaggcggaaagagggagggaaatctcactttgttggggattctttcctccgtttccgactcctttgttctcttaagtgttcttggttagtggaatggaagctcagcagccccatttatgcccccgagagcctcgtcgttcccctcgtgtgtaggtgtagcctttcactcggttggtggaagggcgaggcacagaagaacatcgataaagggtgtgtctattttttagctcttcgtgttcttgtaggaggaattcccgttcacatgatccgtgcctgcatcctcaagagctgtccgggagcctagggttgttgttcagaccacaagtgaggtagacattcttgatgacggttatcggtggcgtaagtatggacagaaggttgttaagggcaatccaaatccaaggagctactacaagtgtacacaccctggctgttcagtgcgcaagcatgtggaaagagcatcacatgatctgaaatcagtcatcacaacatatgagggaaagcacaaccatgaagttccagcagccagaagtagtgggcaaggcagttctggttctggcagcggtccatctgcaccacaagctggtggttctcaccgtaggcaagaacctgcacaagccagcttcgctcactttggtacatctcctttcagctccttcggtctcgcaccgagcggacagttgggaccaacaactggtaatttccgcttcggcatggttccgccaggcgcgacgatcccaatgccctctctaggatcacttgcccctacaaaaatgattggaaatccatcagctatgcaggggtacccagggcttatgatgccaggagagccaaaggtagagcctttctcgcgaccacacttcccaacgtcaattgcacctccgccagcttaccaacagatactgagcaggcctccttttggtcatcagatgtaaataataggaaggggatagatttgctccggcttgtatacatgatagctacgctgcaacatggctttgttctagttttgttgatggatcgtccgatttttacttctttttaaattttcagctcacggctcacgcatttctttgaagcaaagatggctgaggatgataccctgtcgtgatgtgtaatcagggaaaggatacttttcgtccttttgatactatcgaaatttgaaaatgatcaatccgattttttagttgtggat

SEQ ID NO: 2838 - DNA, 1026 bp, Zea mays
  Clone ID: PAT_MRT4577_87719C.1
ggtccggaattcccgggtcgacccacgcgtccggtaaccatttaagacttgatgcagacattgtactgaattcgctggtactctttttcaggaagttggaattagatgctttaggagctattgctattgctactacctccaccaccagtaccattgacatgggccctgcatcctcaagagctgtccgggagcctagggttgttgttcagaccacaagtgaggtagacattcttgatgacggttatcggtggcgtaagtatggacagaaggttgttaagggcaatccaaatccaaggtcacactttcactaccatttcttacactaaatgactaaactgtatccctccatcccctgaagctagtaacattgattcacttgcatgcaggagctactacaagtgtacacaccctggctgttcagtgcgcaagcatgtggaaagagcatcacatgatctgaaatcagtcatcacaacatatgagggaaagcacaaccatgaagttccagcagccagaagtagtgggcaaggcagttctggttctggcagcggtccatctgcaccacaagctggtggttctcaccgtaggcaagaacctgcacaagccagcttcgctcactttggtacatctcctttcagctccttcggtctcgcaccgagcggacagttgggaccaacaactggtaatttccgcttcggcatggttccgccaggcgcgacgatcccaatgccctctctaggatcacttgcccctacaaaaatgattggaaatccatcagctatgcaggggtacccagggcttatgatgccaggagagccaaaggtagagcctttctcgcgaccacacttcccaacgtcaattgcacctccgccagcttaccaacagatactgagcaggcctccttttggtcatcagatgtaaataataggaaggggatagatttgcttcggcttgtatacatgatagctacgctgcaacatggctttgttctagttttgttgatggatcgtccgatttttaaaaaaaaaa

SEQ ID NO: 2839 - DNA, 2473 bp, Zea mays
  Clone ID: PAT_MRT4577_87724C.1
ccgcgaggcctgtggggccgggcaaccgccggccgctcccctactcttctccctccctccccgtctctctctctctaaaaaaagtagcgcccggagaaccgagaggccggagaaagaaaggcggaaagagggagcaaaatctcactttgctgggagttctttcctctgtttccgactcctttgttctcttagtgttcttggttggtggaatggaagctcagcagctccatttgtgttccagagatcttcgtcgttctcgttcccctcgtgtgtagcctttggtaggttggtggaagggcgaggcacacaagaaaattgatagaggggggatccccattttcagctcttcgtgtttttttgtaggaggaattcccgttcacatgatccgtgcctggacgtgacggttttgccgcgctctgctgcttccctttcggggagaagaggactcgactcaaatcatttggtatcgcagacgtcgcccttcccagttcagttgagagagatttctggcatgtccggcgcaagtaactatggatccctcatcgatgaatggttgccgccccctacacctagcccaagaactctcatgtctagctttctgaatgaagaattcagctctgcgccattctctggtccccatgatcaatctgaaaagagcagagaagttttgaattcgagcgatgaggttccttcacatgctgtcaaaggcctatttcaaaatggtttctcaaatttgttcagtgctaaatcaaactccaatggtggtttggcggagcgcagggctgcgagagcaggtttcagtgtcccgaaaattgatacttctcgagttggttcatccacagttattcgatctcctgtgtcaattccacctggtctaagtccaactacacttcttgagtctcctgtttttctttacaataaaatggcacaaccgtctccaaccactggcacattgccatttttgatggctacgaatgataagtcaacaatatcaccagctgccaagataactgaagattctacatttgataatgatgtgttttctttccaaccccacttaggttctgaacaaacagggttctctactgcagaaaaaaaaaaaagaaaaagtccgaaaaagcagtccttgtcgaatattcatcagcaggaatccagtcttcagtcaagctttaccgcagtcaaggataacactagtgcaacaattgttaaagcgaagccatcttctagttccatgttcagtgatagtcactattcagctgaccaacagcaagctgacgagacaaacataaaggtgcaaggcaaaggtgtggaggctagatcagctgcttttgctcctgtatcagcgcacagtgatgcatctctcctggagtctcaagaagcacttgatgtctcctcaacactgtctaatgaagaggacgagagggcaacacatggcactgtttctatagagtgtgatggtgatgaagctgagactgtatctaaaagaaggaagctggaactagatgctttagaagctactcttactgctactacctccaccaccagtaccatcgacatggggcctgcagcctcaagagctgtccgggagcctagggttgttgttcagaccacaagtgaggtagacattcttgacgacggttatcggtggcgcaagtatgggcagaaggttgttaagggcaatccaaatccaaggagctactacaaatgtacaaacccgggctgttcagtgcgcaagcatgtggaaagagcatcgcacgatctgaaatcagtcatcacaacgtatgagggaaagcacaaccatgaagttccagcagccagaaatagtgggcaaggcagttccagcgctccatctgcatcacaagctggtggttctcaccgtaggcaagaacctgcacaggccagctttgctcacttcggtacggcttctttcagctcgttcggtctcccaccgagtggtcagttgggaccaacaactggcaatttcggcttcgggatggttcccccaggcatgacgatcccagtgccctctctaggatcgcttgcccctgtaaagatggttggaaattcatcagctatgcaggggtacccagggcttatggtgccgggagaaccaaaggtagagcctgtctcgcaaccactcatccaaatggcaaatgcatctccaccagcttaccaacagatattgagcaggcctcctttcggtcaccagatgtaaataataggaaagagaaaggggataatagatttgcttcagcttgtatacatgatagctacgctgcaacatggctttagtgttcatggatcgtccaattttttatttctattttatttttctgcccacgcatgtctttgaagcaaagaatgctgaggatgataccctgtcgtgcctgttgtaatcacgtaaaggatacctttcgtctttttgagactcgaaattggaaaacgatcaatcaaaatttctggttgcgaatgc

SEQ ID NO: 2840 - DNA, 216 bp, Zea mays
  Clone ID: PAT_MRT4577_87804C.1
gaaacaatcaaccagcaacactcctctcctataacatagtacagcgaaagtaactcacattggaacttccaatgggtgtctcggcctggtcctgccttgcttcctctcctcctcccagtgccgtccctgtggcacccatgggtggcttgttcccacagttctaagaccattcgtgccccaaagcgaaggaggatgtgcagtcaattgtggcacagg

SEQ ID NO: 2841 - DNA, 699 bp, Zea mays
  Clone ID: PAT_MRT4577_87810C.1
tcgagccggccgggttacttcctggtggctacaggccgtttcagaaatgaccaacctgggtggcgcaacaattgcacctcctggaggaatgatgatggatgggccacctacacccatcgtgaagactcgcttgtgcaacaagtacaacactgcagagggatgcaaatggggggacagatgccactttgcacatggtgaaagggagcttggcaagtctatgatggacaactatatgccaccccccatcggaccaccaccaaccggttattttgcacctccacctatggcacctccacctatggcgcctccacccatggcacctccacctatggcgcctccacccatggcacctccacctatggcgcctccacccatggcacctccacctatggcacctctacctatggcgcctccacccatggcacctccacctatggcgcctccacccatggcacctccacctatggcgcctctacctatggcgcctccacccatggcccctccacctatggcgcctccacccatggcacctccacctatggcgcctccgccaatggcacctccacctatggccaaccctggtttggccactccagctagcttcggcgcttatgccacggccaagatcagtgtcgatgcgtcccttgcaggtggcatcattgggaagggtggagctaacataaagcaaatatcttccgt

SEQ ID NO: 2842 - DNA, 1413 bp, Zea mays
  Clone ID: PAT_MRT4577_87811C.1
aaaaccggacgctcctgggcgccgctgttcgcaacccaagcagtagccgagccaacgaaggcgtgcgagcggaggcaatcatacatggacggcagccgcaagagggtggacgcggaagacgtcaaaggggattccaccggcgggaagcgattgcgagcatcggagtcatttcaaagtggcgtaggaagcaaagtgaagctatgcaccaattttttcagtacttatggttgtccctttggtgagggctgccattttgtccattacttccctggtgactaccgggccgtttcagaaatgaccaacctgggtggcgcaacaatcgcacctcctggaggaatgatgatggatgggccacctacacccatcgtgaagactcgcttgtgcaacaagtacaacactgcagagggatgcaaatggggggacagatgccactttgcacatggtgaaagtgagcttggcaagtctatgatggacaactatatgccaccccccatcggaccaccaccaaccggttattttgcacctccacctatggcacctccacctatggcgcctccacccatggcacctccacctatggcacctctacctatggcgcctccacccatggcacctccacctatggcgcctccacccatggcacctccacctatggcgcctctacctatggcgcctccacctatggcacctccacctatggcacctccacccatggcgcctccacccatggcacctctacctatggcgcctccacccatggcacctccacctatggccaaccctggtttggccactccagctagcttcggcgcttatgccacggccaagatcagtgtcgatgcgtcccttgcaggtggcatcattgggaagggtggagctaacataaagcaaatatcttccgtcacaggggccaaggtggtcattcaggaggaccgccatgaatcagacaccagcttgaaaaacattgagtttgagggcacctttgatcagatcaggaacgctagtgctatggtcatcgagctgattgttagcatcagtggcataggaagcaacttcaagaccaagatgtgtgagaacttcgcaaaagggtcatgctcttatggcggcaaatgccactttgcccatggtgagagtgagctgcgcaagcctgccgctgcttgagatccatgccctgtttcttacctcatagtcattagtcaatgtaactcaaaacttggcctctgatgatggatttgttggcttctttaggtctacgctaatgaattgctggcttcaggcctactactaaatttgctgacttctttagtccttcgctgttggccaactaaatctgttttctgcgtttgttctaaggggggggggggggggggggggggggggggggggggggggggggggggggggggggggggt

SEQ ID NO: 2843 - DNA, 201 bp, Zea mays
  Clone ID: PAT_MRT4577_88005C.1
tcggccatggcgctttttgtggagaagaccttgtctggaccggagtacaaggtcaaggatcttttgcaggcggacttcggtcgccttgagattgagctggccgaggtcgaaatgcccggccttatggcgtgccgcgcccagttcggcccgttcaagccctttgccggcgctaggatcttgggggctttttacatgacccat

SEQ ID NO: 2844 - DNA, 474 bp, Zea mays
  Clone ID: PAT_MRT4577_88118C.1
ggtctttctgcaagtgctgataccgcagccatttttgcacaatgctcacaagcttctatagctttctttgttgccccatacctataaccagcggtgttttcagtatgtgaaaacccaattcttcaaccgtacaggatccaacaggcggtggcatcgggcatcttaccttgatcagcctagctcctgcaagagcggtcagacctattacaggagttacctttggtgcatacgtgggcacacaacatcaaggcacaacaactacaacaacttgtgctaggaaaccttgctgactactctcagaaacagcagtttcttgcattcaaccaactggctgcattgaactctgctgcttatttgcaacaacaactaccattcagtcaggtagctgctgcctacccacagcaatttcttccattcaaccaactggcagcattgaactatgctgcttatatacaacagcagcagctaccacca

SEQ ID NO: 2845 - DNA, 325 bp, Zea mays
  Clone ID: PAT_MRT4577_88143C.1
ctttccttttttttttttttttttttttttttttttttttttttttttttttttttgggaaaaaacaaacttttttcataaccaaaatgggtccacagttttttttccatacctacatgctcttgtggggggacgcatcttgaccccctaaagctgcttacttacttattcagaccgatccagcggggggcaccctgggaagttcacatgcttacggacgacaaattttcataacaatagctggggtggggtgcttcacagaaaacccaaacgacacccccgaaattgcgacgatttaaaatcccacccgtccgaggccccgtgg

SEQ ID NO: 2846 - DNA, 449 bp, Zea mays
  Clone ID: PAT_MRT4577_8821C.1
tgacttccagaggtgcctttggtgcatttatatggcgcaaaaatgagggcacaacaactacaacaacttgtgctagcaaaccttggtgcctacttttagcaacaggagtttcttccattcaaccaacttgggtcattgaactctggttcttatttgcaacaacaacaactaccattcagccaggtacctggtggctacccccagcaatttcttccattcaaccaactagcagcattggactctcctgcttatttacaggagcaaccactactaccattcagccagcttgctggtgtgagccctggttcctttttgacacaaccgcagttggtggcggtctaccaggacggtgggcctaaggcttgcccccttttacaactgtaacaattgctggcattgaagcaacatggtttggcaaaaccagagggtggtaccgacgactcatcaat

SEQ ID NO: 2847 - DNA, 453 bp, Zea mays
  Clone ID: PAT_MRT4577_8822C.1
atggagcctaagggtggcacaacgtctagcaacacgccatctatgacgcatgaagctgcccttgtctacagcattgaggacattcgacccgtcaggggcctgaagaagatccagcctgctacttactccaactgcacgaagaatccatgctgatgtcgcttgtggcgtcctcattctagtagtacaggatttcttttctgacactcagattctgaccaatcactctggcctgctgcttcctgatgatagaccagcatacccattcttgctcattgcactacttcctccatctacagcattgggttctgatccacctgctccaatggctgctcttactgctgctgatgcttccccgggctcagatatcgatggtgagggctatgagaatcgccttgagatcacattttgtgatgcacctgtctttgctgaccctcatgggcgtgggttgcgtgc

SEQ ID NO: 2848 - DNA, 2132 bp, Zea mays
  Clone ID: PAT_MRT4577_88255C.1
gcacgagcgtgtctccatttcccgcagcagggcccattggaagtttggaattggaaacccaaaaagcataggcgggggtggcaggggaagcacggagcaagagattcgtttgctgccattattaaccgagccgagccgagagagggcaagcaacggacccccattcgcatccgcctccttttccttggagccgaagaagagggaaaggaagggaggacagccgccgccgccgccatcaccaccgtcaggatgcattccacgaacctcctgctcgaggagcccatccggatggcctccatcctcgagccctccaagcccagctacttcccggcgatgaccaagatcgtcggcactctcggccccaagtcgcgctccgtcgacacgatctccgcctgcctcaaggccggcatgtccgtcgcccggttcgatttctcgtggggggacgccgcgtaccaccaggagacgctggagaacctcaagctctccatcaagtccaccaagaagctctgcgctgtcatgctcgacaccgtgggcccggagctgcaggtggtgaacaagagcgagaccccgatctccctcgaggagaatggcacggtcgttctcacccctcaccggggccaagacgcctcctccagcttgctgcccatcaacttctctggactcgccaaggcggtgacaccaggggcaacaatattcgtgggacaatacttgttcactggcagtgagaccacctcagtttggttggaggtttctgaagtgaaaggagatgatgtggtgtgtataatcaagaacacagccaccttggctgggtcactgttcacgctgcattgctcccagattcacattgacttgcccaccctgtctgatgaggataaggatgtcattagaaaatggggtactcccaataagattgacttcctttctctgtcctacacaagacatgcagaggatgtgcgccaggcacgggaattcctgtcaaaattgggcgatctaagccagactctgatttttgccaaaattgagaatgtcgagggcctgaaccaatttgatgaaatactggctgaggcagatggtatcattttatcaagagggaacctgggaattgatcttccacctgagaaggtctttttgtttcaaaaatctgctcttcacaagtgcaacatggctggaaagcctgctgttgtcactcgtgttgtggacagtatgactgacaacctcaggcctactcgagcggaggcaactgatgtggccaatgcagtacttgacgggagtgatgccattctccttggtgctgagactctccgaggtttatatccagttgagactatttcgacagtgggcagaatttgtgctgaggctgagaaggtattcaaccaagatttatacttcaagcaaactgtgaaatatgtcggagaacccatgacccatttggagtccattgcttcctcagctgtgcgagctgctatcaaagttaaggcttcggtgatcatttgcttcacctcttctgggagggctgcaaggctcatcgccaagtacaggcccaccatgcctgttctttctgttgtcattcctcgtctgaagacaaaccaactgagatggagtttcactggtgcttttgaggcaagacagtcgctgatagttagaggcctctttccgatgcttgcagatcctcggcatccagccgaatcaaccagtaatacaaatgagtcagttctgaaggttgctctagaccatggcaaggcatgtggtgtgatcaagtcccatgaccgtgttgtcgtttgccagaaggtgggagattcatcggttgtgaagatcattgagctggacgactagggcatactttgccgatttttttttttgacgaggccggaatttgttggctatatgtataatcctatagctttctttacaaatgagcagtttttccctatggtgccacatcataggacttgcttagcgatttaaaactcgattatgtgccacctaaaatgggcagatggaacaatgaaatcatactgtgccctttatccgttgctattgttaaactaaaaaagaaaatttaaaaactcaagactagttctctcctcgtgcaaaaataaagggcgtcataaaaaaaaaaaaaaaaagcggcc

SEQ ID NO: 2849 - DNA, 2477 bp, Zea mays
  Clone ID: PAT_MRT4577_88257C.1
ggtaccctcgcgctccggccggggcaccgtggcgttgctgttttattcgggtacagaacacccattggtttggatttggaagccatcaccaccaccacctataataaattgcacgagactcgccgcgggccggcatctccatcccgcatcgcgcatcgcatccaccgccgagctttctttctttctttcttttttctgggagaagaggaagaagaggggaggcgcgacaaaaagggcgccgcgcccccgcatcgcccccgacgccggcatctctccctcgctctccttctcccgatctgatccgaagcgcggcgtcgacgacgacgacctaagggcacgatgcattcgaccaacctgctgctggaggagcccatccggatggcctccatcctggagccatccaagaccagcttcttcccggcgatgaccaagatcgtcggcacgctcggccccaagtcgcgctccgtcgacaccatctcctcctgcctcaaggccggcatgtccgtcgcgcggttcgatttctcgtggggagacgccgcctaccaccaggagacgctcgagaacctcaagctcgccatcaagtccaccaagaagctgtgcgctgttatgcttgacacggttggaccggagctgcaggtggtcaacaagagtgaaacccccatctccctcgaggagaacgggactgtcgtgctcacgccgcatcagggccaagaagcctcctccaccttgctgcccatcaacttcgatggactcgccaaggctttgacaccaggtgcaacgatatttgtgggccaatacttgttcactggtagcgagactacttcagtttggttggaggtttctgaagttaaaggagatgatgtggtttgtatcatcaagaacacagctaccttggctgggtcgctcttcacgctgcattgttcccagattcatattgacttgcccacgctgtctgatgaggataaggatgttatcaaaaaatggggtgctccaaataagattgacttcctctctctgtcttacacaagacatgcagaagatgtgcggcaggcacgtgagttcctctcgaaattgggtgatcttagccaaactcagatctttgccaaaattgagaatgttgagggcttgaaccattttgatgaaatactggcagaggcagatggtatcattctgtcaagaggaaaccttggaattgaccttccacctgagaaggtctttttgtttcaaaagtctgcgcttcacaagtgcaacatggctggaaagcctgctgttgttactcgtgtcgtggacagcatgactgacaacctcagacctactcgcgcagaggcaactgatgtggcaaatgcagttcttgatgggagtgacgccattctccttggtgctgagactctccgtggtttatatccagtggagactatttcaacagtgggcagaatttgtgctgaggctgagaaggtattcaaccaagatttatactacaagcggactgtgaagtatgtgggagaacctatgacccacttggagtctattgcttcttcagcagtgcgagctgcaatcaaagttaaggcatcagtcatcatttgcttcacctcttctggacgagctgcaaggctcattgctaaagtacaggcccaccatgcctgttctttctgttgtcattcctcgtctgaagacaaaccaactgagatggagtttcactggtgcttttgaggcaagacagtcgctgatagttagaggcctctttccgatgcttgcagatcctcggcatccagccgaatcaaccagtaatacaaatgagtcagttctgaaggttgctctagaccatggcaaggcatgtggtgtgatcaagtcccatgaccgtgttgtcgtttgccagaaggtgggagattcatcggttgtgaagatcattgagctggatgattagacaatcaggctatgctgttgtctactagggcacgtttttgccaatttttttgcctaggccgaaacttattggctatgtataatcctatagcgcttgaaaactgagcagtttttcctatggtgccatcataggatttgcttttacagttccaattatggtgtagttcaaaaattgctcgactaaactgcggtgtaacagttaaatgggcagatggaataatgtaatcatactgttccctcgttaggttgtcacttgaattgataatctggccttttttttttggttggcagatggaataatgtaatcatactgttcctcgttacttgaaaaaaaaaaaaaaaaaagcggccttatccgttgctattgcctacctgagcctgtttttgtgctacaacataacaaaagaagcgggcggtcctacacctgcagctttcgatcgctctctcgagcattaactgaacgctgaccccacttacctgcataggtggcacctcaagacacttgccatctactgaatcaacgacacgtgcactcacctggaatgctatcgtgc

SEQ ID NO: 2850 - DNA, 261 bp, Zea mays
  unsure (1)..(261): unsure at all n locations
  Clone ID: PAT_MRT4577_88302C.1
aagcgtcgatacctgctcctcgtcgnccggtctttacaagcgatggcgggccgtggcaaggctatcggcgctggcgccgcgaagaaggcaacgtcgaggagctccaaggccggactccagttccccgtcggnaggattgccaggttcctcaaggcgggcaagtacgcggagcgcgtcggcgtcggcgcccccgtgtanctcnccgccgtcctcgagtaccacgcggntgaggttctcgancttgccgggaatgctgcgagg

SEQ ID NO: 2851 - DNA, 398 bp, Zea mays
  Clone ID: PAT_MRT4577_88348C.1
gtccttcctcggcctcggcatgaccacctacaccggctggtacctcaccatcgccgcggccgtccacggccaggtcccaggcgtcacccactctggccccagcaagctcgtgccctacttcaccggcgccaccaacatcctctacaccttcggcggccacgcgatcactgtggagatcatgcacgcgatgtggaagcctcgcaagttcaagtacatctacctgctggcgacgctgtacgtgttcacgctgacgcttccgtcggcggcggccatgtactgggcgttcggcgaccagctgctgacgcactccaacgccttctcgctgctgccgaggacgccgtggcgcgacgcgcggtggtgctgatgctggtccaccagttcatcaccttcggcttcgc

SEQ ID NO: 2852 - DNA, 261 bp, Zea mays
  unsure (1)..(261): unsure at all n locations
  Clone ID: PAT_MRT4577_88697C.1
actttgtacaacgccttttgatagagatgggtgcttgagcttcttcgtttttgcaccaaaagacaggcaggatgtcttgcagctgcggatcaagctgcaactgcggctcaagctgcaagtgcggcaagaagtaccccgacctggaggagaagagcaccgcggcgcaggccaccgttgggggggggggcgccccggagaagacagctgctgccgagttcgaggccggggcggagtccggngccgagacctcccacggctgca

SEQ ID NO: 2853 - DNA, 635 bp, Zea mays
  Clone ID: PAT_MRT4577_88720C.1
ggccgcttttttttttttttttttctttttttttttttttttttttttttttttttttttttgttgttttcttttttttggttcttgttccatgatcatacacaagcacatgcatacacacacgtatacatacgatagatcacgaagccacgctaatccgggcataacacgagcgcatacatacgtacgcgcgcacaacacggcgggcgctcgatatcactcgccacacacgcacgcgtagcacacggggagggacgacgatacgggaggatcaatcagcccaagaagtggagcttcttcgcgccgacggcctcctgggcgtccttgcggcccttattctgtgggtggtgctcgcggaaggcgaagccgccggagccgacggccgccgcctccgcgacctcctgctcgatcttgaggcggggcgcgcgctccgggtccttctttgccccgggcttctcgtacagtgcgaaggcgccggcggcgatggcgccggcctccccgaggtgctgcttgtgcttgtgctgctggccctccttcttgtactccccgcactcggtctggcccgtggacacgacctccgacaccgtggcctccgagaactcgggggactcgccggacccgccgccggcgagctg

SEQ ID NO: 2854 - DNA, 1594 bp, Zea mays
  unsure (1)..(1594): unsure at all n locations
  Clone ID: PAT_MRT4577_88792C.1
tgtcaatggacaagccctgcagtttgtttacgggagcaagcaagtctttacccaagggggcattctcgcggcgactgatgacgacaaatctgtacaggagtcaacgtttcaaggaagcgatgaaggacgtcatgactcagtgctgcagtcctgatgaagtcatctttggtcctgacttccatcagtctttgtactgccatctattgtgtgggttaatctactcagacgaaatccagtttgttttctcgccgtttgcgcacagcctcgtccatgcatttcacagtctcgaggaggtatgggaagatctatgtgctgacataagagatgcctccctctcggagagagcgcgcaggtcatcaaccactacctcagcctcggcagcgccgtgccgaatcctgagctggctagctcgatttacatcaagtgccagagcttgagcaattggtatggggtgatcccaacactgtggccaaacgtgaagtacatctatggcattatgacggggtccatggagccatacctgaagaaattgagacactatgctggtcacttgccgctgctgagtgctgactacggtgcatctgaaggatgggtcggctctaatgtaaacccaacgttgccacctgaggaggtgacttacgctgttcttcctaacattgcttatttcgagttcattcctctggaaaaaccaaaatgggaggaaacggagatctgttcctctgttcactacatagagtcggagcctgtaggcctaactgaggttgaggttggcaaaatctacgaagttgtaataacaaattttgcaggtctataccgatacagactgggagatattgtgaagatagcaggcttccgcaacgcaacaccagagctccagttcatctgccggagaagcctagtcctcagcgtcaacatcgacaagaacacagagaaagatctgcagctggccgtggaagccgcggagaagctcttggccgcggagaagctggaggtggtggacttcacgagcctcgtggacaggtcgagcgagccagggcactacgtcgtcttctgggagctgagctccgacgacggcgccagcgaagacgtcctgagcggctgcgcgagctgcatggacctggccttcgcggacgcggggtacgtcgggtcgaggaagacccagaccatcggcgccctcgagctccgggtcctccggaagggagccttcgcgcaggtcatgaaccactacctgagcctcggcggcgccgtcagccagttcaagacgccgcggttcgtgagccagtccaacagcaaggtgctgcagatactgagccggaacgtcacccggagctacttcagcactgcgtatgggctctgatcgacgatgctacggcgctacgcaccaagtactggtaaggctggaagtatagtgatcgagagtgcatggcgcacgacgacgatccatcatgctggcagcctgggagttgcacgacggctgacagatgtatcatataactgtcggtgtaaatataggcctgtttgtttgtaggccaaggttgctgcctatagtttaaatgtagcatattaatatctnaaaaaaaaaaaaaaagcggcc

SEQ ID NO: 2855 - DNA, 373 bp, Zea mays
  Clone ID: PAT_MRT4577_88848C.1
attcggctcgagggcgtcttcctcccctttatatacgtcctcctagggttagggttcctgagggttttgtggaggggcgatggctgctgctgatgtggagtaccggtgctccgacggcggacttgcctgggccaccagcaacgagtcgctggagaatgccttcgtctactacggcgagatccttgactccaaggtcatcaccgaccgccagacggagaggtcccgcaggcttcatgcttagttaccttctcctgcgagaactccatgctcgacgctatcgagaacatgaacggcaaggagctctacggcctgaacattaccgttaaccatgcccatacctctgacggtagcggacgcagctgttgccgtggct

SEQ ID NO: 2856 - DNA, 315 bp, Zea mays
  Clone ID: PAT_MRT4577_88850C.1
agcaagcaaaaattccccaatcctctcgtctttgtttcgaacatgtcggggcgcggcgggggcggcatgggcctgggcgagggcggcgcgaatcgtcaccggaaggtgctgcacgacaacatccaggggatcacgaagccggcgatccggaggctggcgcggcagggcggagtgaagcgcatctcggagctcatgtacaaggagacccgcgacgtgctcaagatcttcctgtagaacttcatgctagacgtcgtctcctacactgagcacgctcgccgtaagaccgtcacagccatgtacgtatgatacgcgctt

SEQ ID NO: 2857 - DNA, 698 bp, Zea mays
  Clone ID: PAT_MRT4577_88950C.1
tgattctactgtcacacacaccagagagagactgtggtttccagagccaagtgtgtactagcagtttaggaaccagctagatcggatggcagcagggaggcatcatgtcggaggagaagtaccaccacttcttcgaccaccatcaataaggacgaggagcagcccgccggtgagtacgggtactccgagaccgaggtggtgaccgtcaccgttgagggctagtacaaaaggtacaagaaggaggagaaggagtacgagcactagcagcacctcggtgagggcggcgccatctgccgccggagccttcgcactctacgagaagcacgaggcgaagaaggacctcgagtacgcgtgcaggtacaagatcagggaggaggtcgctggcgcggtggtcgtcgtggtcggcgagtacgtattccatgagcaccacgagaagaagaaggaccacaaggacgccgaggaggctagcggagagaagaagcaccgccacctcttctgatgagcgaagtaccggacggagcgcgaccgagctaggtggctccgaggcacacaaccacgcacctgtttaattctgtactgcatgcgtgtgtaatttgatggttcacaataatgagtccctctccggaccttggtagctggttgcttgtggtgagtgagagtgtgatactgatggacaaaaggtgctgggcgtgaggcta

SEQ ID NO: 2858 - DNA, 2908 bp, Zea mays
  unsure (1)..(2908): unsure at all n locations
  Clone ID: PAT_MRT4577_88994C.1
aattcggcacgaggaagggatccttgcgaagacccagacgccagaggggagtgagggagaggggagggagaaataaataaacccgaattcagccaaacttctctctcccaccgcgcttgcatcctctcatcgccaccccaccctcctcctccctgtctttctccccccctctctctccccctcttgacaaattttcctccacccattcccttcctcccctcttcttcttctccacccactccaccgatccccctctttctctctgaattctctctcgtcgtgcccacccttcccatctgtctgctgcccctctctcgcaatcagtcactcggctcttgtttcttccgtctgctgggttgattctctctcttcctctccgtggagaaacaggaggagagagagggaagaagagaaatcggaaccagcctgttctttttgcctggattgcggttcttgcgagttgttcagaaactctgggccagtttctggtcctttaaactactggaaagaggaaccatcagagatgccaaggcagccaacaaattgatatctaattgccctactttggatcatcataatgcaaggacagaggaattctatggagcattttgctgatgtctttggattcgacgttgcatcgagttcaggcaaccctgtgatggatcagcagtcatattggaataatgttcttggatcagtagaatcacataatcttcaaggttatcagatggctcacagtgatgccgccatgccatatggaaatgaaccacagcaagatggtacatttcttggtttctgggaatcaggcgaagcaagttcaagtgccagtgcactaaactatggcagctctaataatgtcaaaacagagcatcttaacattggtggtggaggtggactgaggattggtgaaagccgactggtagctgacaatggcatttctctggatgtggatatcaaccttaacgccaacgttaacgatctttgtggtcaaagttcaaatgttaactgtgcctctcaaggtcctgagcagtattgtggcagtgatcgtaatgctataaattctcagccgactgacctgggattacacccattcaggacattcctactagatgcacagcaagcagaatcttttactttgaatcctagtgaaaaccctttgggtgatttttcatcaatgcaagaaagcattgaacaaagaccaggtggttccctggatggtcgccggctagcgtgcaagagaaaaaatattgaaggagccaatggccagagttcagcaggtgctagtacaagttttccccacaggaacgataatgcattccataacattgcttcttcaagttacaatcctgcacctatcagaaattcatcctctcccaagtgtttgccagttccaagttctattgaagatcaactcccacggtatggaactaatgtagggctctcagccggtacttatgaccttcatggaggggtcaacaatgctgtgaattcacagagaagtttccgagcaagaactaccacatctcaacaggttgctccctgtagtgtatggccctcttcaaatgctatcagactttctaattcatggaatcaccagccacctcatttccaaagtgcatttgatgatccccaggaggttattcctgtggtcagcagcctcaacttgcaataccaacatccaatgaatgttcctggtgtgccacaggctgctaaccgtttcactgaccatggagcttcatcatcgagagctgggagtttggagaacagaattattggtagtgaagaggctcctagaaggtatgccgcgcctaccaactactctgatttagttcccccacctgcagtagacccgagacgtttgctgccagaaccatctaattggagttctgatgtccgaggcactgcaatatcaggaagtattcctcctgtatcaagagctaataacagtgcaactgttaatccgccagcaggattcagtcaccaaaacctcacccggcgccatcctcgaaatttatcagaggagattggtcggctatctggagcacttcgcggccatcaacccccacgcttaaggccggggtttctgctggagcgccagggcgatggtgtttggggtgttcctttatcaacaaggggtagagaaggaagaaggttaatggagattcggaatgcacttgaaatgatccatagaggggagaatgtaaggcttgagtctatcttctatggcggtgttgacattcacgatagacacagggacatgcgccttgacattgacaatatgtcctatgaggagctattagcactcgaggaaagaataggaaatgttggcactggcctcagtgaggaagctgtgataaggttgctcaaacaaaggaaattttcatcttggacactaaaagcatctttggaccctgaaccatgttgtatctgccaggaggagtacgctgatggagacgacctcgggaggctggactgcgggcacgacttccacgctggctgcatcaagcaatggctggtggtgaagaacgtgtgccccatctgcaagagcaccgcattgaagaagacctgaaacccgaacaaaggctcgtgtcagagacacccccccatgtttctatgttcactcgatcgttcgcgagatcctttgccgattcgtattgctacgttttttttggtcgggaaaattttgccagacacctgcatgctattgggaaaggaaaagagagagaaaaagagagagagagagaggatgcggttgcggtcctctgtaaactgctgctgcagtaaataatccctggaatatgtctccctgcatccaaccaaatatttagttagctgttatagtggacgccgtangattaaaacctggaagagagcctgttggctgttgcccacaaaaaaaaaaaaaaaa

SEQ ID NO: 2859 - DNA, 544 bp, Zea mays
  Clone ID: PAT_MRT4577_88998C.1
tatgaggagctattagcactcgaggaaagaataggaaatgtcggcactggcctcagcgaggaagctgtgataaggttgctcaaacaaaggaaattttcatcttggacactaaaagcatctttggaccctgaaccatgttgtatctgccaggaggagtacgctgatggagacgacctcgggaggctggactgcgggcacgacttccatgctggctgcatcaagcaatggctggtggtgaagaacgtgtgccccatctgcaagagcaccgcattgaagaagacctgaaacccgaacgaaggctcgtgtcagagacacccccccccccatgtttctatgttcactcgatggttcgcgagatcatttgccgattcgtattgctacgctttttttttttggtcgggaaaattttgctgccacctgcctgcaattgggaaaggaaaagagagagaaacagagagagagagaggatgcggttgcggtcctctgtaaactgctgctgcagtaaataatccctggaatatgtctcccctgcattcaaccaatt

SEQ ID NO: 2860 - DNA, 1328 bp, Zea mays
  Clone ID: PAT_MRT4577_89080C.1
ggaaggtcttcgggaattctgttcagcagaatccgagtccactagccctcctcagtcctccccagggatttcgacttccccgagacaccatcgctacgacgagcaagcagagcaccatctcggctgccttaaactgtctctccgccggatactacacccgccgccgcagcgccgaccttgtctcaatcgagcggagcgggcgatcggattggttgcttccttcccccatctcatgttggtggactgagagatggagttttgatttcaaatagcatctagagaactgccactaagtttttaagttagtatataatgggtggctgttgttgctgttcgtcgagaacatctgaagccgatagagcaccaattgatatatatcgtcaacaaaatcttgaggagcatgagccgctgtcttcagcttttgatggatcatctccaccatcttcaattgttgcagtagacacaaatctggatacttccacacctgacacatatcgagcaccacctgcacccttgccttatgatgttgttttggcagtcccaactacccctggtttggagaagctagacaacaagagcaaaactgatgaccaacaagagtccataaatgatcaggagtctttaaaggtggatgagtcatgtaagaaaaatgtcactgaagataaggctgaggaggaggatgtttgtcctatctgccttgaagaatacgatgaagaaaatccccgctctgtaactaagtgtgagcaccatttccatctttgctgcattcttgaatggatggagcgaaaagatacttgcccagtttgtgaccagacaattttggtggatgagatgtccgaatagacttggtaatcctggtggatcatcacttgaagctgtttgttactgaggaagtgcaggcaacaactactacactcttgatattcgtccattctgggtggctctcagagtaatgaattgatggggcaaaaattgaaaggatgaacgacatgaaatgtatttacgccccctcctttaccctgcattctgtgtcatgcttttgctgttcatagcaacaggtggactaggaaactgcttggttgaattatatatagagagagatatgtcggcttgcaggttgattcagttaaaagtgcaaaactatgccatttcgcttttctgaattcagagtttcagacatctgctggttcttccaggaatccagtcagctttttacatggtatattaggtggttgcaggtaaaaatggtctagatggaggtgggggtttctttgtataatccacatgctattcaagcttcctgtatataatatttcctgttttcttcg

SEQ ID NO: 2861 - DNA, 987 bp, Zea mays
  Clone ID: PAT_MRT4577_89293C.1
ccacgcgtccgaaaccctcccttgccttgcccagttgcccccaaaccccagccaccagctaccaatggcggccaccgcgatggaccatgacggcggcgacgacgtggtcacaccaggggagcttctcggaaactcattaaccctcgcggccggacgtggcgcctacgccgacggtcgctctgtgcgcgcgtcggtcaccgggcgccgccgcatcgtgccgcccgcacctgcctccgacgaccagagatccacggtggaggtggtggggcacaaggcccatggagctgtgccgcagccgggaagcgtcgtcatcgcccgagtaacaaaggttatggctagaatggcctctgcagatatcatgtgtgttgactcaaaggctatcagagaaaagttcactggcatgataaggcagcaagatgttcgtgcaactgaaattgacaaggtggatatgtaccaatcatatcgtcctggggacattgttaaagctatggttctttctcttggtgatgcaagggcatattacctttccactgcgaaaaatgaacttggagtcgtttcagcacaaagcatagctggtggtacattggttccaatcagttggactgagatgcaatgtgatttgaccggtcaaattgagcaaaggaaagttgcaaaggtggaatagatgtgctgtggccctcctgataaatggtggtggcggtatacaaattgtggaccagtgacaccaggtccttgggcggactacccaattctgcgacgtccaacttcattacagctgcattgagcatgggtttttaaaaccctggctgaatttaactagacatgaatcgtagccatgggtcctgtaacccaaccttgggatctgaatcatagccatgggttctgtaacccagtaaccttgcccttgtgatttgttactctgtgagctaatgacattgcagttttccaccttgtgatttctaggaaaaaataaaaagaaaagccagt

SEQ ID NO: 2862 - DNA, 388 bp, Zea mays
  Clone ID: PAT_MRT4577_89333C.1
cggacgcgtgggctcgccgtcgcttgtggcagaggagcagcttcacggttccaaagacaccttgaccttgaagggcgagaaggctttgctcgagttgcttctaggcatggctctggaccagcacgttgacggcaggaagctcattacccaacaggaggctgaggatagtgatttcgagagctatttgagagaagcaacaagccgagtgctttaccagccaacattcattgaagaggatgatgatgatgattctgtttcggagagctcttcagcatcattggccaaaccagctggaactttggatcttggcaagctgacagaggaaccacagcctcaccgcagtgtggatccaaaccattcgtatgatcaagtgtttattagatccact

SEQ ID NO: 2863 - DNA, 304 bp, Zea mays
  Clone ID: PAT_MRT4577_89355C.1
ataaaatactgcaaatgttagccttaaaaaaaaaaaaaaaaaaaaaaaaaaaaaaaaaaaaaaaaaaaaaaaaaaaaaaaaaaaaaaaaaaaaataaaaaaaataaaaaaaaaaaaaaaaaaaaaatataaaaaaaaaaggggggggccgttttaaaggaccaaagtttacgtccgcgtgcttgcaacgttattgtttttttttggggccccctaatttaaattaactggccggcgttttaaaacgtttggactggaaaaaccctggcttacccaaatttattggctttgaaacaaatcccctt

SEQ ID NO: 2864 - DNA, 749 bp, Zea mays
  Clone ID: PAT_MRT4577_89477C.1
ccccgcgtccgcggacgcgtgggggcgctttgcttctccaccacgcgcggctggccctcggcctctttcttcgtccaagggaaatctccggatacaaggaggaaatctaggaaaggtgcaattcaaactaatgatgaagaaagctgattcgtttgtgctatgttgcaagggaagggcgggcctagtacagcgatagagcctaccgtctataatcggaaggtcccgggttcgagccccagcctctgcatattatgcgggtaaggcttgacgcttaaagatacccttccccagaccccgcacagtgcgggaagcctacggcactgggctcctaaaaggaaacgcagtgcagagtttaatgactgccatgatcaatgtacatttggatgggaatgagccatttgctggtaaaccatggcacctgctactgttgatgttgcctcatccgacctggaagatatatctgtaaattcaggctgaagctcaggtggttattgtatcaacaagccctggcacaaaaggcttcgtttgtaacaaactaacaataaagcatcgattgacctgtttgctgaatgtgtgatacggtacttccaatactaggtcagcatcagtccagaagctgtaccctgaacaaagattctggatggcttcttgtgccagctaggaacaatgtaaaattgatgtaagcgtctgtgcgcactcctgatccatgtacaactaagttaaaattttaaactgttatagattgttgt

SEQ ID NO: 2865 - DNA, 519 bp, Zea mays
  Clone ID: PAT_MRT4577_89488C.1
gggagcaccaaaaaacaccattttttccttaaaattaaattaaaaaaaagcctggggggggggaaaaaatccattgatccccaatccatgctgtttgatgcatgggtctgctgaaacccggggtgaacacagaattaaaaactgacacagagggaccttgcaataaaaaacacagagggggaaaaacaaacaccacccgaacgaaaataaaccctttggactgggggaaaaatcacgggggcaaaaaggataacttgggcgggggggccccaccggtaaatttcttcagttcccgggggagttgccgaaaccccccccacggttgccaccgccgaaacccccgccaccaccaccgtaaccgccgcccccaccggagcccccgccaccgccgtagccgccaccgccataagggggcccgccaccgccgtagccggcgccttcaagggcaccaacggacccaccggcggcgctttaaaggggggggggggaatgggcctttttgaaggggattttgcggcc

SEQ ID NO: 2866 - DNA, 1860 bp, Zea mays
  Clone ID: PAT_MRT4577_89553C.1
aattcggcacgagggggaggagaaccgtggtctgtcctttatgtatgatggtgtacctcttctagctatgttggatgagtatgttatgctcagacaagaaagggaagaagaaaagaaaagaatgcgggaacaaaagcgctacattgagcagcaactgaacaccgatcatgaagggccatttggatcgcgggtgagtccaaaccggcctgccagttcgaagaaggctgttggcgtaaaggtgaacggcagcgtctcaaacggcactcctccaaacagaaggctctcaatcagtggccaacagaacggtggtggccatggcgtcaggtctggagggaaggatagcaagaaagacacggcgaagacagcatctccagggaacaatgcagttgcagctgctcctgtggacgcggtctcccaaatttctgtcaccgatccggttccgagcacaccatgatctttaacctagcatcgtatattagatataagcgactctttttctgatgttctgttgttttgtggtaatatcttataatgccttcgtagagtaattatgatgcctgcccatccttcagctgctttggcttcatggtgtaattcttgttttagttccgctcggccgtgctgtttcgacctgtcagacggtgtagtgtagtcttactgagatgtattgcattaatcagtgtgctggacatatagctgttgaaaccttttctgttccaaaaaaaaaaaaaaaaatatcccatccatcacagctagctagcgtacagacgaataatctcttcttcacctcactagctaacaccagctagcagctcgatcgctctgtcctgcaataatggccgctcgctcctcctcccagcagctggtcgcggcggcggtcctggcagcggcgctgctgctgctggcggcgggggccgggacggcgtcggcggcggtgagctgcggcgaggtgacgtcgtcggtggcgccgtgcctcgggtacgcgatgggcagcgcggcgtcgccctccgcggcgtgctgcagcggggtgcgctcgctcaacagccgcgcgtcgtcggcggcggaccggcaggccacctgcaactgcctcaagagcatgacgggccggctcggcgggcggcgtcagcatggccaacgccgccaacatccccggcaagtgcggcgtctccgtcggcgtgcccatcagccccaccgtcgactgcaccaagatcaactgatcgatggaaccatagtggaggtagctcgctcgttggatggcagcgtacgtggccatcagcagcatgcagtcgtcgtcgtagcagagatgtcctagctacgtgtgtgtcatgcatcagactggcacataataaagaagtagatcatgcacccactagtgatcacttcgtctagtgtccctccgttcaatgtcgtcgtcgtcgtcgtgtaccttacgtgacatgctgtagcacgtacgctagcagagcagcacctcaatgtccttgggtttgctttgctggctctctgttttcgtcttgtgttgcttttaatctggcacaggtttctaaattataataatgaatacttttttgtccaaaaaaaaaaaaaaaaaagcggccaaaaaaaaaaaaaaaaaaaaaaaaaaaaaaaaaaaaaaaaaaaaaaaaaacaaaaaaaaaaaaaaaaactcgaggccggtaccagccccccaatggccttgggtttgctttgcgggcccccggttttcgtcttggggtgcttttaatcgggcacaggtttttaaattaaaaaaatgaaaacttttttgtcccttcccttttaaaaaaaaaaaaaaaaaaaaaaaaaaaaaaaaaaaaaaaaaaaccaaacccaaaaaaaaaaaaa

SEQ ID NO: 2867 - DNA, 282 bp, Zea mays
  Clone ID: PAT_MRT4577_89796C.1
tagttcgcgtggggcccgaatgaatattctacaggcatgggttatttttcaactgccaccggcttagctacatttacaatgatgttgttaggaagagtgatcctcagaaagttcgggtggggagttgcagatacgatcacgcctgtagtgttactcctcacaggagtagggttctcctcactgactttgtttggtgagccatagactcctcttatgaccaagttttgggaagacaccctctgcttgcggcagtcttatgttggaagcaatgcataacatttt

SEQ ID NO: 2868 - DNA, 593 bp, Zea mays
  unsure (1)..(593): unsure at all n locations
  Clone ID: PAT_MRT4577_89874C.1
gtcgggatcgtcattctgctcttcatcaactccacaatcagcttcatcgaggagaacaacgccggcaatgccgccgccgccctcatggccagcctcgcgccgcagaccaaggtgctgagggacggcaagtggtcggagcaggaagcggcgatcctggtgccgggcgacatcatcagcatcaagctcggcgacatcatccccgcggacgcgaggctgctggagggcgatccgctcaagatcgaccagtcggcgctcacgggcgagtcgctccccgttaacaagatgcccggcgacagcatctactccggctccacctgcaagcagggcgagatcgaggccgtcgtgatcgccaccggcgtccacaccttcttcggaaaggccgcccaccttgtcgacagcaccaacaacgtcggccacttccagaaggtgctgacggcgatcgggaacttctgcatctgctccatcgcagtcgggatgctggtcgagatcatcgtcatgtacccgatccagcaccggcagtaccgcgagggcatcgacaacctgctcgtgctgctcatcggcggaatccccatcgncatgcccaccgtgctgtc

SEQ ID NO: 2869 - DNA, 290 bp, Zea mays
  Clone ID: PAT_MRT4577_8991C.1
cccttaaaaaaaactaaaaaaaaagcctgacgggggtaacagcatccatcgacccgaaacccgggctggttgatgcatgggtctgctggacccggggatgaacccagcattaacaactgacacagagggaccttgcaataaaaaacacaggggggcaacaccaaacgggacgaacgaagataaccccttgggactggggaaaacatcacgggggcaaacaggataactgggccgggcgggccccaccgttaagttcctccaattcccgtaggagtttgccgtaccccccc

SEQ ID NO: 2870 - DNA, 723 bp, Zea mays
  Clone ID: PAT_MRT4577_89934C.1
ctggcttctcctccccctcttaccaagtcctcctcgggttagggttccttagggttttgtggaggggcgatggcggcggctgatgtggagtaccgttgcttcgtcggcgggcttgcctgggccaccagcaacgagtcgctggagaatgccttcgcctcctacggcgagatcctcgactccaaggtcatcaccgaccgggagacggggaggtcccgcggcttcggcttcgttaccttctcctccgagaactccatgctcgacgctatcgagaacatgaacggcaaggagctcgacggccgtaacatcaccgttaaccaggcccagtcccgtggcggtggcggtggcggcggtggctacggcggcggtcgcggcggctacggcggtcggcgcgaaggtggcggcggcggctacggaggcggtggcggctacggcggtcggcgcgagggtggcggtggcggctacggcggcggtggcggcggcggctggagggactgatgtgtgggcccatcctggcttcggccgagttatcttatctatctatagtatcgtgttaccgttcgcttctgtcaccgtgttagtgtccgttctacctttggattaggtgttggtaccctgttgttcgctttggttgctcccgctatgaaacgagacgagagaagaatgagcaaggtttttgttcgcagctatttttgtccaatgatattgatatattgttcccctgtc

SEQ ID NO: 2871 - DNA, 763 bp, Zea mays
  Clone ID: PAT_MRT4577_8997C.1
cggccgctcaggcggcgggcgggaatacaaatctctctcggctccccgctccgagtcgcgtcgcgtgaggagaaaggaagggaagccggaaagggttctcgccgacgcggaaggaggagatggccgggaagggaggcaagggcctgctcgcggccaagacgacggccgccaagaccgccgagaaggacaaggggaagaaggcccccatctcccgctcgtcccgcgcggggctccagttccctgtgggccgtatccatcgtcagctgaagcaaaggactcaggccaatggccgtgttggtgctactgcggcggtctactctgctgctatcctggagtacctgacagctgaggtcctggagctggctggcaacgccagcaaggatctcaaggtgaagcgtatcacccctcgtcacctccagctggccatccgtggagacgaggagcttgacaccctcatcaagggcaccattgctggtggaggtgtgatcccgcacatccacaagtccctgatcaacaagtcctccaaagagtgaacagaaaaaatagcaaaggagcatctctagcttaaactggacattttctcagtcgtctgtgagataagtttatcgtcgtgtcgtttagcgtttagctgtgctccttccagatcgaagtcgttgtctgtctgtgtaatgtttacctggtactgattcagtcatttggacattggtgtttatgttcgtcgttgactctgtgattggactctgaatgcaaaaaccttttaagc

SEQ ID NO: 2872 - DNA, 401 bp, Zea mays
  Clone ID: PAT_MRT4577_90005C.1
cagacaaaaaactttattattgaactataactcataagaaatttaaaagagggccccaccaatgatgggttgttggtaaaatgctgttgggtttgtcaaagcaagttggttgaatggccccaattgttgcagttgaaaaagggtgccagcgttaggcgcaccgtgttggtaaaacggaaacaattggggttgtgtaaaaaaggtagcagggctcacaccaactagctggttgaatggtagttgttgtggctgctgtaaaaaagccggaaagttcaaagctgtcatttggttgaagggaaaaaattgctgggggtaggcaacaaatagctgtctaaagggtaattgttgttgttgcaaataagaaccagagtttattgcacttagtgggttgaatggaaaaa

SEQ ID NO: 2873 - DNA, 350 bp, Zea mays
  Clone ID: PAT_MRT4577_90066C.1
ctttccctcgcgccgacgccaacgcaacccttgtaggcccaatccctcacagcaaccatgggtggcgctcatgagtccctctatctggggggcacgatgcgcggacacaaccgcgaggtgacgggcatcgcgaccccgatcgacagcttgccgtgcatcgtgttgtgctcccgggacaagtccctgctggagtgggacctgaccaacccggtccactccaccccggaatgtcggcgccaccggccactaccgcgtacccttgcggcgcctgaccggtcactgccacttggtacaggacgtcttccttagttccgacaggcagatagccctttccggctcctgggatggag

SEQ ID NO: 2874 - DNA, 191 bp, Zea mays
  Clone ID: PAT_MRT4577_90173C.1
ggggaacaaaaacttggtcattcttttctcgggtcgtttcatagcggggagcaaacaaagggaacaacaggggtgccaacacctaatccaaagggggaacgggcactatcaggggggctgaaaacaaacggtaacactattctatagatagataaaataactcgggcgaatcctggatgggcccacacatt

SEQ ID NO: 2875 - DNA, 371 bp, Zea mays
  Clone ID: PAT_MRT4577_90388C.1
ggagatcggtgatcagacacagggcattacatgcgtgtgctggatagggcagtcttcaactctactctatgcaaattacagcggtaacattaagatcttataaatggactgaggagtgtgcatgtgtttgattttgaggtctaaatagaccgacttcttaggccgggctcaacagatcattcatatagccgggttagatgtcactgtctaggcagtttagttgaaaatgagagatggaatgagtaatgctgctagagatagcttactaagttgagcgcgtgcatgacttcaaaatttgcatcgagtaaatgcagagttgccaactgtgcaagttaatatcagttgcacagtttgtaaaggtagcaactgta

SEQ ID NO: 2876 - DNA, 166 bp, Zea mays
  Clone ID: PAT_MRT4577_90405C.1
agcacggtgagcataaagctgggcttgccgcaccggaacgccggcgcggacgagcgcagcgagagctgcgagccggctatggacgagatacaacgcgaggtgtactcgaataaaggcgtgatgcttcagctgatgcggtggacacgtccgcgatgggccacggttg

SEQ ID NO: 2877 - DNA, 1997 bp, Zea mays
  Clone ID: PAT_MRT4577_90458C.1
cggccgatccatcgatggagctgtgagctgagctgagctgagctcaccaccaccacacacgggagatagctatagctagcatagcaagccagccagtcagcgacttagcagcagctagctagccatgctgccgtccttcgtgtcgccgacggcgagcgccgcggcctcggtgacgcctccgccgcggccgataccaggcagctacgggccgccggtgctgggcccgctgcgggaccggctcgactacttctggttccagagccaggacgagttcttccggaagcgcgcggcggcgcaccgcagcaccgtgttccgcaccaacatcccgcccaccttccccttcttcgtgggcgtcgacccgcgcgtggtcgccatcgtggacgccgccgccttcaccgcgctcttcgacccggacctcgtggacaagcgcgacatcctcatcgggccctacaacccgggcgccggcttcaccggcgggacgcgcgtcggcgtgtacctcgacacgcaggaggaggagcacgcgcgcgtcaagaccttcgccatggacctcctccaccgctccgcccgcacctggtccgccgacttccgcgcgagcgtcggcgccatgctggacgccgtggacgcggagttcggcaaggacgacggcagcgacaagaagccctccgccagctacctcgtccccctgcagcagtgcatcttccggttcctctgcaaggcgttcgtgggcgccgacccgtccgccgactggctggtggacaacttcggcttcaccatcctggacatctggctggcgctgcagatcctgcccacgcagaagatcggcctcgtccagccgctggaggagctgctcatccactccttcccgctgccctccttcctcatctggccgggctactacgtgctgtaccgcttcatcgagaagcacggcgccgaggccgtggcctacgccgaggcgcagcacggcatcggcaagaaggacgccatcaacaacatcctgttcgtgctcggcttcaacgccttcggcggcttctccgtgttcctgcccttcctcgtggccaaggtcggcggcgccccggcgctgcgcgagcggctgcgggacgaggtgcggcgcgccatggtgggcaaagacggcgacggcgacggcgagttcgggttcgccaccgtccgcgagggcatgccgctggtgcggtcgacggtgtacgagatgctgcggatgcagccgcccgtgccgctgcagttcgggcgcgcgcgcagggacttcgtgctgcgctcccacggcggcgccgcgtaccaggtgaccgcgggcgaggtgctgtgcgggtaccagccgctggcgatgcgggaccccgaggtgttcgagcggcccgaggagttcgtgccggaacgcttcctcggcgacgagggcgccaggctgctgcagcacctcttctggtccaacgggccggagacggcgcagcccgggcccgggaacaagcagtgcgccgccaaggaggtggtggtggacacggcgtgcatgctgctggccgagctgttccggcgctacgacgacttcgaggtggagggcacctccttcaccaagctcgtcaagcgccaggcgtcgccgagcgtggcgcaggcagccgccgccgccggagcgcagcagtgagtgcgctgtataggatccatcggtggcgtgcgacgtcgccggcgccggcgccggccaagcaataaagtaatgagtaggccctcctcgtcatccacatgctcgtctgtgttcgacttcgatcggtgtctcttcctcccggccggccgctggccgccaaacagccgttgtggtaataaaaaaatcacttgtggaattgcagagtgtaccgtggtcacacacacttgtacattgaattctttagtgatgctgcaatcaaattgaatgaacatgtactcgctcaaaaaaaaaaaaaaaaaaaaaaaaaaaaaaaaaaaaaaaaaaaaaaaaaaaaaaaaaaaaaaaaaaaaaaaaa

SEQ ID NO: 2878 - DNA, 111 bp, Zea mays
  Clone ID: PAT_MRT4577_90583C.1
gggctggcttctgctccccctcttatcaagtcctcctcgggttagggctccttatggctttgtggacgggcgatgtcggcggctgatgtgcagtaccgttggttcttcggc

SEQ ID NO: 2879 - DNA, 763 bp, Zea mays
  Clone ID: PAT_MRT4577_90667C.1
caaccaactccctcacgatgtttatatatatatgtgtacatcctgcagtgctagctttggagttcgatccaatgatgatgccgactgatgatgctatgcggtggtggacgcagatgtgcggcgagggggcacacgttgctgtcgcgtacgtcgagcggctttattttggagagcttctcgccgctttgttggttcgctcaaaaaagaagtacagtacagatcaggagcaccaccaggtctagtcgtgatcgtcggctagcgttcagctagcagcccatggaagtatggaacgagtgacgccacccgatcaagacagggaagctccaaaggagcagtactgcggctgcaatgcgtttgccagggaatagtagtgtagcagctgttgtattcattcgtatggatccatcttgtctgcggcagccagcagcagggggttcatctactctgccagtctgcgtgatgcctgagagcaaagcaaactgattagcatgcagggtttgcagcttgcaggcggcaagcggcatgcatgatggcatcggcatcggcatcggcatcaatgatttcgctgcatatgacgccgcttctgctggcgccgcgccaacgacgattgggctggcctgacaagcgagaaaagcagcagttgtagctagactagatagaaacagtcggcggtgacaagacagaccaacacaacacaccgttcgtctctcgcgcctgccagtgatcgcaattggacgggtgtgcttgacctcaattaattact

SEQ ID NO: 2880 - DNA, 237 bp, Zea mays
  unsure (1)..(237): unsure at all n locations
  Clone ID: PAT_MRT4577_90691C.1
tccggctctgatctgggccagtctgggttgcgcgaacagtcggaaccctaattccctccccggcgccggcgccggcgcccccctagctgcgcccccacgaccagcagaatccagatcgaagttttgctcttgccgcggncccgnctaaactccaaaagtgcgaaccccctaagtcatcgatcccagnctggctccgnctacgcgnctcgtgacggcgtggagcnctcccgtatctgc

SEQ ID NO: 2881 - DNA, 686 bp, Zea mays
  Clone ID: PAT_MRT4577_90705C.1
ctctgagttcatcagctaccccatctctctctggacggagaagaccactgagaaggaaatttctgatgatgaagatgaggatgagaagaaggatactgaggagggcaaggttgaggaaattgatgaagagaaggaagaaaaggagaagaaaaagaagaagatcaaggaggtttctcacgagtggaacctgatcaacaagcagaagcccatctggatgaggaagcctgaggagatcaccaaggaggagtatgctgccttctacaagagcctgacaaacgactgggaggagcaccttgccgtcaagcacttctcggtggagggtcagcttgagttcaaggccgtcctcttcgttcccaagagggccccctttgacctctttgacaccaggaagaagctcaacaacatcaagctctatgtgcgccgtgccttcatcatggacaactgtgaggagctgatcccagagtggctgagcttcgtcaagggcattgttgactctgaggatctccccctcaacatctctcgtgagacactccagcagaacaagatcctcaaggtcatcaggaagaaccttgtgaagaagtgcatcgagctcttctttgagattgctgagaacaaggaggactacaacaagttctatgaggctttctccaagaacctcaagctcggcgtccacgaggactccacca

SEQ ID NO: 2882 - DNA, 890 bp, Zea mays
  Clone ID: PAT_MRT4577_90817C.1
ccccgcgtcccgcgacgacaatatacgaaacaaattaatccccaatcaacacagcaagtcagcaacaagcaaagcagcgatccgagagatggacgcgaggatgttcgggctggagaaccccctggtggcggcgctgcatcacctgctggacgtgcccgatggcgacgccggagcgggcggcgacaaggcgggcggcggcgccacgcgcacctacgtccgcgacgcgcgcgccatggcggccaccccggccgacgtcaaggagctcgcgggagcgtacgcgttcgtggtggacatgccggggctgagcacgggcgacatcagggtgcaggtggaggacgagcgggtgctgatgatcagcggcgagcggcgccgggaggagcgcgaggacgccaagtacctgcgcatggagcggcggatgggcaagttcatgcgcaagttcgtgctgccggacaacgccgacgtggacaaggtcgccgccgtgtgcagggacggcgtgctcacggcgaccgtcgagaagctgcccccgccggagcccaagaagcccaagaccatcgagattaaggtcgcctgaggggagaccgttgtcggagcagtgccagtgagctgggtggcaacctgcgggactctggtgaggaagagcaaatggtagaaagcagtagctgtgcttctgaacattgtgtgtgtttgtttccctttttaccggcaatcatcctacctgatgcgtctggggtttcgtttgaaccatgctgggtttggagctttgtgatgcaaagcagaacgtcctgatgctttctttctccatagaataaatctctcctgttacctaaatgtcacttgttttttttcttcgcgaccgatcacgtttttcgttaacaaggattatcaaggag

SEQ ID NO: 2883 - DNA, 918 bp, Zea mays
  Clone ID: PAT_MRT4577_90818C.1
aattcggcatcggcacaattacgaaacgaattaatccccaatcaacacagcaagtcagcaacaagcaaagcagcgacccgagagatggacgcgaggatgttcgggctggagaccccccgggtggcggcgctgcatcacctgctggacgtgcccgacggcgacaaggcgggcggcggcgccacgcgcacctacgtccgcgacgcgcgcgccatggcggccaccccggccgacgtcaaggagctcgcgggagcgtacgcgttcgtggtggacatgccggggctgagcacgggcgacatcagggtgcaggtggaggacgagcgggtgctggtgatcagcggcgagcggcgccgggaggagcgcgaggacgccaagtacctgcgcatggagcggcggatgggcaagttcatgcgcaagttcgtgctgccggacaacgccgacgtggacaaggtcgccgccgtgtgcagggacggcgtgctcacggtgaccgtcgagaagctgcccccgccggagcccaagaagcccaagaccatcgagattaaggtcgcctgagtgtagaccgttgtcggagcagtgccagtgagctgggtggcaacctgcgggactctggtgaggaagagcaaatggtagaaagcagtagctgtgcttctgaacattgtgtgtgtttgtttcccttgttaccgccaatcatcctacctgatgtgtcgtctggggtttcgtttgaaccatgctgggtttggagctttgtgatgcaaagcagaatgtcctgatgctttctttctccatagaaaaaatctctcctgttacctaaaaaaaaaaaaaaaaaaacggccgcggccgatcacgttcttcgttaacaagggttaacaaggagacatgttcttcccaacgggcggcttgctgaatcctttgcatacaact

SEQ ID NO: 2884 - DNA, 432 bp, Zea mays
  Clone ID: PAT_MRT4577_90897C.1
caaacatggaagaaaaacagagttgcgtacattttggcgggccccggcccacgatcattcacaagcccatgcatacacacacgtttacatacgataggattacggggccacccttattcgggcatgaaacgagcgcatacatacgtacgcgcgcacaacacggggggcgctcgatatcactctaacacgcacgcgtagcaaacggggagggacgacaatacgggaggatcaatcaaccgaaaaaggggggctttttttggccgccgggctcctcgggctccttgggggccttctttttttcggggggctcgaggaaggcgaaacccccggagccgacgggcgccggcgccgcaaacttcttcttgaacttgggggggggcgcgtgctcccggtccttttttgccaacagcttttcggaaaaagcgaaagccc

SEQ ID NO: 2885 - DNA, 543 bp, Zea mays
  unsure (1)..(543): unsure at all n locations
  Clone ID: PAT_MRT4577_90917C.1
ctagcaacatagnaaagcacaatagtgtaccaacaatggcagccaaaaattttgcttccttatgctccttggtctttctgcaagtgttgctaccgcaaccattttcccacaatgctcacaagctcctatagcttcccttcttcccccatacctctcaccagcggtgtcttcaatgtgtgaaaccccaattgttcaaccctacaggatccaacaggcaatcgcacacaggcatccttaccattatcacccttgttcctgcaacaaccggcacacctattacagcagttaccttaggtccatttcgtggcacacaacatcacggcacaacaactacaacaacttgtgctagcacaaccttgctttatactttcagaaacatcctgtacttccattcaaccaactgtctgcattgaactatactgcttatttgcaacaacaattaccatccatccagttaggagctgcctacccaccacattttcttgcattcaacacaactagcatgtttgaactctgctgcttatgtacagcactcacaactac

SEQ ID NO: 2886 - DNA, 301 bp, Zea mays
  Clone ID: PAT_MRT4577_9092C.1
cggacggtgggcggactcgtgggtggacgcgtgggatcgacctttaagtctctctacgtagcagtgcaataaaaaaagcagtcgtaatggcgagctacaccatggccctctccttcatggccttctccggcacggccgtgaacgtgctgtcgtcgtccgccttcggcgatgcccgcgtgacgatgcgcaagacggcggtgataggctaagccggctgcggtgatcgtgagcccgttgtacggctccgaccgcgtgctgtacctgtggccactgtccgtctgatcgccgagctacctgacgg

SEQ ID NO: 2887 - DNA, 338 bp, Zea mays
  Clone ID: PAT_MRT4577_90935C.1
tcgcccacgcgtgcggccacgcgtccgggtgggttggtttctcctacccctacggttaaggttcgggttcgtgaggttctccggggttccggttcgtgggtgagcggatcgatatgggggcctcggatgttgagtaccgctgcttcgtcggaagactcgactgggccaccgacgaccactccctacacaaaggccttagaacctaccgggaggttctcaagttcaagatcatgctcgagcgggagactcacaggtcccacacgcttaagctttgtcaccttctccacagaggaggagatgccgaacgccctccaaggcatgaacgggaaagagctgga

SEQ ID NO: 2888 - DNA, 401 bp, Zea mays
  Clone ID: PAT_MRT4577_91008C.1
caccaaggaaggatcagttgctttttacttgaggcggtacttgaaaacgtcaaggtcaactacttgtaggactacaaggggcattttatttatgtacataaacagccgcctgatgttctccctagaaaaggtatccatgtccaccacgtggttgccgtgggtgtatatccacaggctgcccggtttcactttttccaggcaggcccaaaaaaaggggcaggactttaatttcgggttccaatcctaaaagcaccgtatgcaaagcttgtggccacagtcgggcaacacaaccttggggctaacctggaggcaaatcccgcactcgagctccttttccgggtccacctccaaaagctgctaatccctgctcctaaattttttaaggaaaagtttcttttgtt

SEQ ID NO: 2889 - DNA, 601 bp, Zea mays
  Clone ID: PAT_MRT4577_91098C.1
ggaggagggcacgacgcctctgcctgtcccaggcacaacaagacactcgtagtaaaacggacgtgcctttgcctgtagccccacattggacaaaagatatctcccacattaatatgggggcatgatcggacagaggaaaacgtactgtactcctcggccgccactcataatagtacaagcttattgcccttaactaatgtatatcttacacaaacacaagcaaagcaaaccgagctattaacggacgaaaaacacccaacgccggggagggggaggcgcctagtactatactagtagcggggggggtatctgggctgggcctgggcctgggcctggatcttgggtccccttcccgggttagtacccaggcccgaccttattgacaagcgcgagcgcgttgctggtgacctgcgcgacctcgacgaccttgccccggatgggggggcgcgtgccggcgtcaacggcgcgggacaagaggccctcaaggcaggtgtcctcgtcggtgagcgcggggctgcaccaggtctgcacgttgctgaggggccacctgaacgccggggtccccgcgcgggccatcccggggccgcccattttctgcgcc

SEQ ID NO: 2890 - DNA, 1122 bp, Zea mays
  Clone ID: PAT_MRT4577_91099C.1
tttttttttttttttgcccaaaagatatctcccacattaattaatgttaatgatggcatgatcggacagagaagaacgtactgtaagtctgtactcctcggccgccactcataatagtacaagcttattgcccttaactaatgtatatcttacacaaacacaagcaaagcaaaccgagctattaacgaacgagaaacacccaacgccgtggaggtgtggaggcgcctagtattatactagtagcgggtgtggtatctggcctgggcctgggcctggatcttgggtcccctcaccgtgttagtacccaggcccgaccttattgacgagcgcgagcgcgttgctggtgacctgcgcgacctcgacgaccttgccccggatggcggcgcgcgtgccggcgtcgacggcgcgggacgagaggccgtcgaggcaggtgtcctcgtcggtgagcgcggcgctgcaccaggtctgcacgttgctgaggtgccacctgaacgccggcgtccccgcgcggcccatcccggcgccgcccatctcctgcgccgcgtcgcggaggtggcccacgctgtccgccagattgtccaggcagtctcgcacgggacctgccgacgccgaccccgaccccgaccccgaccccttcttcgcgcctttgccgttgctggcgccgcacaggcggcccacgtacgccgacgcggcgcgcgcgcggtccgcgctcaccgacagcgcggcgcgcgccagctcccgcgggctccgcggcggcggcgacccgccgtacgacgccaggctctgctcgcacaccgacgggtactgcgtcgtgcggcacgacttgcggacgaagtcgctggctgccggcgacgcggcggacacgagccccgctgcggcggcggcggcggcggcgagcagcaggaggggggcagcggcagcggcagcgacactgcgcgggcgagccatgattgattgtcttggtgagctgcgctgagctgagctggtgcggtgtgcggggtgtgtgtgctgtgcttgtgcagcagggcaggcaggtcacggagtcacagtggagagggtggtggctgcttcgcttgaatgattgaatgcctattgtcccggccggcctcgaggtacccaatg

SEQ ID NO: 2891 - DNA, 1278 bp, Zea mays
  Clone ID: PAT_MRT4577_91100C.1
gacaggtcaccacaaactctctgtttggcaactgggggtccggtccttgtccttccatcgatgagtgcacgacgcctctgcctgtcccaggcacaacaagacactcgtagtagaacggacgtgcctttgcctgtagccccacattggacaaaagatatctcccacattaattaatgttaatgatggcatgatcggacagaggagaacgtactgtactcctcggccgccactcataatagtacaagcttattgcccttaactaatgtatatcttacacaaacacaagcaaagcaaaccgagctattaacggacgagaaacacccaacgccgtggaggtggaggcgcctagtacactatactagtagcgggtgtggtatctgggctgggcctgggcctgggcctggatcttgggtcccctccccgtgttagtacccaggcccgaccttattgacgagcgcgagcgcgttgctggtgacctgcgcgacctcgacgaccttgccccggatggcggcgcgcgtgccggcgtcgacggcgcgggacgagaggccgtcgaggcaggtgtcctcgtcggtgagcgcggcgctgcaccaggtctgcacgttgctgaggtgccacctgaacgccggcgtccccgcgcggcccatcccggcgccgcccatctcctgcgccgcgtcgcggaggtggcccacgctgtccgccagattgtccaggcagtcgcgcacgggacctgccgacgccgacgccgacgccgatcccgaccccttcttcgcgcctttgccgttgctggcgccgcacaggcggcccacgtacgccgacgcggcgcgcgcgcggtccgcgctcaccgacagcgcggcgcgcgccagctcccgcgggctccgcggcggcggcgacccgccgtacgacgccaggctctgctcgcacaccgacgggtactgcgtcgtgcggcacgacttgcggacgaagtcgctggctgccggcgacgcggcggacacgagccccgctgcggcggcggcggcggcggcgagcagcagcagcaggaggaggggggcagcggcagcggcagcaacactgcgcggacgagccatgattgattgtcttggtgagctgagctgagctggtgcggtgtgcggggtgtgtgtgctgtgctgtgctgtgcagcagggcaggcaggtcacggagtcacagtggagagagtggtggctgcttcgcttgaatgattgaatggctatattgccgagttcgtgccggatcaaaccccggccggcctcgaggtaccca

SEQ ID NO: 2892 - DNA, 145 bp, Zea mays
  Clone ID: PAT_MRT4577_91134C.1
actctctatagtgagtcgtattactgtggccatcacagcataatcgatgccctcagatgctctttcgcttccattactgataatatctgtgcagatcttgtccctttcacccgagctgactacctctttcagagcactgattgtg

SEQ ID NO: 2893 - DNA, 3748 bp, Zea mays
  Clone ID: PAT_MRT4577_91136C.1
ccactttcttcttctcttccagaaggcctagccctccaccctccgggtaccagtgcgtgcgccgtcgacttcctctcaccttctcgactccatagcgcaccacaccagcgcggcgacagccagcccgcgaggagaaaaactagaagaggaggaacagggagagccatacatactcactggttggattcggtccaatccaatccagccggccgcggcgtgaccagccgatccagagggcgccgaatcgatctgcgggggcggcgcggcgatgcggagggctaccgctggggagcccggtcgccgcgggggatgcgcatgagggcgtccggcccgcgaatcttctggtttggcgggagcccagggggcgcgcaccccggatcggcggcgcgcggcgagggcaggatcgcgtcggtggggctgcggcagtgaccacgggcgcgggggagggtgagaagcggcaactagcacttcggaggcgagcgggcgcgatggtgagcggccacatcttccactgccggaagaactcgtggccggcggaggagtacgtcggccggaccgcgctgcagctgttggatttcgatggcggggcgccgccggagcaggcgtggcggaggcggctcaacagccacgcgaacatcctcaaggagttcagtgtcactttcatggaggcaatgaggatgatgagccttggcctgagactatggtcgtatgttcgggaggaggcgtcacatggacggaaagcaccgatcgatccgttcactaaagagcgctgtaaaccgtcagcttcccagggtgtgccacttggtgggatggggagcggaagcatttcaagaggtttcaggggagagttcaagaattggcacatcatacctggtctttgtgaaagttcgccggtcatggagaaccagttctctatatttgtatctcgagacgggggtaataagaaatactcatcagttttggctcctggacatcatgaaggtctgaagaaaaatagtgactctggaatttcttcatgggactggaatttaagtggtcaacactcgacctatcatgcattgttccctcgggcatggactgtttatgatggtgaacctgatccagaccttaaaatctcatgtcgtcagatatcacctttcattcctcatgattacaaggatagcagtcttccaacatctgtgtttgtgtatactctagtaaacactgggagagatcgtgcaaaagtaagcctgttaatgacatgggcgaattctattggaggtttttcgcataattcaggaggccactacaatgagcccttcattgcggaagatggagtatcaggagtgcttctgcatcacaaaacagccaaggataatccacctgtcacttttgctgttgctgcctgcgaaactcagaatgtgaatgtgacagtcttgccagtgtttggtctttctggagaaaaccatgtttccgcaaaggaaatgtggaacaccatgctacagaatggtcactttgatcgggaaaatttcagtgctggtcccagtatgccttcttctccaggacagaaactctgtgcagctgtctcagcctcaacttgggttgagccacatggtagatgtactgttgtgtttgctctggcttggtcctcacctaaagtaaagtttcaaaaaggatgcacatataacaggaggtacacccaattctacggaacttctgagaaatcggctgttaatttggtacatgatgccttaacaaaatataaactttgggaagaagaaattgagaagtggcaaaaccccatactgaaggatgaaaggcttccagaatggtataagttcactctttttaatgagctttactttctggtagctggggggactgtttggacagatggtcaacccccagcaatcgatgagaaaaagagtcctggttttaatcaccagaagtcctcaaagaggggtactaaagacacaaatcagggatctgttaaagatagacatgtcaacctggcagtggagcaagtacctcatggtggttacatggctaatggtgatgatcatagtgtatccaagttcgcagcagttcatggatcagaattgcaagaacaaaccaatggactcaagtcagaagagccaattccttacttgatttcaaaggatggccctgaacacgttggcaagtttttgtatctagaaggagtggaatacatcatgtggaacacatatgatgtgcatttctacgcatcttttgctctccttgatttgttcccaaaaatagagttgagtatccaacgtgattttgccaatgctgtgctgtatgaagatcggcgcaaagtaaaatttttggctgatggtacatccggaatccgcaaggctaaaggtgcagtgcctcatgacctcggaacgcatgatccgtggcatgaaatgaatgcatataacatacacgatacaagcaaatggaaagatttgaaccccaaatttgtgctccagatatacagagactttgctgctacaggtgatatgcaattcggtcgagatgtttggcctgcagtctgtgctgctatggactatatggatcagtttgaccgtgatggtgatggtctcattgagaatgatggatttcctgatcaaacctatgatgcttggactgttcatggaatcagtgcttactgtggttgtctttggcttgctgcacttcaagctgcagctacaatggctcatcgccttggggatcggcactttgctgagaagtacaagctcaagtttataaaagccaaagcagtatatgaggcgaagttatggaatgggtcatatttcaattacgacagcggcacaagtagcaacagtagatccattcaggccgatcagctggcaggacagtggtatgctgcctcgtcgggcttgcccccgcttttcgatgagcacaagataagaactgctctgcaaaaaatatttgaattcaatgtgatgaaggttaaaggaggacggatgggagctgtaaatggtatgactccaaagggaaaggtggacgagacatgcatgcaatcacgtgaaatctggactggtgttacatacgctgttgctgcaaatatgctgctccatggaatggagcatcaaggctttacgaccgcagaaggaatttttactgcgggatggtcagaagaaggatatgggtattggttccaaacaccagaaggatggaccacagatgggcattatagatccctcgtatacatgcggcctcttgccatttgggcgatccagtatgcagtttctcctcccaaggctattcttgaggcccccaaagttaacctaatggaccgaatacatatctcccctcacatggtccgagcaattagcgagataagcattagaaaggtagcacccgacaatagatgtttgcctagctctgccttccactgtgaatgctgatccgaaggtaaacatgcagctgctgagcaacttgcaacctttttcggcttttttcggtttctctccttgcccccctttcaaggtccaggtgggggctcaggagttcttttcttggatcagagggcatatccaaaccaccaccaaactcgtgactcaagagagttcatgttgtataattgtacagcaaactgttagtcacataatctttttttttccactttgaaagttttgtgctgttcacttggaatagagctagaaataaaagaactgggaagctagctggtgtctacactggcttataaaaactaaaaataaacattaaggttttttttaaa

SEQ ID NO: 2894 - DNA, 1609 bp, Zea mays
  Clone ID: PAT_MRT4577_91254C.1
agagatccagccacctgcccgcgtaacttcttcttctttcgtcgttctactcccatcctacttccaagctaccaaggacgggcgcagacggaggaccagcgccgtcgtccaatcccctactagcggcaccggcacgaaggtcagtcgtccaatcccctactaggggaacagccggcggcacgaatgcgggattcttgatgccgatttattagaagatctccatgcctgccattactgagtgaagtgatgggtagtcttcatcttgtttcatctcttcttgataaagttgttgtagatgctgcacttactctcgtcaatgatgagttgtatcctattgttactcacttgggaatcaatgcacatttccctttttaatcatagtgccttgttgacaccttttgtctctgtgcaagcaggaaggatttggaggatgacagaagctgcagttacaaggtactggtgccatggatgtgtgagggttgttgaggaggccatgggggaggagatcaagtgcccattttgtggtggtggattcattgaagagatgattggtgaggaatttgatgggttggccagccagcagtcagagcgggattcatcacaatggggagcgtcgaacaacccctttgagcagccaagggcggaggcggacagtgaggatgaagaagatgatgatgattacgatgatgatataggccgtgcatttgagagtttcatcaggaggcatgggcggccatcagctctccgtcgggcgtttgacagcatccaggacgaccttagagctgatagggatagtgacttctccattctgatcaatgccttcaaccaagccctcgctttgcaacgctcagtgcttgatgctgatgaggcccgagatgaccaaggtggatctagcaatgatgatggcttgatggaagaatatgtcctgggggctgggctaaccctgctgcttcaatatttgactgagaatgatccaagccagtatggcacccctcctgcaaacaaagaggcggttgacgctctgcccactgtccaaatagcagaggctgtcagctgttcagtctgccttgatgatcttgagctagggtcccaggcaaagcaaatgccttgtgagcataagttccactctccttgtatactgccatggcttgaactccatagctcctgccctgtgtgccggtttgagctgccatctgaagagacagaagatttggatgagcctagcaatgtggacagaacagagaacacccatgaggaagtcagggccgatggccctgaagatgacagtgagagcagtaacagagcgtgggcccttgttccttggttcagtgggctattctcaacacctgaaccacaaactgtcagaggcgctttcactgatcagcagactcgctccacttctggaaccaacatgaatgctggcgaaagctgatctcttcctcctttgtgaataatgcccatacatctgagaatagcaatggaccttgtcagtagataacttatttttctgtactgataatccttcttggatgaatcgcaaggtacaaagtttgtgacagctccattttttgccaggattttagcgatcatttcactgttgattgatttc

SEQ ID NO: 2895 - DNA, 452 bp, Zea mays
  Clone ID: PAT_MRT4577_91282C.1
gggggccacacataacaccggtctcacttattattgaacacaattatagacccctgccggaaaaaacgaagcgaggacaggattacaggaacaccccttttttgacgtagccccacgcccaccaccttttttccctcagtctcacactttcactcaccaaaagcaagcagctaccaagggccggagagggactcattattgggaaccatcaaattacacacccctgcagtacaaaattaaacaggggtgtggttgtgtgcccccgaactagctaactcggtcgccccccggccggtactacggtcaacccaaaaggggggggggctttttttcgccggtggcctcctcgggggccttgggggccttttttttctcggggggctcggggaatacctaaccccccaggggctgcttgggcttgggctccttctcctcctttttggacctctcgg

SEQ ID NO: 2896 - DNA, 466 bp, Zea mays
  unsure (1)..(466): unsure at all n locations
  Clone ID: PAT_MRT4577_91378C.1
ttgatcgggcagcaattgtttcagttgtaaggaaggtgccagcgttatgcgcagcgtgcttggtagatcggcaccaattgtggtttgtgtcaagatgggtagcagggcttcacaccagctagctggctgaatggtagtagttgtttctgctgtaaataagcaggagagttcaaagctgtcagttggttgaatggaagaattgctgggggtaggcaagaaaaagctggctgaaatggtggttgttgttgttgcaaataagaagcagaattcaatgcagctanngttggttgaatggaaaaaaactttgttgttgcttgagaatgtaggcagcaagggtttgctagcacaagttgttgtagttgttgtgcctgatgntttgtgcaataaatgaccaaaggtaactgatgtaatagggctgatgattgttggagaaccagggtgataaaggtaagatgccagctgtgat

SEQ ID NO: 2897 - DNA, 264 bp, Zea mays
  Clone ID: PAT_MRT4577_91459C.1
tgattgagaccaactagcaacatacaaagcacaatagtgtaccaacaatgttagccaaaatattttgcctccttatgctggatggtctttctgctagtgctgctacttactaccatcttaccgtaatgctcataagctcctatagcttttctttttaccccatacctcttaccaactttgtcttcagtatgttaaaacccaattctttaaccctacatgatccaacatgcaatctcatcattgcatttttacctttatcatcct

SEQ ID NO: 2898 - DNA, 1755 bp, Zea mays
  Clone ID: PAT_MRT4577_91500C.1
gcgtgagatcgaggagaagaaggcaagcaggcagagaaagagagagagagagagagatggatgaggagtacgacgtgatcgtgttggggacggggctcaaggagtgcatcatcagcggcctcctctccgtcgatggcctcaaggtccttcacatggacaggaatgactactacggaggagaatcttcgtccctgaatctaaccaagctctggaacaggttcaagggcaacgacagccctcccgagcacctgggcgtcagcaaagagtacaacgtcgacatggtgcccaagttcatgatggcaaacggcgcgctggtccgcgtcctgatccgcaccagcgtgaccaagtatctcaacttcaaggctgttgacgggagctttgtgtacaacaatggcaagatccacaaagtcccggcaaccgacgtggaggccctcaagtcgaacctgatgggcctgttcgagaagcggcgcgcccggaagttcttcatatacgtgcaggactacgaggaggacgaccccaagtcccacgagggcctggacctcaacaaggtcaccaccagggaagtcatctccaaatacggattggaggatgatacggtggactttatcgggcatgcgctagcacttcaccgggacgacagctaccttgacgagcctgcaatcgacactgtcaagaggatgaagctctatgcagaatcactcgcacgctttcaaggagggtccccttacatctaccctctatacggtctgggagagctccctcaggcctttgcccgcctgagcgctgtttacggtggcacgtacatgctgaacaagccagaatgcaaggtcgagtttgatgagagtggaaaagcgtatggagtcacttctgaaggggagaccgccaagtgcaagaagatcgtctgcgatccttcgtatttgccagacaaggtgaagaaggttggaagggtggcccgcgcgatatgcatcatgaagcatcctatcccggacaccaaggactcgcactccgtgcagatcatcctccccaagaagcagctaaagcgcaaatccgacatgtacgtgttctgctgctcctacgcccacaacgtcgcgcccaaaggcaagttcatcgccttcgtctccaccgaggccgagaccgacaagcctgagatcgagctcaagcccgggatcgacctgcttggccctgtagaggagaccttcttcgacatctacgacagatatgaacccgtcaacaaccctgacgacgactgctgtttcctcacaaatagctatgactccaccacccattttgagacgacggtcaaggatgtgctcgccttgtacaacaagatcactggaaaggagcttgatctctcagtcgatttgaacgcggctagtgctactgagcaagaagctgcttgaacaccccggcggcctctttttttgcagctctacacaatagctatttcttcgattttttttttaaaatgttccatagatggataagtttattgatgaaatccattattgtatgttttttggagttccgtttttgtcacatgcatgtaatgaacaacggtggcaatcatctataaaggttccattattcgctcgcgaaaaaaaaaaaaaaaaaaaaaaaaaaaaaaactagtgagaaaaaaaaataaacaaccaaaaaaaaaaaaagacaaaaaacgcgcatacacaagaaaaaaatatagaacagcgtcaaatcataaacaacgagacactatatggagcataacattaaaaatta

SEQ ID NO: 2899 - DNA, 2096 bp, Zea mays
  Clone ID: PAT_MRT4577_91548C.1
tgggaccctcgggccggccgggccctcgttgccttcacactcctctctgcctgccttccaccgcactgcgctgctcttccttccttccttcccgtctcttcttcccacttccttccacttcttgtccctgctcctgttggttttagcatcctgctcggccgaatgctggatcagaggctgcagcaaaggtagtaagtcgcttctcgtatttcccgtcgagagagggacagggggggagaacccccaaccgaggcgctgcaagttccccacggccggggcgggcttctcttgcgggaacatgaggaagctgttgttcatctccttcgtcctctcgctgtccgctgcagcagttcacggtgaagacggtgcgtacattggcgtgaacattggcacggccatgtcgtcggtgccagcgccgacgcagatcaccacgctgctccggtcgcagaacatccgccacgtgcgcctctacgacgcggacccggcgatgctggcggcgctgtccaacaccggcatccgcgtcatcgtgtccgtgcccaacgagcagctgctggccatcggcaactcgaacgcgacggcggccaactgggtggcgcgcaacgtggccgcgcacttccccgccgtgaacatcacggccatcgccgtggggtccgaggtgctctcggcgcagccgaacgcggcgccgctgctcatgcccgccatgcgctacctccagaacgcgctggtggccgcggcgctggaccggtacatcaaggtctcgacgccgcactcgtcgtccatcatcctcgactcgttcccgccgtcccaggccttcttcaaccggtcgctggacggcgtgctggtgccgatgctcaggttcctgcagtccacggggtcgccgctcatgctcaacgtgtacccttactacgactacatgcgctccaacggcgtcatcccgctggactacgcgctgttccggccgctgccgcccaacaaggaggccgtggacgccaacaccctgctgcactacaccaacgtgttcgacgcggtggtggacgccgcctacttcgccatggcgtacctgaacgtcaccaacgtgccggtgatggtgacggagaccgggtggccgcacaagggcgactcctcctccgagcccgacgccacctccgacaacgccgacacgtacaacagcaacctcatccggcacgtgatgaacagcaccggcacgccgaagcaccccggggtggccgtgccgacctacgtctacgagctgtacgacgaggacacccgcccgggctccacgtcggagaagtactggggcctgttcgacatgaacggcgtccctgcctacaccctgcacctgacgggctccggcgtcctgctggccaacgacacgacgaaccagacctactgcgtggcgcgggagggcgcggaccccaagatgctgcaggcggcgctggactgggcgtgcggccccgggaaggtggactgctccgtgctgatgcagggccagccgtgctacgacccggacaccgtggacgcgcacgccacgtacgccttcaacgcctactaccacggcatgggaatgggctccgggacgtgctacttcagcggcgtcgcggtggtcacgacgaccgacccgagtcacggatcttgtgtttatgctgggaagaacgggacgtcgttgatgaacggcacctccctggcgccgtcgtccaactccacggagggaggctccggcgcgcaccgggcgttcggcgacgtctcgtcactcgtccgcatcgtctccaccgcgctgctcttcagcgtcgtcctcctcctgttgtaggcagtagttagtactagaggtagaaggcaccttggaatggaaccatgcagtctttgcagaattaggcattggagagggagggatgattctttttgctgtcaagtggcgggccgggaacgttctgatgatctattctcccgtctggtattggtatggtatggaacaaaaattggtttgcatcccctgatatgatgctcttgtcatctgctgggtttctctattggcatcgaacggaaagcaattgctccgttgagcaaaaaaagaaaaaaaaaaaaaaaaaaggccccta

SEQ ID NO: 2900 - DNA, 738 bp, Zea mays
  Clone ID: PAT_MRT4577_91549C.1
ccggccgggagtgcgctgcacttccttccttccttcccgtctcttcttccccctcccttcccttcttggccctgctcctgttggttttagcatcctgctcggccgaatgctggatcagaggttgcagcaaaggtagtaagtcgcttcttgtatttcccgtcgagagagggacaggggggagaacccccaaccgaggcgctgcaagttccccacggcccggaacatgaggaagctgttgttcatctccttcgtgctctcgctgtccgctgcagcagttcacggtgaagacggtgcgtacattggcgtgaacattggcacggccatgtcgtcggtgccagcgccgacgcagatcaccacgctgctccggtcgcagaacatccggcacgtgcgcctctacgacgcggacccggcgatgctggcggcgctgtccaacaccggcatccgcgtcatcgtgtccgtgcccaacgagcagctgctggccatcggcaactcgaacgcgacggcggccaactgggtggcgcgcaacgtggccgcgcacttccccgccgtgaacatcacggccatcgccgtggggtccgaggtgctctcggcgcagccgagcgcggcgccgctgctcatgcccgccatgcgctacctccagaacgcgctggtggccgcggcgctggaccggtacatcaagggtctcgacgccgcactcggcgtccatcattctcgactcgttcccgccgtcccagccct

SEQ ID NO: 2901 - DNA, 955 bp, Zea mays
  Clone ID: PAT_MRT4577_91553C.1
gccggccgggccgggatttataaccccaagttgccttcgccgtctgcctgactgcctgcctccactcctctcccttcccttcgcgtctcttcttcccccttccacttcttggccgagcccctcttggtgttggcatcctgctcgatcgaagaatgctggatcaggcatattggaggttgcagtaaaggcggtaggtgcttttcttcttccccgttggtggttagagggactggggagaactacaacagattggaggctgcaagttctcgggaggagccgggcttctcttgcggcggcaaacatgaggaagctcttcttcgtctacttcgtcctcctgctggccgctgcagtagttcacggtgaagatggtgcgtacattggcgtgaacattggcacggccatgtcgtcggtcccggcgccgacgcagatcaccacgctgctccgctcgcagaacatccgccacgtccgcctctacgacgccgaccccgccatgcttgcggcgctctccaacaccggcatccgcgtcatcgtgtccgtgcctaacgagcagctgctggccatcggcaactccaacgcgacggcggccaactgggtggcgcgcaacgtggccgcgcacttccccgccgtcaacatcacggccatcgccgtgggctccgaggtgctctccgcgcagcccaacgcggcgccgctgctcatgcccgccatgcgctacctccagaacgcgctggtggccgcggcgctggaccggtacatcaagatctcgacgccgcactcgtcgtccatcatcctcgactccttcccgccgtcgcaggccttcttcaacaggtcgctggacagcgtgctggtgccgatgctcaagttcctgcagtccacggggtcgccgctcatgctcaccgtgtacccttactacgactacatgcgctccaacggcgtcatcccgctggactacgcgctg

SEQ ID NO: 2902 - DNA, 1086 bp, Zea mays
  Clone ID: PAT_MRT4577_91585C.1
gccggccgtttcggggcctcgaggccggccgggccgggcctcaaagccagcgtagataaacgtcgaccattatgggaccttacagcaccgccgtcgccgtaagcgcatcgccggtcctgcaggcttcctcactcttgacgcgagcccgtggttcttggaggcccacggtggcggcgttgcggctttctgcttccgtgaaatgccgtcggcgggcactcaccgtgacctgtgcgctcccggagaaagaacggccggcggcattcaacatcccgcccactgctctgctgtgccccgtgcccccgccggacggcaaggaacggtgggacatcaaggaggaagatgaccgcgtcacgctgtggctccaggtgccagggctgtcggcgagcgacatcgaggtgaccaccagcgaggacgtcctcgagatcaaacgcagggtcgtcgccccacagcagccggcgcccgtggacgcgcacggcgtcggcgcgttccacatccggctgctgttgaccaaggagtacgacggcagcaacgtcacggccgatctcaaggccggcatgctggaggtcaccgtccacaagaacccgcaacgccccggcgaacgcgccgtgatgatgggggcgaccaagcccccgcccgagccccgtcaaaacgaggagagcagtaccaaccaaaggtcctcgaccgcaagaaaggaaaccggaacccccatggggagacaaaatccaaatggagtctagctggttgagggctcggaccctgctttgaataagcttctcatttctagctgcggatggactcaaaccagcaatcgccttctgttatatcaattgcctggagagagcttacgctgcttgtagtatcatgtgtgtttccttaaaaaaacccttctttgtttctttatttattatgagggtttttttttggtgtgcggtcacacagagtgaaaacaattccattttctaagcaaaattccaatggtcgtcttccctgtactgcaaaatacaccttagactttgtttaggtattgtaatattaactctaatccacgtgtgttgaagtggattgatatataaattagtttaagtt

SEQ ID NO: 2903 - DNA, 275 bp, Zea mays
  Clone ID: PAT_MRT4577_91680C.1
gcagtacctgtcaccagaggtgtatacactatgtgaaaacccacttctacaaccctacaagatacagcaggcgatgacagctggaattgtacctttatcacccttgatacttcaacaatcatcagacctattacatcagatacctttggtgcatattattgacacaaaacatcgtggcacatcaactacaacaacttgtgctagcaaaccttggtgtctactctgagcaacagcagttgctttcattcaaccaactagctgcattgaactctgct

SEQ ID NO: 2904 - DNA, 1857 bp, Zea mays
  Clone ID: PAT_MRT4577_91692C.1
gccggctttatccagggacacgagccacccatggtttcgtatcaggaaaagctttctttatatatattcgggcattgcgttatcgtgtagctttgcagaacagagaaggagaagggggagctgtaatcctacctaagaagcggcgatggggcggtcaggaggcggcgacggggacggcgacggcgaccggctcctcctcggcaagcccttggagtcgtcgtcgtcgtgcagctcgtccgacgagagcctggtcaagagaaccggcacggtatggacggcgatggcgcacatcatcacggcggtgatcgggtccggcgtgctgtccctggcgtggagcgtggcgcagctggggtgggtgggcgggccggcggcgatggtgttcttcgccggcgtcaccgcggtgcagtccaccctcatcgccgactgctacatctgccaccacccggagcgaggcgtcgtcaggaaccgctcctacgtcgacgccgtgcgcatctacctgggcgacaagagccatttgttttgcggcttcttcctcaacctgagcttgtttggcaccggtgtggtgtacacgctcacttccgccactagcatgagggcgatccggaaggccaattgctaccacagggaaggccacgacgcgccgtgctcggtgggaggggacggctactacatgctgctcttcggcctcgcgcaggtgctgctgtcgcagatacccaacttccacgagatggcggggctctccatcttcgccgccgtcatgtcctgcttctacgccttcgtcggcgtcggcctcggcgtcgccaaagtcatcgcaaacggggtgatcatgggcggcatcggaggcatcccgctggtgtccacgacgcagaaggtgtggcgagtctcgcaggccctcggggacatcttgttcgcctaccctttctcgttggtgctgctggaaatagaggacacgctgaggtcgccgccgccggagagcgagacgatgaaaaaggcgacgagagcgagcatcgctatcaccaccctcttctacctctgctgcgggtgctttggctacgcgtcgttcggcgacggcaccccgggcaacctcctcaccggcttcggcttctacgagccctactggctcatcgacctcgccaacctcgccatcgttctccacctcctcggcggctaccaggtgtacacgcagccggtgttcgcgttcgcggaccgcaagttcggcggcggggccacggtcgtcgaggcgccgctgctgccggtgccgggcgcgcgccgcgtgaacgcgaacgtgttcaggctgtgcttccgcacggcgtacgtggcggcgaccacggcgctggccgtctggttcccctacttcaaccagatcatcgggctgctcggctccttcaccttctggccgctcgccgtctacttccccgtcgagatgtacctcacgaggaacaaggtggcgccgtggaccaaccagtggctcgccatccatgcgttcagcctcgtctgcctgctcatcagcgcgttcgcctccgtcggctctgcggttggcgtgttcgggtcggagacgagctgattcaaactctgcaaatgcaattgccggccacttttcggacatgcatgttctgtgcatatactgcgcttgtatatttagcgttatacctagtactgggacggtcaggccgggccccgagcctcgtgcttaggctcaaacgggtctgggcccataaggtccaaatttttttttggatcataccgtgtcagccgtagaaatagtggtttagtcaggctctaaaacacttcctatctttgttgggccatgccgacccatatatttaaattatataaaattcaaatattacaacgaaa

SEQ ID NO: 2905 - DNA, 351 bp, Zea mays
  unsure (1)..(351): unsure at all n locations
  Clone ID: PAT_MRT4577_91694C.1
gttgtgtttatccaaggacacgctgaggggggggccgccggtgagtgagacgatgaaaaaggcnacnagagcgagcatcgctatcaccaccctcttctacctctgctgcgggtgctttggctacgcgtcgttcggcgacggcaccccgggcaacctcctcaccggcttcggcttctacgagccctactggctcatcgacctcgccaacctcgccatcgttctccacctcctcggcggctaccaggtgtacacgcagccggtgttcgcgttcgcggaccgcaagttcggcggcggggccacgatcgtcgaggcgccgctgctgccggtgccgggcgcgcgccgcgtgaacgt

SEQ ID NO: 2906 - DNA, 2985 bp, Zea mays
  Clone ID: PAT_MRT4577_91710C.1
gcacgaggcgagacgcgtcgcctcctcccttcccccaccccgccgccgccctcgcgtccgtccgtccgtgcctagttattagggttcggtcgccgccatggcgatcctctcggcgctcgccaccgaggtgctcatccccgtcgccgccgtcatcggcatcgccttcgccgtcgtgcagtgggtggtcgtgtcgcgcgtgaagctctccccggccgcgtccggcggcagcggcggcaaggccggctacgccgactccctcatcgaggaggaggaggggctcaacgaccacaacgtcgtcgtcaagtgcgccgagatccagaacgccatctccgaaggagcaacatcgtttcttttcaccgagtaccaatatgttggtatcttcatggctatcttcgctgttgtgatcttcctcttccttggttcggttgagggattcagcacgaagagccagccctgcacatatagcaaggacaagtactgcaagcctgcgctgttcactgcactctttagcactgtgtccttcttgcttggagccatcacctctctggtctctggtttccttggcatgaagattgccacatatgcgaatgccagaactaccctggaagctaggaagggtgttggcaaggcttttatcactgctttccgctctggcgctgttatgggtttcctgcttgcatcaagtgggcttgtggttctgtacatcacaattaatgtatttaagttgtattacggtgatgactgggagggtctttttgagtccatcactggctatggtcttggtgggtcgtccatggctctcttcggaagagttggtggaggtatctacacaaaggctgctgatgttggtgccgatcttgttggaaaggtcgagaggaacattcctgaggatgatcctaggaacccagctgtgattgctgataatgtcggtgacaatgttggtgacattgctggaatgggatctgatctctttgggtcatacgcagagtcttcttgtgctgcccttgttgttgcgtctatttcatctttcggaatcgaccatgatttcactgggatgtgctacccactccttgttagctctgttggtatcattgtctgcttgatcaccaccctttttgctactgatttctttgaagtcaaggctgtgaaagaaattgagcctgcacttaagaagcagctcatcatctccaccgttctgatgacttttggtattgctctaatcagctggttggcccttccagctaagttcaccatctacaacttcggtactcagaaggaggtttccaactggggtttgttcttctgtgtttcaattggtctgtgggctggtttgattattggttttgtcacagaatactacactagcaatgcatacagtcccgtgcaagatgttgcggattcgtgcagaactggtgctgccactaatgtcatttttggtcttgctcttggatacaagtcggttatcatcccgattttcgctattgctgttagcatctatgtcagtttctccattgctgcgatgtacggcattgcagttgccgctcttggtatgctgagcacaatcgcaactggtcttgctattgatgcttatggtcccatcagtgacaatgctggtggtattgctgagatggctggaatgagccacagaatccgtgagagaactgatgctcttgatgctgctggcaacacaactgctgctattggaaaggggtttgccattggttcagctgctcttgtgtccctggcgctttttggtgcctttgtcagcagagctggagtgaaggtcgtcgacgtcctctcccccaaggttttcattggtttgattgttggagccatgcttccctactggttctctgccatgaccatgaagagtgttggaagcgccgccctgaagatggtggaggaggtccgcaggcagttcaacaccattcctgggttgatggagggaacagccaagcccgactacgcaacctgtgtgaagatctccactgatgcttccatcaaggagatgattcctcccggcgctctggtcatgctgactcccctcatcgttggaaccctcttcggcgtcgagactctctccggtgttcttgctggtgcccttgtttctggagtgcagatcgccatctctgcctccaacaccggcggtgcatgggacaatgccaagaagtacattgaggctggggccagcgagcacgcgaggaccctcggtcccaagggatccgactgccacaaggccgctgtgatcggtgacaccattggtgaccccctgagggacacctccggcccgtccctcaacatcctcatcaagctcatggccgtggagtccctcgtgtttgcccctttctttgccacccagggtggcctgctcttcaagtacctgtaaaaggggcaacaccaagcacacagcagaagtatacgatctcccgaccgaccgtggacaatatcgaataactcctgccaaatcgccagttctttttgtgtactgtgcgctagccgccgcctagctgcactgctgtatttttgtttcaggattgctgctgctgttcgcacattccatctttggctcctcccggagccgccggaggcgcgtttttactgttagccttactactcttactccctgtagctccacgtagaagagaactgttgtcctgcaggtctggcaaattttcccagtctcttgatgatggcgatgatgttgaaatctttttttgaacaatgatacatgatgattgttgcgttgaaaaaaaaaaaaaaaaaaaaaaaaaaaaaaaaaaaaaaaaaaaaaaaaaaaaaaaaaaaaaaaaaaaaaaaaaagaaaaaaaaaaaaaaaaaaaaaaaaaaaaaaaaaaaaaaaatggggggggccgttttaaaggaaccaagtttatatcccctttcttgcaacgtattatttttttttttgggacaccaaaatcaatttcactgcccgacttttaaaaacttggggattggaaaaac

SEQ ID NO: 2907 - DNA, 3058 bp, Zea mays
  Clone ID: PAT_MRT4577_91711C.1
ggccgcgggttttttttttttttttgccgaagaagagaaatatattatcccctgagcccacctgccatcccgggccagcccaccagcaaaaggctctaaaacaggacagcccacagacactgacacacaggcctgcagcttttacacctaacccttccaagttaatcgcattcacgacccgccccttctctcctggccacctccatcattccacactccccttccacatgcaccttccccgctatataagacacgcgccccgagctcagggaagagagctgcagagagcgtgacgcgtctcccacacggccgccgccctcgccttcgtgcgttccccgcgtagagtttagggttttgtcgccgccatggcgatcctctcggcgctcgccaccgaggtgttcatccccgtcgccgccgtcatcggcatcgccttcgccgtcgtgcagtgggtgctcgtgtcgcgggtgaagctctccccggctgcagccgcgtccggcggcagcaagaacggctacggcgactacctcatcgaggaggaggaggggctcaacgaccacaacgtcgtcgtcaagtgcgccgagatccagaccgctatctccgaaggagcaacatcgtttcttttcactgagtaccaatatgttggtatcttcatgtccatctttgctgttgtgatcttcctcttccttggttcggttgagggattcagcacgaagagccagccctgcacctatagcaaggacaagtactgcaagcctgcactgttcactgcactctttagcactgtgtccttcttgcttggagccatcacctctctggtctccggtttccttggcatgaagattgccacatatgcgaatgccagaactaccctggaagctaggaagggtgttggcaaggcttttatcaccgcttttcgctctggtgctgttatgggcttcctgcttgcatcaagtgggcttgtggttctgtacatcaccattaatgtatttaagttgtattacggtgatgactgggagggtctttttgagtctatcactggctatggccttggtgggtcgtccatggctctctttggaagagttggtggaggcatctacacaaaggctgctgacgttggtgctgatcttgttggaaaggtcgagaggaacattcctgaggatgatcctaggaacccagctgtgattgctgataatgtcggtgacaatgttggtgacattgctggaatgggatctgatctctttgggtcatatgcagagtcttcctgtgctgcccttgttgttgcgtctatttcatctttcggaatcaaccatgatttcactgggatgtgctacccactccttgttagctctgttggtatcattgtctgcttgatcaccaccctttttgctactgatttctttgaagtcaaggctgtgaaagaaattgagcctgcacttaagaagcagctcatcatctccactgtcctgatgactgttggtattgctgtaatcagctggttggcccttccagctaagtttaccatcttcaactttggtactcagaaggatgtctccaactggggcttgttcttctgtgttgcaattggtctgtgggctggtctgattattggttttgtcacagaatactacactagcaatgcatacagtcctgtgcaagacgttgcagattcttgcagaactggtgctgccactaatgtcatttttggtcttgctcttggatacaagtcagttatcatcccgattttcgctatcgctgttagcatctatgtcagtttctccattgctgcaatgtacggcatcgcagttgccgctcttggtatgctgagcacaattgcaactggtcttgctattgatgcttatggtcccatcagtgacaatgctggtggtattgctgagatggctggaatgagtcacagaatccgtgagagaactgatgctcttgatgctgctggcaacaccactgccgctattggaaagggatttgccattggttcagctgctcttgtgtctctggcgctttttggtgccttcgtcagcagagctggagtgaaggttgtcgatgtcctctcccccaaggttttcattggtttgattgttggagccatgcttccctattggttctctgccatgaccatgaagagtgttggaagtgccgccctaaagatggtggaggaggtccgcagacagttcaacaccattcctgggttgatggagggaactgccaagcctgactatgcaacctgtgtgaagatctccactgatgcttccatcaaggagatgattcctcctggtgctctggtcatgctcactcccctcattgttggaaccctcttcggtgttgagactctctctggtgttcttgctggtgccctggtttctggagtgcagattgccatctctgcttccaacaccggtggtgcatgggacaatgccaagaagtacattgaggctggtgccagcgagcatgccaggaccctcggccccaagggatctgactgtcacaaggctgctgtgataggtgacaccattggtgaccccctgaaggacacctcgggcccgtccctcaacatcctgatcaagctcatggcggtggagtcccttgtgtttgcccccttcttcgccacccacggtggcctgctgttcaagtacctgtaagggccacaccaatcatcacagcagaaatatacgaccgaccgaccgtggacatctcgaataactcctgccaaatcgccagttcatgtgtattgtgcgctagccgcctagctgcactgctgtttttttggtctcattgttcgtattttctccttggccccctccccctagaggcgttactgttagccttactcttactccctgtagctgcacgtagaagagaactgttgtcctgcaggtctggcaaattttcccagtctcttgatgatggcgatgatgttgaaatctttgaacaatgatacatgattgttgcattttactggtggtatggtatctcgtacatcgtattggactgcaaaaaaaaaaaaaaaaaaaaaaaaaaaactcgaggggggggcccgggtacc

SEQ ID NO: 2908 - DNA, 382 bp, Zea mays
  unsure (1)..(382): unsure at all n locations
  Clone ID: PAT_MRT4577_91728C.1
ggtcgactcgggccaattttaattttataaaagtaaatattcagaactccagctccaaactaacagaaacaactttgttcgcatcgacaaacttaaacaaaaatgcgtggggcacgactaccgggggcgataaatgccatagcacaaatactgatcgccgcataagatagcacttcttcggtgggaccaaactttactcggcatcctcattggcgncatctgcgccgcccggggagttgagttggttgagcctttcaatgagactggccttcctttggtcgttcgttngttttttgggggtgtcccttttgggctcctttggtgggtggttggttggctggcccccccncgggtcctcccgggtgggggcttggcccttttt

SEQ ID NO: 2909 - DNA, 1424 bp, Zea mays
  Clone ID: PAT_MRT4577_91807C.1
ttggccgggaaaacgttttcccctggaatgggaaaagagaaaaacggagattccttgccccctttccccttcaccatcgtcgaaaccctagccccgcctcgccgccggcacgccggatcggtcggtgccatgtccaaggccagggtctacgccgacgtcaacgtgctgcgccccaaggagtactgggattacgaggcgctcaccgttcaatggggtgagcaggatgactatgaagttgtcaggaaggtcgggagaggaaaatacagtgaagtatttgagggtattaatgttaacaataatgagaaatgcatcattaagatcctcaagcctgtgaagaaaaagaagatcaaaagagaaattaaaattcttcagaatctttgtggaggccctaacattgtgaagctgctcgatattgttagagatcagcattcgaaaacgcccagcttgatctttgaatatgttaacaacacagatttcaaagtgctgtacccaacattaacagattatgacattcggtattacatctacgagttactcaaggcattagattactgccattcacaaggtattatgcaccgagatgtgaagccccacaatgttatgatagatcatgagcttcggaaactccggctgatagactggggtcttgctgaattctatcatcctggcaaggaatataatgtccgtgttgcatccaggtacttcaaggggcctgagcttcttgttgacttgcaagattatgattattctttggacatgtggagtctgggctgcatgtttgctgggatgatttttcgtaaggaaccatttttctacgggcatgacaaccacgatcaacttgttaagatagccaaggtacttgggacagatgggctgaatgcttatttgaacaagtacagaattgagcttgaccctcagcttgaagccctcgttggaaggcatagcaggaaaccctggttaaagtttatgaatgcagataaccagcacctagtgtctcctgaggccatagatttccttgacaagcttttgcgttatgatcatcaggagaggcttactgcacttgaagctatgacgcacccgtacttccaacaagtgagagccgctgagaacagcaggacgcgagcgtgacaggcaaagagcgaagaccatctgctcttttatcagtcagtcaggttgtatgagatgagtagccgttgggtcacttggcagaaaataaacaatagcggtagagcctgtactgtactgtactgtacgtaacgtaacctcctcgagaaggggttgtgaggtttgggacgtgattgcgaacatggtatattaatgatgattgttcatgtaagatgtttgtcataaaatgtttgtccgtttgctgttgagttcttgggggctactttcccgtatttaggtcaagtcaaaaaacttgaggc

SEQ ID NO: 2910 - DNA, 807 bp, Zea mays
  Clone ID: PAT_MRT4577_91808C.1
gggtacctcgaggccggccggggagcgccatccagctaggagtaccgagtgcactctgtctctgcagtatccttcccggccgatctgcatttcagtcgttccacaccgtcgttggccggcccatagctctccccctcctggttagtgtagtgagcgcagcgacgagtgcaacggtgagagtaccgagatggctgagggaagaggcagtgcaagggccatcggcgccatggcgttcgccgttgcctgctgctactgctgcgtcgccatcgccgacgcagccaccacctactacgtcggggacagcaacggctggtccttcagcagccccagctggcccaacggcaagcacttccgcgccggagacactctcgtgttcaggtacatcccctggatccacaacgtggtggccgtggacgaggacgggtacaacggctgcacgacgccgccggggtcgcggacctacacgtccggcgccgacagcgtcacgctcgccaggggggacaacttcttcatctgcacccggttcggccactgcaacctcggcatgaagctcgtcgtctatgccgcgtgatctgtcagagctagcgactggtggtggtattgttgactgggtgcgctcaatgatcggctgtgcttgctctcgagcgaactggtctgtttgatttgtgctatttcgtgtaggctcagtcagtcgcttggttctaatccgtaacggcttctactacttttacaatgttgttgtaacaatacaaacatccagctttaattgaagctaacggatatcgcatgtttgaacatttgctctcc

SEQ ID NO: 2911 - DNA, 1708 bp, Zea mays
  Clone ID: PAT_MRT4577_91809C.1
agcatttgttttaccattaccatttgggttacattttttgaaccaaacagcaccttacatgaacaatcattaatataccatgttcgcaatcacgtcccaaacctcacaactcctcgaggaggttacgttacgtacagtacagtacaggctctaccgctattgtttattttctgccaagtgacccaacggctactcatctcatacaacctgagtctgactgactgataaaagagcagatggtcttcgctctttgcctgtcacgctcgcgtcctgctgttctcagcggctctcacttgttggaagtacgggtgcgtcatagcttcaagtgcagtaagcctctcctgatgatcataacgcaaaagcttgtcaaggaaatctatggcctcaggagacactaggtgctggttatctgcgttcataaactttaaccagggtttcctgctatgccttccaacgagggcttcaagctgagggtcaagctcaattctgtacttgttcaaataaacattcagcccatctgtcccaagtaccttggctatcttaacaagttgatcatggttgtcatgcccgtagaaaaatggttccttacgaaaaatcatcccagcaaacatgcagcccagactccacatgtccaaagagtaatcataatcttgcaagtcaacaagaagctcaggccccttgaagtacctggatgcaacacggacattatattccttgccaggatgatagaattcagcaagaccccagtctatcagccggagtttccgaagctcatgatctatcataacattgtggggcttcacatctcggtgcataataccttgtgaatggcagtaatctaatgccttgagtaactcgtagatgtaataccgaatgtcataatctgttaatgttgggtacagcactttgaaatctgtgttgttaacatattcaaagatcaagctgggcgttttcgaatgctgatctctaacaatatcgagcagcttcacaatgttagggcctccacaaagattctgaagaattttaatttctcttttgatcttctttttcttcacaggcttgaggatcttgatgatgcatttctcattattgttaacattaataccttcaaatacttcactgtattttcctctcccgaccttcctgacaacttcatagtcatcctgctcaccccattgaacggtgagcgcctcgtaatcccagtactccttggggcgcagcacgttgacgtcggcgtagaccctggccttggacatggcgccgaccgatccggcgtgccggcggcgaggcggggctagggtttcgacgatggggaagggaaaagggggcaaggaatctccgtttttctctttccaggggaaaacgttttgggaataaagctaggtggtgggggtgctgtggtcagacagagtggccgacgtgtgggccctcttcctgttcgggcggggggcaggccatgtaacttttgtccgccggcgggatggggtcctcaccgcaccggagccggaggagatcagatatctcgctggctgacaacctcaacctgtcgagctcatttccgaccaaccaagaagatggcgatctcagcctagttgtcaacttgtcatcagatgctcatgcatgccacgtaatccgtcgtctaaatccactactcgatcgaaacacttctggcataattcatacacttttgtcggtctcagtctcagtg

SEQ ID NO: 2912 - DNA, 300 bp, Zea mays
  Clone ID: PAT_MRT4577_91841C.1
gtgggttggcttctcctccccctccggttcgttttcaggttcgcgaggttctcctgacttcggtttcgggggtcagcggatcgagatctcggcgtctgatgctgagtaccgctacttcatcagcggcctctactgagccaccgactaccacttcctacacaacgccttcatcacctacagcgacgtcctttagtccaagatcatcctggatcgctatacgcataggtcccgcggcttctgcttcatcaccttctacacggacgacgcgatgcggaacgccataaagggcatgaactgcaa

SEQ ID NO: 2913 - DNA, 1432 bp, Zea mays
  Clone ID: PAT_MRT4577_91890C.1
tcgagccggcgggagaactcagacttgtccagccaacagtggcgttcatgaggaaggcgggggtgacctccgcctccagtggtggaggagaaggatggccgtgcggtggtggcctcaacctcggtgtgaagctgaacgtgctgctactgctgtcggtggtggccaccaatcgtgctgtgccctgtcaccactcgtctccctcctgcgtcctccactccgtgcccattgggtccctcgaggccggccggggaaataccaattgccacttcgcgccgtcccgcacgacggcacgagtcatcgtcgccttcccctccctccacacgccaaacgcgaactcccgtgccgtgacctcccgatctccggcgatggccgcgcggcgcctcggatcccccgcctctaggtggctgcgcccgtccgcgctgctcctcctggtcgcttctgctctcctctcggccccgtcgccggcccgcgcgctgcggttcgacctcgagtccggccacaccaagtgcatctccgacgagatcaaggttaacgccatggccgtcggcaagtaccacatcgtcagccccgaccccaacttccccgatgcccagctccccgaatcgcaccgcatctccctcagggtgacgtcgccgtacgggaacagcatgcactacgcggagaacgtgcagtcgggccacttcgccttcacggcggcggaggccggcgactacctggcctgcttctgggcgcccgaccataagccaccggtcaccatcgggttcgagttcgactggaggagcggcgtctccgccaaggactatcccagcgtcgccaagaagggcaaggtcgatatgatggaattggagctgaagaagctagaggaaactataaaaaatatacatgaagagatgttttatctgcgtgaaagggaagaggaaatgcaggacctgaacaggcgaacaaactcaaggatggcttggttagggttcctctcccttggcgtctgcttatcggtggcaggtttgcagctgtggcacctgaagaccttctttgagaggaagaagttgctgtagttgccccatcggtatatttttgggtgaactgtcgatctgttacagagcttggaatcccatgtagcaaacgctatgccagatactagagaaatatgcttcacaatgcttggaatcccatgtagcaaacgctatgccagatacttgaaaaatatacttcactatgcgtcccatgtagcaaacgctatgccagatactagagaaatatgcttcactatgctttagcctgtccagtgaacctctaaggaacttcaaagagaaactaaattgtcttcattttagctcgtgttgtaatttggacatctggattctggagcagtgttgactttttttaaaaaaaaaaaaaaaaaaaaaaaaaactcgagggggggccgacacca

SEQ ID NO: 2914 - DNA, 1373 bp, Zea mays
  Clone ID: PAT_MRT4577_91891C.1
caactgtcctcaatccagcagccctcgagtctcgtccccgcacatcagcagagagacgccactaccaccaccgcaagcgacgacggggagatgtttctgcgacggatcctgaccggcggaggtggccacgcgtccggtcgccttcccctccctccacacgccaaacgcgaactcccgtgccgtgacctcccgatctcaggcgatggtcgcgcggcgcctcggatcccccgcctgtaggtggctgcggccgtccgcgctgctcctcctggtcgcttccgctctcctctcggccccgtcgccggcccgcgcgctgcggttcgacctcgagtccggccacaccaagtgcatctccgacgagatcaaggttaacgccatggccgtcggcaagtaccacatcgtcagccccgaccccaacttccccgatgcccagctccccgaatcgcaccgcatctccctcagggtgacgtcgccgtacgggaacagcatgcactacgcggagaacgtgcagtcgggccacttcgccttcacggcggcggaggccggcgactacctggcctgcttctgggcgcccgaccataagccaccggtcaccatcgggttcgagttcgactggaggagcggcgtctccgccaaggattatcccagcgtcgccaagaagggcaaggtcgatatgatggaattggagctgaagaagctagaggaaactataaaaaatatacatgaagagatgttttatctgcgtgaaagggaagaggaaatgcaggacctgaacaggcgaacaaactcaaggatggcttggttagggttcctctcccttggcgtctgcttatcggtggcaggtttgcagctgtggcacctgaagaccttctttgagaggaagaagttgctgtagttgccccacggtatatttttgggtgaactgtcagatgtgttacagagcttggaatcccatgtagcaaacgctatgccagatactagagaaatatgcttcacaatgcttggaatcccatgtagcaaacgctatgccagatactagagaaatatacttcacaatgcttggaatcccatgtagcaaacgctatgccagatactagagaaatatgcttcacaatgcttggaatcccatgtagcaaacgctatgccagatactagagaaatatacttcactatgcttggaatcccatgtagcaaacgctatgccagatactagagaaatatgcttcactatgctttagcctgtccagtgaacctctaaggaactttaaagagactaaattgtcttgcattttaggtcgtgttgtaatttggacatctggattctggagcatgtgttgactcttctttgtgataaaaaaaaaaaaaaaaaagcggcc

SEQ ID NO: 2915 - DNA, 1076 bp, Zea mays
  Clone ID: PAT_MRT4577_91892C.1
ccccgcgtccgcccacgcgtccgcccacgcgtccgcccacgcgtccggccttcccctccctacaagccaaacgcgaataccacccccgtgacttcccgatctccggcgatggccgcgcggcgcctcggatcccccgcatctaggtggctgcgcccgtccgcgctgctcctcctggtcgcctctgctctcctctcggccccgtcgccggcccgggccctccggttcgacctcgagtccggccacaccaagtgcgtctccgacgagatcaaggtcaacgccatggccgtcggaaagtaccacatcgtcgggcccgaccccaactcacccgacgcccagctccccgagtcgcaccgcatctccctcagggtgacgtcgccgtacgggaacagcatgcactacgcggagaacgtgcagtcgggccacttcgccttcacggcggcggaggccggcgactacctggcctgcttctgggctcccgaccacaagccgccggtcaccatcgggttcgagttcgactggaggagcggcgtctccgccaaggactatcccagcgtcgccaagaagggcaaggtcgatatgatggaattggagctgaagaagctagaggaaactataaaaaatatacatgaagagatgctttatctgcgtgaaagggaagaggaaatgcaggacgtgaacaggcgaacgaactcaaggatggcttggctagggttcctctcccttggcgtctgcttatcagtggcaggtttgcagctgtggcacctgaagaccttctttgaaaggaagaagttgttgtagactgtagttggcccatggttcacggtagacctcagcgcaggtgtaacctatttttgggtgaactgccgatctgttacggagcttgaaatcccatgtaacaaacggtatgtcgtacttgagaaaatatgctttagcctgtccagttgaaattctaagaaacttgaaatagatactaaattgtcttccattcaatagttcgtgttgcaatttggacttctgcagcaccgtgttgactcttcttcacgtgatggttgtgaatatggagcgcctttttttct

SEQ ID NO: 2916 - DNA, 619 bp, Zea mays
  Clone ID: PAT_MRT4577_91971C.1
cccacgcgtccgcggacgcgtgggatctgcagagagcacaatggtagcttataaggcagcccaggatattgcattggctgaactggcacctactcatcccataaggcttggacttgcacttaacttctcggtgttctattatgagattctgaactctccggacaaagcttgcaaccttgcaaagcaggcatttgatgaggctatttctgagttggacacgcttggtgaggaatcatacaaagatagcaccttgattatgcagctcctaagggacaacttgaccctctggacctctgacatcacggaggagggcattgaggagggcaaagaagcctcgaagggtgatgctgagtagcctggtaaaccttgatggatggttcggcatgtttttctagcccatcttgttggacgccctgtgctgatagaaggtgtttgctgctccatgcattccaagattctgtcttctcgttccctccctgctgtagctggtggtagtagtcaaattagccccattgctttagttggctctgggtccatttggactgatgtattgttactgctgttgaagtcattcgttctcgttttgttcttgcagtagattgctgttgggttgtgcttt

SEQ ID NO: 2917 - DNA, 292 bp, Zea mays
  Clone ID: PAT_MRT4577_92095C.1
gggggggaaagcaagttattggtgaacgacaaataacttgggcaaatcgtttacaactgataatcagataagcagagtgaacaagccaaaactgtatctggcaacgcacataggcttaccccagccgactaccccatttttcttaagcaaaagcgaacgggtgcttccctccccctgagcttaagggataaccataaggaaacctggtacgcgactgggtatatgataatgcatatgcatgcaaaagataactgacaggccagtgttgcgaactttatagcacacaacgggc

SEQ ID NO: 2918 - DNA, 404 bp, Zea mays
  Clone ID: PAT_MRT4577_9211C.1
aaaacaaccaattcgcccccgggacacttttttgaactaggcccgccgttaacgtttaagcccccaaacggggggaaaacaaggggacagacggggggacagttaaccacacatagaaatcacttaatttccgccatttttcgcccataaggggtttggaccgggctccccttgggggccgggggaataatggggcgtttttttgtacttgtaccaactggggatgaccaggtaggcaaggaagttgggggggctgaccactgggagcagccaaaaaaagtagtcgggggggccggggttggggttttccgggatccacccgatgcggccgtgcctgggggggatgggggggaccatggtcaccaggaccgtgctggggtagttgccgagcgcgacggggggga

SEQ ID NO: 2919 - DNA, 2232 bp, Zea mays
  Clone ID: PAT_MRT4577_92205C.1
caacagagaagagcggacgccaccggacgccaccgccgccaatcaatagattaggcgcggataatggtgctggccggaccgcgacgggcggaggagggcgccgcggcccccgcccgccgccgctgacagagtatacctgcttaaccagccgtctgcaggcacggcgcacgcgcggtggtacctcgcgaggggctcgggttgactgggcgctactcgtggccgcggggatggaggaggaggcgtctgcagatccaccgaccgcttcgtcctgcaccggcgtctctggttccggccgctgctgaatccgacgcttcggttcgcgtccccagtccccttggcggaggcgtggatcgtgtgtttggggggtttgggtatggtgggcggcggtgagggggatcgcgtgggcggcggcgtaggggttgggggaggccagcagttcgtggaccgcagcaaggtgaggattcttctctgcgacggcgacgccagcagctcccgggaggtgctgcggctcctctgcaactgctcgtaccatgtaacttgcgccaagtctccgcggcaggtgatcaatattctcaactacgagggcggcgagatcgacatcatcctggctgaggttgatctgccggtctccaagtgcttcaagatgctcaagtacattgccaggaacaaggacctgcgccacatccccatcatcagtaggcagccttcctattctgagccttgtgcggttgtgcctattactgtgatgtgctttctgtgaccgtcctccctgtcttatggaactgtgcagtgatgtccaacagagacgaggtgtctgttgttgtcaagtgcttgaggcttggtgcggccgagtacctggtgaagccgctgcgcacgaatgagctgctgaacctttggacccatgtgtggcggcggagacggatgcttggtttgcccgagaaaaacttcttcaatgacaacttcgagttggtgctctcagaacctagtgatgcaaataccaatagcgccaccctcctctcagatgagacagacgacaggcctaaagaaaacacaaatcaagaaacgggcacctcaaatcagcttgaatacgagtctaatccttccgttgctgagcgcgaccagagagacaagatcggtgctccaggctctgccctagatgccagtcaatcatcgactccgggaagaatgttttcacgtcctataaaaactaacctgaaggttgctgagtcgtctgcatttctagcatatgttaagtcaagcaccccagccaccagttcatttgatagcggactacaaagaggtgacagccggttagattctttggataaccatggtaattgctctagtgcaacagatagaagtgacaccggtactgatgtaaatattcggaataaagaagcttttgagatgcctgtgcagtatcctatggtatgcttttcttcctctagcatgcatatggagcgaagcaatgaaggccataatgacacttcaggaactccacctgcataccatttcccattttattatccagggatggtagaacacaacatggcactttcatcagtgcaaaattttcaagcaaacataaacagtgctcaagcacatacaccaccagcgatgcttcatcagtacaatgttttctcccaatgccatagtttacccatgatatcatcatttcagtttaatacttctggcatgagtatgcactcaagtcatttaccgacgcaaaatgtgtggtcatcggcatcgagcacaccaacgcctgacgaaacatgcaatcgctccgagagaagggctgcagcacttgctaaattcaggcagaaaaggaaagagcgctgttttgacaagaaggtgaggtatgtgaacaggaagaaacttgctgagacgaggccaagggtgcgaggtcaatttgttaggcatgcaagcaatatggatatcataagcactggagatgatatatctgaagacgaagatgacgatccaacctccagggaggtagatatgatttcttctccagagtagtggagaggtcctcttgtgtgaaaaattagagtgcagatggttactgctcactttgttacaactcagtaggactagacaatacattcttctactggcaacaaggcaatacaccctttttgctcacacacagtataaacttttgtccccaaatatctggctgttactccggttgctttaatcgagaaatcatctttttgataaaaaaaacgc

SEQ ID NO: 2920 - DNA, 1676 bp, Zea mays
  Clone ID: PAT_MRT4577_92370C.1
gccggcctcgaggccggccggcgtcatctcattttccttttcacgcccactcactcacccgccgccgccatcccctccttgccgtctccgggcacggcctcgtcgaatcctttgctcctcctccgccgcagccgctgccatggactccacgccggcgcacgaggcggctcccggagcctcctcttccgccaccgccgccgccgaggatctggcgggtggcgtggcggcgatgaccctggatgagcggttcgctctgctgcgggggatcggggaggagtgcatccaggaggacgagctcaggcgcctgctcgagaacaagcccgtccccatctgctacgacggcttcgagccctccggacgcatgcacatcgcccagggcattgtgaagaccatcaacgtcaacaagatggtcagagccgggtgcaaggtgaaaatctggattgccgactggttcgcgcagctcaacaacaagatgggaggcgacctcaagaaaatccagacagtcgggcgctacatgatcgagatttggaaggcggccgggatgaacctcgacggggtggagttcctgtggtcctccgaggagatcaaccggcgcgcccacgagtactggccaatcgtgatggacattgcccggaaaaacaacgtcaaacggataatgagatgctgccaaattatgggcagaagtgaccaggacgacttgactgctgctcagattttctacccttgcatgcaatgtgctgatatatttttcttgaaggctgacatatgccagttggggatggaccaaaggaaggtcaatgtgctagctagggagtactgtgatgacatcaaaagaaagaacaaaccaattattctttcacatcatatgctccctggttttaaagaaggccaggagaaaatgtcaaagagtgacccatcctcggctatctttatggaagatgacgaagcccaagttaacgtgaagataaagcaagcattttgccctcccaaaattgttgaggggaatccttgtttggagtacattaaatacatcgttttcccttggtttggaaggtttgaggtggcccggaaggaaagcaatggcggtaacaagacatttacaagcatggatgaactaatttctgattatgagactggtgctttgcatcctgctgatgtcaaacctgcactggcaaaagcaataaatgaaattttgcagcctgttcgtgatcacttcaacaacaacaacgaagccaaagttctactaaacactgtcaagaagtacagagtaaccagttgaggagcggaaggtgttcatctttagggtgaatgtcgctgattgaaattcttatatgcttattctgttactaatgccaccactcattttagatcaagcattgagccattggttatcagtgtataatctctatgaaggcattttggtggcagtggccttgtctgtcattggctacaacgttctagataaaaaaacatttaaattttgtggaagttgaattatcttctcatgtgtgtatgactgaatgtgagactggttgaaagtgcaagcgacaaggcatatatggccgagaagtttaaaagaaaaaatacaaaaaaaaaaaaaaacaaacacactctacctacacacaaacaacaaaaaataaaaaaaaaaacccctaaaaaaataaaaataaggggcc

SEQ ID NO: 2921 - DNA, 219 bp, Zea mays
  Clone ID: PAT_MRT4577_92522C.1
gtctttatgaggaatcccatatacgaaatggaggttctgttgatcaacaaggtattcgatgttttccagctactgatcaacctgcggctgcggctcaagctgcaagtgcggcaagaagtaccctgacctggtggagacgagcaccgccgcgcagcccaccagctttctcggggtggtcccggtgaacaacgccgatcccttattactatgattcctcta

SEQ ID NO: 2922 - DNA, 1095 bp, Zea mays
  Clone ID: PAT_MRT4577_9275C.1
ccccgcgtccgcacggatcgtcttcccagcttcccatcggccgtccgtgccactatcgatcgggccgtccatcgcgtttgcacacggatcgacggggccaccaccccacccttttcgcggggttttaaaagcacccaacctcgcatcccctctggcatcacacactcgactctcctctctcgcatccgcagcctctcgagctctactccatcccctcgatctcgaagcgcagcagcagcagtcaggcggccatggacgccagcgcagcaggagccggcgggaaggcgaagaagggcgcggccgggcgcaaggccggcgggccgaggaagaagtcggtgacgaggtccgtcaaggccgggctgcagttccccgtcggccgcatcgggcggtatctgaagaagggccggtacgcgcagcgcgtcggcacgggcgcccccgtctacctggccgccgtcctcgagtacctggccgccgaggtgctggagctggccggcaacgctgccaaggacaacaagaagacccgcatcatcccgcgccacgtgctcctggccatccgcaacgacgaggagctcggcaagctgctgtccggcgtcaccatcgcccacggcggcgtcctccccaacatcaacccggtgctcctgcccaagaagaccgctgagaaggcggcggccaaggaggccaagtcgcccaagaaggccgctaagtcccccaagaaggcatagaggggcgcctttaccgctgtgatgttgaatgctcgtgttcagtagatctttacttctgtagtgtcgtcgttgttattggaactggttagtagatctgtgcattgtggttgaaacgtgattccctgatttcagaaatctaatttgcaatttgggtgcacaaaaaaaaaaaaaaaaaagcagacagtactaaaaaaaaaaaaaaaaaaaaggttttgcgggcccctttccccctgtgatgttgaatgctcgtgttcagtagatcctttacgtctgaagggtcgtcgttgttattggaactggttagtagatctgtgcattgtggttgaaacgtgattcccctttttccagaaatctaatttgcaatttgggggcc

SEQ ID NO: 2923 - DNA, 1082 bp, Zea mays
  Clone ID: PAT_MRT4577_92814C.1
aattcggcacgaggaacgagttaacgaaagccttttatccaagctcagggaagggaagctcacagtttcgttggatccaatcttttatccaagctcagcgatggcttctcgtcagcagcatcctactagctaccacgccggcgagaccaaggcccgtgccgaggagaagacgggtcaagtgatgggggcgacgcaggagaaagggagggaggccaagcacaaggcgtccgacgcctccgaccgcgccatgggaatgggccacgacgccatggaggcgaccagggagaaggcgcgcgccgccgcggaccgaaccatggggatgggccacgacgccggggaggcggccaaggacagggcgtaccgggccaaggacgcggcctccggtgccgctggccgcgccagggacactgcgtccgacgcggccggcgctgccggggaccgcgcccgcgacggcgcgcagcagaccgggagctacgtcgcgcagacggccgaggccgccaggcagaaggcggccggcgccgcgctgtacgccaaggacaccgtggtggccggcaaggacaagaccggcgccctcctgcagcaggcaggggagaaggtgatgagcacggccgtgggggccaaggacacggttgtcagcacggccgtgggggccaaggacacggttgtcagcaccgccgtgggagccaaggacgcgatgatgaactcgctcggcatggccggcgaggacaaggacggcaccaccaccaccgacgccggcaaggacaccagcacccgcaagcctggcagggactattagaggacacggcagccaaacttctcagtgtttctgttccagaagtttctgatcccatcatttaggttcaaaagtttctcatttcatttcaaactttcagtgtttggtgcatgctgtaaactctcttcaggacgggtcgtttgacatttgtgtcgactgaagcctccgcgctttcgactcaacgatgtatatgtaataataaagtcgcaaagctgttgttttattttcatctaaaaaaaaaaaaaaaaaaaaaaaaaaaaaaaaaaaaaaaaaaaaactcgaggagggg

SEQ ID NO: 2924 - DNA, 3405 bp, Zea mays
  Clone ID: PAT_MRT4577_92835C.1
cacagagtcacagacagaccagcgctctgcatggccatcattctggtgaccacgcaaaaaggaccagccattcccgggcaaagatggtttcagaagccagcgagcttggcattggcacacactatacacactggtcgctgatattttgattccccacgtgcgacacggcatctacccgtcgaggaactccacatctatctctccatgaagctcgctatatatgcatgtgagcttggcattggcacaccacagagcagccacttggatccggtgctcagcggaacagctagctatagcctgtagctagcagctagcttcagtcacaggccggacggtcggctcacacacagctagccgccgccgctgctagcttagccaccagtagtccgatctgatctacaggcagggggccagcaggggcagctagctagctagccgcgcgccggcgccatgatgaacctgaacctgaagcagccgctcgtgctgcccgcgcaccacagcaatgtcgtcggctcgcgcctgtcgtcgtcgtcgccctcggcagccgccgccagcaggaggaccggcggcggcgtgtcctcccggtccggctcccggcggcacgtgcggctgccgaggatcagctgcagcgccaccgaggaggtcagcggcgccgtgtcgtccgtcaccgtggagaggatgctcacggtgacggcgtcggtggaggcgtcgccggccatcgggcagatgtacttccagcgcgccgtcgacgacatcggcgacctcctcggcaagacgctgctgctcgagctcgtcagctccgagctcgacgcaaagtcgggcgtggagaagacgcgggtgacggcgtacgcgcacaagacgctgcgggagggccactacgaggcggagttcaaggtgccggcgtcgttcgggccggtgggcgcggtgctggtggagaacgagcaccacaaggaggtcttcatcaaggagatcaagctcgtcaccggcggcgacagcagcaccgccgtcaccttcgactgcaactcctgggtgcactccaagttcgacaacccggagaagcgcatcttcttcaccctcaagtcatacctgccgtccgacacgcccaaggggctggaggacctgaggaagaaggacctgcaggcgctgcgcggcgacgggcacggcgagcgcaaggtgttcgagcgcgtctacgactacgacgtgtacaacgacctgggcgacccggacaagaacccggcccaccagcggcccgtgctgggcggcaacaagcagtacccatacccgcgccgctgccgcaccggccgccccaggaccaagaaggaccccgagacggagatgcgcgagggccacaactacgtgccccgcgacgagcagttctcggaggtgaagcagctcacgttcggggccaccacgctgcgctccggcctgcacgcgctgctgccggcgctccgcccgctgctcatcaacaagaaggatctgcgcttcccgcacttccccgccatcgacgaactctacagcgacggcatcccgctgccgccgcagaccgggttcgacgccatccgcaccgtcgtcccgcgcatggtcaagctggtggaggacaccaccgaccacgtcctccgcttcgaggtgccggagatgatagagagggaccggttctcgtggttcaaggacgaggagttcgcgaggcagacgatcgcggggctcaacccgctgtgcatccagctgctgaccgagttccccatcaagagcaagctggacccggaggtgtacgggccagcggagtccgccatcaccaaggagatcctggagaagcagatgaacggcgcgctgaccgtggagcaggcgctggcggcgaagcggctgttcatcctggactaccacgacgtgttcctgccctacgtgcacaaggtgcgggagctgcaggacgcgacgctctacgcctcgcgcaccatcttcttcctgacggacctgggcacgctgatgccgctggccatcgagctgacgcggcccaagtcgccgacgcggccgcagtggaagcgggcgttcacgcacgggcccgacgccaccgacgcctggctgtggaagctggccaaggcgcacgtgctgacccacgacacggggtaccaccagctggtgagccactggctgcgcacgcactgctgcgtggagccctacatcatcgccgccaaccggcagctgagccggctgcacccggtgtaccgcctgctgcacccgcacttccgctacaccatggagatcaacgcgctggccagggaggcgctcatcaacgccgacggcatcatcgaggagtccttctggccgggcaagtacgccgtcgagctcagctccgtggcgtacggcgcgacgtggcagttcgacacggaggcgctgcccaacgacctcatcaagcgcgggctggccgtgcgcggggaggacggggagctggagctcaccatcaaggactacccctacgcccacgacgggctcctggtctgggactccatcaagcagtgggcgtccgagtacgtcaacgtctactacaagtccgacgaggccgtggccgccgaccccgagctgagggcgttctgggacgaggtgcgcaacgtggggcacggcgacaagaaggacgagccgtggtggcccgtgctggacacccgcgacagcctggtggagacgctgaccaccatcatgtgggtcacctccggccaccactcggccgtcaacttcgggcagtaccacttcgccggctacttccccaaccggccgaccaccatccggaagaacatgccggtggaggagggcgggccgggcgaggagatggagaagttcctcaagcagccggagacgacgctgctggacatgctgcccacgcagatgcaggccatcaaggtcatgacgacgctggacatcctctcgtcgcactcgcccgacgaggagtacatgggggagttcgcggagccgtcgtggctggcggagcccatggtgaaggcggcgttcgagaagttcggcggcaggatgaaggagatcgaggggttcatcgacgagtgcaacaacaacctggacctcaagaaccgctgcggcgccgggatcgtgccgtacgagctgctcaagcccttctccaagccgggagtcaccgggaggggcatccccagcagcatctccatctgatccatcctcagcatgcattagtccaattaattaaatcgggggttgtactattattgcatgcagaggctgcttgtcgaataaaacgtactatatgtacgattgtattgtacatgtgtgtcaatgcaacaagaggcacgtttgagactttgagttaataccaattaaaaaaaaaaaaaaaaaaaaaaaaaaaaaaaaaaaaaaaaaaaaaaaaaaaactcgaggggggaccccgggtac

SEQ ID NO: 2925 - DNA, 1591 bp, Zea mays
  Clone ID: PAT_MRT4577_92931C.1
gccgttgaagccaaaatttattgcgataaaattttgatccatacatttgtaggacattggatcaactgcttctgttatacatagaaaggagttcatagagattgagcacctatatcaagtggtggcttcaggatggaaggagtcatattctggaggaaatcggtcgacagggatagtagctgtgaatagtgagacgttagtgttaagcatgtgggatcagaaggtagaggcatacattattcatgtacaggtggaggttgcaatgttctgccccatgatatgtcaggaaattgtgaaaaatggcacagggtcgtccaaaaatcatgctattgcgctcccggaaagagttaatccagccagtttgagtttgattcttgactactgccggtttcatcaggttactgggcgctcaaacaaggagcggaagtcctttgatgaaaaatttgttaggatagaaacagaaagactctgcgaattgacttctgcagctgacagtctacagctaaagccacttgttgatcttactagtcgagctcttgctcgaatcattgaaggaaagacacctgaggaaattcgtgacattttccacttaccagatgacttaacagaggaagagaagttggagcccctaaaaaatgtaaatgatgatcctaggattcgcctattgaaccggttgtacgcgaagaagcggaaagagctccaggagcgccagaagctgaaggatgtacaagtacaaaaggaggaaaaagatgagagatctttggatgagttactttgttttattaatggggatggaggttcaggaggtggggaaagtagtaccaagagtaagaaaaagaataaaagaaggaaggatcatgctaagaaccccgcaaaagctgactctgagtctgtaaatgtggagggagctgcttgtgtggttccgtgcaaagtggatagcagtaatgtttctagacttccatgccaaagtcggcacgatgcaagatgatgccgagtacccctttgaagatgctgacctcgatgatggacttgatcctgcaatgaaagaagagcttgatagagaagttgaggactttgcaaggaggttgaattcagtttggagcgagtcacatattggtggtaatggttctgtgcagagatttcctgggtttaatcacaggtgagtgttaagctggcaagatctgaaggcagaagcagaggagatttgtgggcatacagcttggaagggattaaaggccaaacaggccaccttggctcctgtgtgttgtaaaaccttgataactcaggaaccaagcatgcagaaatgcgcaagttcccttggccattttcctgggaaggaggccacctagttgggatgacccttttttttttctttgggaagggagggttagaggtctgtcttgactcaattttttgttccttaactgctgtgttgccagttttcctgaataggggaagagaggagtgttgcctgttagctctgttacagatgtccatggaattctgttgtaacactgtattgtggtgcacatagaaatgtgattccctgtattgtggtgcgcataaaaacatgccgatgtttggctggttt

SEQ ID NO: 2926 - DNA, 542 bp, Zea mays
  Clone ID: PAT_MRT4577_93131C.1
aaaagaggagagaagacccaagcccaagtcagttctaagccttgtagctgctcgacctagagaggagagaggaagtcaggtaggaggctctgctgcgaagggagatggccgggaagggaggcaaggggctgcttgcggcgaagacgacggcggccaagggcgccgccgacaaggacaaggacaagaagaaggcgcctgtgtcccgctcctcccgcgccgggattcagttcccggtgggccgtatacacaggcagctcaagcagagggtctcggctaatggccgtgtgggtgccactgccgctgtgtactctgcagcaatccttgagtaccttactgctgaggtccttgagctggccggcaacgccagcaaggatctcaaggtgaagcgtatcacccctcgccacctgcagcttgcgatccgtggagatgaggagctggacaccctcatcaagggcaccatcgctggtggtggtgtcatccctcacatccacaagtccctcatcaacaagacctccaaggagtgaatgaaatgcaataacggg

SEQ ID NO: 2927 - DNA, 1297 bp, Zea mays
  unsure (1)..(1297): unsure at all n locations
  Clone ID: PAT_MRT4577_93177C.1
ggtaccctncgagggacacgcgtcatatcttcctccctcgcctattccccttccccgcgtgccgcgtcaaacaaatctaggcttccaagcgagcgaaagccttcctccgccagccgatctaccaacatcctctccgccgattggaggcacctgcgaagatgccgcagcggcactcaaagaacaacaacgacctcgccttcttcacgtacgaggagaagcggaagctcgggtacggcacgcagcgggagcgcctggggaaggactccatcaagcccttcgacgcctgctgcctctgcctcaagccgctcatcgacccgctctgctgccccaagggccataccttctgcaaggagtgcatccttgagtgcctcctcgcccagaagaaggacatcaagcgtaagctagcagctcacgaggcccagaagaagcaagagaaggaagaggaggaggaaaagctaattctgcagaaggctaaggagttggatgcctttgatcagcagaatcatggggctgttccccagtaccatgatcgcagtggttcccaaggcaagaatgggtttcatggagcgaacagtgtgaaggtcacttcttttgaagaggaagccctccgtaacatgaaggcattctggcttccttcagctactcctgaagctacggtcaaggtagatgcaccctccgccgacactgtctgccctgaggggcaggagaagctcaagttgaaatcgctcttccctatctcatttatggaggaaactgctgatccgaagaggaagaaggcaatggaaaagagctatatgtgccctagttgcaaatccactctcacaaatacaatgtccctcgtggcggtcagcgcctgtggccacgtcttctgcaagaagtgctctgacaagtttctagtaaaggataaagtttgcttagagtgcagcaaatcattcaaggagaggaatctggttccattagagaaaggaggaactgggtttgcggcacatgatgaacgcttggaggcaagggatttcaagcatttgggcagcggttctgggttaggactagtgaagcctgcaccaaaagcttactagccttgaatacttgtagccgcttttatatatcgtttatcatggtgtcatgaaattatgtataacctggaaattttgttttgtggcatcaaaatcgctctattcaggacagttctccagtctttaacgatttatctgatatgcatgtttcttttcatctcgtgcatttgttaagctggagctgttgtactatgaccgcttgctcttggtgttggcataatctt

SEQ ID NO: 2928 - DNA, 534 bp, Zea mays
  Clone ID: PAT_MRT4577_93262C.1
ggcattcaacagcaatgccggctggcatgttacctttatgacccttggtcctccaacaatcatcaggcctattcaacagttacctttggtgcatttattggcacaaaacatgagggcacaacaactgcagcaacttgtgctagcaaaccttgctgcctactctgaccatcagcagtggcttccattcaacccactaagtgcattgaactctggttggtattggcaacagcagcaactgccattcacccagctacctgctgcctacccacagcaatttcttccattcaaccaacttgcagcattgaactcatgtgcttatttacagtagcgccatctactaccattcatccagttggctggtgtgagccctgctaccttcgtgtacgcaaccacagttgttaccgtgctaccagcacgttgcgcctaacgctggcaccctcttacaactgtcacaattgctgccattcaaccaacttgctttgtcaaacccagtatcgttctaccaacaaccgatcattggtggtgccctctttt

SEQ ID NO: 2929 - DNA, 299 bp, Zea mays
  Clone ID: PAT_MRT4577_93337C.1
atctcgcccacacgaactcgagaccttgcccgcccaaatacgaacgcctcagatctcagtgaccatcgccgctgcttccttcgcgtccaggcgagatcaggaaatggcggctagcgagggcgcgctcctggggatgggcacccccctcctcgacattttcgccgttgatgatgacgccttcctaggagagcgggacatccagctgagcagtgcccttcttgctgaggacaatcacttgcctatgtatgatgagctggctagcatctgtcctgttgacatatattggtcgaggagccacc

SEQ ID NO: 2930 - DNA, 258 bp, Zea mays
  Clone ID: PAT_MRT4577_93415C.1
attgagaccaactagcaacatagaaagcacattagtttaccaacaatggcagccaaaatattgtgctgccttatgctccttggtctttctgcaagtgttgctaccgaaaccattttcccacaatcctaacaacctcctataccttcctttcttcccccatacctttaaccaccggtgtcttcaatgcttgaaaccccatttgttcaaccttacaggatccaacagccattcgcaccaggcatctaaccataataaccc

SEQ ID NO: 2931 - DNA, 644 bp, Zea mays
  Clone ID: PAT_MRT4577_93511C.1
cttcttatttctgggaagccacaaacatcagacacaaaactttattattgaactataactcatatgaaatctaaaacagggcaccaccaaagatggctcgatggtagaatgctgaacatgattgccaaagcaagttgattgaatggcaacaattgaatgcagatgaaagagggtgccagcgataagcgcagcgtgctggtagaacggcaacaattgtggttgtgtcaagaaggtagcacgtctcacaccagctagctgactgaaaggtagtagttgatgctgctgaatataagcaggagagatcaaagctgtcaaggtggcctgaatggaagaaattgctgggggtaggcagcaaatagctggctgaatggtagttgttgttgttgcaaataagaagcagagctcaatgcaactagctggttgaatggaagaaactgttgatgctgagagtaagcagaaaggtttgctagcacaagttgttgtcaacagttgtgccctgatgttgtgtgccaataaatgcaccaaaggtaactgctagaataggctgatgattgttggaggaacaagggtgataatagtaagatgccagctgtaattgcctgttcggatcctatagggccgaagaattgggttatcacataccg

SEQ ID NO: 2932 - DNA, 463 bp, Zea mays
  Clone ID: PAT_MRT4577_93522C.1
gggagccccaaaaagccccattttttccttaaaattaacttaaaaaaaagcccggcgggggtaacagcatccattgatccccaatccatgctgtttgatgcatgggtctgctggggcccgggattaacacagcactaacaactggcccagagggaccttgcaatcaaaaacacagatgggcaacaaccaacccgagacgaacgaagataaaccctttggactagggtaaacatcacgggagcgaacaggataacttggccgggcgggccccaccgttcaattcctccagttcccgtgggagttgccgtaacccccgccacggttgccaccgccgtagccgccgccaccaccaccgtattcgtcgccgccaccgtatccgccgccaccgccgtaaccgccgccgtcattacggggcccgccaccgccgtagccgccgtcttcacgggcaccaacgtacccaccg

SEQ ID NO: 2933 - DNA, 643 bp, Zea mays
  Clone ID: PAT_MRT4577_93624C.1
gcggccggcccgacgggctcgcttatcacagattattgacacccactagacacataacttgctcattgaagtaccaccaatggcagatataatatagggcctcctctatgctgcttgtgctttctgaaagcgctggtactgggaccattttgccacaatgctgacgagctccgatagctttccttcatgccgccaacctctcacccacggtgctttcggaatgggaacacccgagtcttcgaccctacaggatccaacaggccactcgatatgtgattgtacctttatcacccttgctgctgcaacaatcctcagccgtattacggcagctacctttggagcgtatattgtcgcagaacatcagggcacaacagctgcatcaacgtgagctagcgaaccttgctgcctactctcagcatcaggagtttcttccattcaaccaactagctggatggaactctgcttcttatttgcggcaacatcaactaccatgcagccagctatctgctgtctacccccagcaatttcttgcattcaaccaactgacagcattgaactctcctgcttatttacagcagcggcaactactaccattcagccagctagctagtgtgagccctgctaccttcttgacacaccacag

SEQ ID NO: 2934 - DNA, 249 bp, Zea mays
  Clone ID: PAT_MRT4577_9367C.1
ccgacggcatccgtcagatcgtctccgtgtacggcgacaagaccataaagctatggaacactctctgcgagtgcaagtacaccatcggctgcgacctcagcggacgggagggccacaacgggtgggtcttctgagctaggttctccccaaacaccttacagaccaccattgcctgcggatgctgagaccgcaccgtcaaggtgtggtaccttaccaactgcaagctgagctgcactctggatgggcaca

SEQ ID NO: 2935 - DNA, 313 bp, Zea mays
  Clone ID: PAT_MRT4577_93858C.1
ccgtttcttgatgtttctccggggctcggattcgacgggtgagcggatcgagatggcggcgtcagacgttgactaccgttgcttcgacggcggcctcacctgggccacagacgaccactccctgcacaacgccttcagcacctacggagaggtcctcgagtgcaggatcatactctatcgggagacgcataggcaccgcggcataggctacgccaccttctccacggaggaagcgatgcgaaacgccatcgatggcatgaacggcacggagctggacggacgtaacatcaccgtcaacgaggcccaatccctc

SEQ ID NO: 2936 - DNA, 1171 bp, Zea mays
  Clone ID: PAT_MRT4577_9400C.1
acgtgaacgccgcagcagctacctcgcctctgacgggcagggcccaccagaagtgggggagggagaggaagatatcccgtgccctcgccgccggcccgccaccacacccgtttccgggaggagagagagggcgggggcgaaggggatggcaaagcgccggcgccacgagttggcgccggtcgtggaggagctgatttcgccgatgaacagcctggacgacggctgcctcatgcacatcttcagcttcctgagcccaatcccagataggtataacaccgccctcgtttgccacagatggcgcttccttgcatgccaccctcggctatggctgcgtgttgagaggccaatcagagatgcgatggagcctggagtttatcctgatctcgaggctgctgtttctgctgctaggccgggtgacaccattcttattgcggctggtggttcccatgttgcatgtaacatccaaataaagaagcctatttgcataattggcgggggcgatcttcctgatgacactgtattgacctgctcacgtggcttcgacaacgcactggagtttctatcaacatgcaagattgcaaatctgactattagagcagaactcggatgctgcttgctgcatcgaggcggtagattgaccatccaggagtgtctgctgcagtgcgagcaaaaccctttggaccacctgtccttcccaataatcagcacagcgatagagtacgatccattctcatccctcaaggagcaagggcacggagtaacggtcgtccgcaccaggatcgaaggaggcgcgagggccgtcaggacgaacggcacactcgcgctgcgccatgtgcgggccatctattcccgcagctctgttttcttctggttcgaagtaggagagaaagtagaagcgcctgtacactagcaaaaaaacccgtgttcgttcttgtatgtcagtgttggtatcaccctagcgtgcgtttggtgaactcggacggctgcctcgtgtctgttgtgatctctttataattataataccccactgatgtttgaaccaaccaacatttattccgttcttgcctcctctgaatgcagctaatctaaaagtctactatgccacatgtttcaggggcgtaccttttataatatccaattttacgtacccttgcatccaaacctataactt

SEQ ID NO: 2937 - DNA, 1322 bp, Zea mays
  Clone ID: PAT_MRT4577_94022C.1
cccgtcactatatgaatccctcgatcgcggccgggccggggctttgccttccccgcgtcaaacaaatctagggttccaagcgagcgaataccttcctccgcctgccgatctccccgcatctctcgggctaagacgattcgaggcacgagcgaagatgccgcagcggcattcgaaaaacaacaacgacctcgccttcttcacgtacgaggagaagcggaagctcgggtacggcacgcagcgggagcgcctgggaaaggactccatcaagcccttcgacgcctgctgcctctgcctcaagccgctcatcggcccgctctgctgccccaagggccacacattctgtaaggagtgcatcctcgagtgcctcctctcccagaagaaggacatcaagcgcaagctagcagcacatgaggcccagaaaaagcaggagaaagaagaggaggaagagaagctaattctgcagaaggctaaggagttggatgcctttgatcagcagaatcatggagctgttccccagtaccatgatcgcagtggttcccaatacaagaatgggtttcatggagcaaatagtgtgaaggtcacttcttttgaagaggaagcccttcgcaatatgaaggcattctggctcccttcagctactcctgaagctacggtcaaggtagacttgccctccaccgacactgtttgcccggaggggcaggagaagcttaagttgaaatcgctcttccctatctcgttcacagaggaaactgctgatcagaagagcagcaaggcaggaaactcctgtagctacatgtgccctagttgcaagtccactctcacaaataccatgtcccttgtggcggtgagcacctgtggccatgtcttctgcaagaaatgttccgacaagtttctagtgaaggataaagcttgcttggagtgcagcaaaccattcagggagaggaatctggttccattggagaaaggaggaactgggtttgctgcacatgatgaacgcctggaggcaagagatttcaagtatttgggtagtggctctgggttagggctagtgaagcctgcaccaaaaacttactaaccttgaataattatagctgatgttgtgtattgtttaccatggtgtcatgaaattatgtaacctggagaattttgttttatggcatcaaaatcgttgtattcagaacaaaaaaaaaaaaaaaaaaaaaaaaaaaaaaaaaaaaaaaaaaaaaaaaaaaaaaaaaaaaaaaaaaaaaaaaaaaaaaggaaaaaaaaaaaaaaaaaaaaaaaaaaaagggcctttgggttgttaccactgtttaagggga

SEQ ID NO: 2938 - DNA, 2584 bp, Zea mays
  unsure (1)..(2584): unsure at all n locations
  Clone ID: PAT_MRT4577_94028C.1
ctcgaggccggccgggactctcgtctccctcctccccgttccttattcgccagaccggagggaggggtacgagcttcaccgctttcatcccgcccgcgctcctccccagatctcgtctccattaaagccgaccttgcccagattcgcgccctcctcgctcatatctgaaagcggctctgattttccaagccgaccgcaggagcggtgcaccgggccgcgtgattccggcggcttgatttggaatttgtgatctttcggggcattcgtcggtttgtctgtcggtgacggtggtgctgcgcttcgagggcagcgaagatgggtgtcggcggagagaagttccagctggggacggtgggggcgctgagcctatccgtggtctcctccgtctccattgtcatctgcaacaaggccctcatgagctccctcggctttaacttcggtgtgagatctgactgtttcctgcctcagtttcttgatttgttatgtgtatgctcgtgctggatgttcggtgattcgcgtagatttgcgtgctccattcgggttgtagttctggtgcatgagatgtgtacgcaagactcagcacttcagacggtgtttgcagggctttagcttcagtgataactaggagtgccaaatggtatctgtccaaacttcaacggtcgttgattggtgccagtttgattgtgaatggtgaaacatgtgtgaccctggatctaacctgatttcggtgaaagcttcagaaaagctaaaaaaagcttggttatttctctagccctcagcactcgagtttgacaccatccgacccacacgccggcagctctgtcccatccgataatgtgtcccgctccnnnnnnnnnnnnnnnnnnnnnnnnnnnnnnnntagctgttaatgtgggactgcttttacctgctgggtctctcgaagcgtctccactgtccggccattttatattctgcgtcgttgccgatgctaccgagccactaccttgacaagctggcatctgctggttacattctgctcccttcatgtggcattatggatgaaattctttgagcataagccttttgattcaagaactgtcatgggatttggagtacttaatggaatctccattgggctcctcaacttgagtcttggcttcaactctgttgggttttaccagatgactaagctggcgatcatcccgtgcactgtcatcttagagacacttttcttcaggaagaagttcagtcggagtatccagatgtccctttctgtgctccttcttggtgttggtgttgcaactgtcactgatctgcaactcaatgctgtgggatccatactctccttgctggcaattatcacgacttgcattgctcaaattatgacaaacactatccagaagaagttcaaggtctcatcgacccaactgctctaccagtcttgcccttatcaatcactgaccctgtttctcattggccccttccttgatggctttttgactaaccaaaacgtctttgcttttaattatacatctcaagttgtgtttttcattgtgttgtcatgcctgatatcggtctcagtgaacttcagcacttttcttgtgattggaaagacgtctcctgttacttaccaagtcctgggccatcttaaaacatgccttgttcttacctttggttatgttttgcttcatgatccatttagctggagaaacatacttgggatcctaattgcagtagttggaatggtcttatattcatacttctgcacagtggagacccagcataagaacactgaagtctccccacagcaggtgaaagaaagtgaggcagcccctttgatctcagactctttgagcaaagttgaaaatgggggcggtgttgttgatgacgagcctttgaaggtacccatgtggagctcaaagtattcgcgggagtgaaattttctaccgcttgacggtggcatcatacaggattcagtttagtaggcagatagtagggttggaagccaacccagagtgtaatgaacatttgagttacattttttggccttttttagcgtcacgatctactactggtaaaagggtctgtttcttgggaggatcttaccttcaagattgccagatatacattgaaactagacggcagatattgtatgattgtatctggacatgttccacatcgtctaactgtaacttccaactggtacatggcatgcctatatccaaagatagatttctttttttttgtatcagaaagatccggataagaagacttgtgcaagaaaaaaaacgataaataaaaaaaaaaaaaaaaaagcggccctggagtccaaatgttgagcccctcggaaatcccacaaagggactggttcccctctgacttcaccttcggtgccgccacttcagcggaccatattgtaggtgcttggaatgaagatggaaagggggaaaggaactgggatcacttctgccacaatcatccggaaaggatactggacgggagcaattccgacattggagcgaattcgcaccatatgtacaaaaccgacggcagattgctcaaggaaatgggactgcacgaatatagcggtctctatctcttg

SEQ ID NO: 2939 - DNA, 1444 bp, Zea mays
  Clone ID: PAT_MRT4577_94125C.1
tctgagtccgcacttactgccgggctgctgctgcccctctctttccccccatctgcaggctgcaggcgctgctcctttcgtcctccgctagcgagcgaatcgctggctcgaccccgcggcgggaggtatcccgccttcgatctggttcacgggccaattcgttgcttcgtggggctttggagtttcgagccaatcttgccccttaaagtgtcggtggcagcgtcttgtgatcatcatgagctttgtgttccgagggagcaggaccgacatcgaggccggtggcttcccagggttcgctcccgagcgccgcgccatgcgaattcatgcagggagcaggccggtgaatagcaattccttggcttttcttctaactgttcttgttttgttcatggtactgaactcgcaccagatctctcccaatcttttgctttggcttgtcttgggagtcttcctaatggccacgagcctcagaatgtatgccacgtgccagcagcttgctcatgctgcagctgccaacagttttctcggtcacactgagctgcgtgtgcatgtaccgccgtccattacccttgctacgagaggccggttacagagccttagacttcaactggctcttcttgatcgtgaatttgacgatttagattatgacactctgagagcattggatgctgacaatagcccacatgctccatctatgagtgaagaagaaataaattctcttcctgtcttcaaatataaagttcaggcacaacagaggcatccccctgcccgaaaaagtgatgggccatctcagctatcagtttcttcaactgggtccggcaatgaggaaaagcaggatggtttaaaagcagatggaaccagcaaaacttcagaggatgaactaacatgtagtgtatgcttagaaccactcagggtgggagatttattgagcagcctaccatactgacattagtttcacgtcagatggaacggccaaaagctacggcatcaaggtacatgtactatctgcaagcaccaagtcagcgatgggtggcagtctacaggcaaagcaggacaggatgcgtcatatatggtgagagcaaccgactacgagtcggccacagttaactaccagtaacccataactgaatcagtggagcatagttttcaaggggaagggttggactggtctagggatgcatgctaaacccttcctatcataacaaaaccgtgtgtagaaacaagtggctagtaaggttgctgttctggagatgctcatttcaatcattaactgagaggtgaggcataacaaggtcgataatctctttcaccgtcctttgttattatggtcggtttcttttcttttttcgtaccactcatgggtatttctcgcattctccgtgatgttgatgcataaaaaggttgctgataatcttcttaccaaaaaaaaaaaaaaaaaaaaaaa

SEQ ID NO: 2940 - DNA, 2058 bp, Zea mays
  Clone ID: PAT_MRT4577_94132C.1
ttggggaccctcgggcctgccggatcctgctgctgcccctctttcccccatctgcaggctgcaggcgctgctcctttcgccctccgctagcgagcgaatcgctggctcgaccccgcggcgggaggtatcccgccttcgatctggtgcgcgccctcctcgaactccccctcgccctcctcatctggcttccgcttgggtccggtcagcgccaagctgtgcgctgggcgaaacttccggaagcttcagggtttatccggcattccgcttcccgcgacggcggcgcgaccggttcactggccaattcgttgcttcgtggggctttggagtttggagccaatcttgccccttaaagtgtcggtggcagcgttttgtgatcatcatgagctttgtgttccgagggagcaggaccgacatcgaggccggtggcttcccagggttcgctcccgagcgccgcgccatgcgaattcatgcagggagcaggccggtgaatagcaattccttggcttttcttctaactgttcttgttttgttcatggtactgaactcgcaccagatctctcccaatcttctgctttggcttgtcttgggagtcttcctaatggccacgagcctcagaatgtatgccacgtgccagcagcttgctcatgctgcagctgccaacagttttctcggccacactgagctgcgtgtgcatgtaccgccgtccattacccttgctacgagaggccggttacagagccttagacttcaactggctcttcttgatcgtgaatttgacgatttagattatgacactctgagagcattggatgctgacaatagcccacatgctccatctatgagtgaagaagaaataaattctcttcctgtcttcaaatataaagttcaggcacaacagaggcatccccctgcccgaaaaagtgatgggccatctcagctatcggtttcttcaactgggtccggcaatgaggaaaagcaggatggtttaaaagcagatggaaccagcaaaccttcagaggatgaactaacatgtagtgtttgcttagagcaagtcacggtgggtgatctgttgagaagcctaccatgcttgcatcagtttcacgtaaactgcatcgacccatggctgcgccaacagggtacatgcccaatctgcaagcaccaggtgagcgatgggtggcatgctacaggcaacggtgaagaggatgcttcttacatggtgtgagtagctgactaggagtaggccatagctaactaccagtagctgctaactgaatccgtggaacatagttttcgaggtgacgggttggactgatctagggatgtgatctaatccctttctatcctaacaaaaccgcgtgtggaaacagttgtccagtacggttcttttacaggtaacgctcatttcaatcattctctgtaacggggcgtttggatcccttcattttagaggaattggaattcactcaataaagtaacttatttagtttggaatttgacattccaccactttctaaagttcagatacaaggctatctcaaattcatggggtggaggatgagaaattattttgtgcattagtagaatttgtttctactttgtaacttacatggcacacttcatctcactcctctattgtaaaaatgtagcacataaatatctcgcacgcgtgggcggacgcgtgggcggacgcgtgggcggacgcgtgggcggacgcgtgggacctcggtcgcgcagccctcacccagcatggtgctccagctccactgcgccacaccgaccatcaccatctctccgcctcccgcccgccctcgtcactacccccaccacctctacggcgccagcggagcgctcccggccccagctcgcggcctcgggcaacttccccgcctcctcctcgtcggcgtcagagacccgcgcgcggacggagcggtctgccacgtgaggaggcaggtgcggtacgacgaggaagacgaggaggaggaggacggcgaggagtggggccacaacgaggacgtcgcgaggattgaacggtacagcgaggacccccgcgaccaggcg

SEQ ID NO: 2941 - DNA, 299 bp, Zea mays
  Clone ID: PAT_MRT4577_94320C.1
aatagacacatacatcaacttattctgtgctgtctttatagagtagaaaagttagccaattagaactctcattcaaggagatactcaacaatggcaaaaaagaagcacaatgcagaccaaaagtttttttaaacatctatattggaagtacgaatcataatgagggtattaatctcacaccatgttgatatcattactttttacaatgaggtcttcgttccagcagccaaacctttgctggagccattaatatcatctgatactaggccaaaagacaagaagaatgctagtggccaagt

SEQ ID NO: 2942 - DNA, 1560 bp, Zea mays
  Clone ID: PAT_MRT4577_94673C.1
tgggtccctcgggccggccgggaaccacctttcacgtaccaccgggtttctgtccgcgccccgcccttaaaacattgtctgcctcgcggccggccgggacgagacgacaccaccacgccgggacgggaggcacaggtgcggtctgcgtcgagagttggtccactggcaggccggaatgaagaagtgcgcgtcggagctggagctggaggcgttcatccgggagagcggcgaggacgcccgcgccgccgccggaggtagcagtccggggtgcggtggatcaagcgatcccggagggagcggcgtcttctcacccggcttcggtttcgccgactcggatcttctcgcgcccgagcaggacaccatggatggaggcagttggtggtacgggaacgtccgcacgccgaacccagtcatgtcgcaggcggcgtccatatccgctagccccgggctaaccacctcagccaatcatgctcttgaaagcgagtcagactccgacagcgaatcactgtatgaggtagagggagttccatacgagcgaggtaacagatccattgagacgaagcgaataagaaggatggtgtccaatagggagtctgcgcggcggtctaggaggaggaaacaggcacagttgtctgaccttgagtcacaggttgaacgactcaaaggtgaaaacgcaacactgttccagcaactttcagatgccaaccaacagttcagtactgcagtcacagacaacagaatcctcaaatccgatgtagaagcgttaagaattaaggtaaagatggcagaggatatggtagcgagaagtgctgtatcgtgtggcctaggcgaccttggcctggcaccatacgtgaactcaaggaagatgtgccaagctttgaatgtgctcacagggttggatttactagggagtgatgcgttcaggggtccaaccgcaggtacacgagtacagaactcaccagtacagagcactgcaagcctagagagtctggataaccgaaagtccaacgaggtgaccagttgcgcggcggacatttggccttgagcttcaagccattgatctgattcaaagcttgctccaccctcaaaaaaaggaccagagtttgtcaactcaaatagctggtggcttgagcagagcttctggcacgagttctcttgaaccatatttccacataagctttataggatgcatcactcttttgatgtcacttagtttcaagtataaaatgaagctgtctttgtacaaagctgcaaatgagaagtaaatgaaacgtcctggacaaacttgtgaagtaggaatgatacataggctctatttccaggtcagatgagacagttatgtttacaacaaaaagcaatacatgttgtttagaaaccgctattaattcacaggaatgttcaatccagtacaagtcatctagtagatttgcacccctaccttctagtagattcaaccatgttttcactactacttgctgggactacaactgtacatcatgatggtaaaatgcataactagtgaggttcttaaaaaaaaaaaaaaaaaaggcccctagggcc

SEQ ID NO: 2943 - DNA, 2058 bp, Zea mays
  unsure (1)..(2058): unsure at all n locations
  Clone ID: PAT_MRT4577_94704C.1
ttcactcactaacggccgtgcttgcactcgcagcgcatcacttgctactttggtagtggagagcagaaagaacagagctagattattcccaacaagctacagcaaattagttgctcttcatggccgtgtcacacaacgttgggagcaagcacggtgtcgcgccgctggaggtgtcggtggaggccgggaacggcggagccgccgagtggctggacgacgatggccggcctcgccgcacgggcacgttctggacggccagcgcgcacatcgtcaccgccgtcatcggctccggggtgctctcgctcgcctgggcgatcgcgcagctgggctgggtggccggccccgccgccatgctgctcttcgccttcgtcacctactacaccgccacgctgctcgccgagtgctaccgcacgggggacccggacacgggcaagcgcaactacacgtacatggacgccgtgcgctccaacctcggcggcgccaaggtcgccttctgcggcgccatccagtacgccaacctcgtcggcgtcgccatcggctacaccatcgcctcctccatcagcatgcaggccgtcagcagggccgggtgcttccacaagcgtgggcacgccgtcccctgcaagagctccagcaacccctacatgatcctcttcggcgccgtccagatcctcttctcccagataccggacttcgaccagatttggtggctctccatcgtcgccgcagtcatgtccttcacctactccgccatcggcttgtccctcggcatcgcacagactgttgcaaacggtgggttcaagggaagcctcaccggcatcagcatcggcgccgacgtcacctccacgcagaaagtgtggcacagcctgcaggccttcggcgacatcgcgttcgcctactccttctccaacatcctcatcgagatccaagacacgatcaaggcgccgccgccgtcggagtcgaaggtgatgcagaaggcgacgcggctgagcgtggcgacgacgaccatcttctacatgctgtgcgggtgcatggggtacgcggcgttcggcgacaaggcgccggacaacctgctgacggggttcggcttcttcgagccattctggctgatcgacgtggccaacgtggccatcgtggtgcacctggtgggcgcgtaccaggtgttctgccagcccatcttcgccttcgtggagcgccgcgccgccgcggcctggcccgacagcgccttcgtctcgcgggagctccgcgtggggcccctcgccctcagcgtgttccgcctcacgtggcggtcggcgttcgtgtgcgtcaccaccgtcgtggccatgctgctccccttcttcggcaacgtggtggggttcctcggcgccgtctccttctggcccctcaccgtctacttccccgtcgagatgtacatcaagcagcgccgcgtgccccgcggcagcaccaagtgggtctgcctccagacgctcagcgtcgcgtgcctggtcgtctccatcgccgccgccgccggctccatcgccgacgtcatcgaggcgctcaaggtttaccacccgttcagcagttaattcttgctgctgtggatgtgctgggtggggcctggcctggcctgggtttggacgtatgtgcatgatgcattcattgcgttgcgttcaactgtggtcaacaagggagggagacagatgcagatgcagtgtgagatgtttgcatggaggcccctatagaaacaagtgaaatgtttaggcgcccttgtgcacatgctggtcgcattccttgcaagaataccaggggtggggccagaatggcatgagctgggtgttcctttctaactcttcttcttcttcttctcctcttcttctttatttacatttttcttttatgtgttttcgtctaattaaggttctggttttgtagttctaccgtgcaactcattgtaccggaaaagaatatatgaacaggaaatcccatatgatctttgccatctttaaaaaaaaaaaaggagggcggccgccgncaagacagctcgtcaacccggtaattaatgtccggggcggcaccagcagg

SEQ ID NO: 2944 - DNA, 2072 bp, Zea mays
  Clone ID: PAT_MRT4577_94705C.1
gggtcccacacagccacacaggcacagtctctcgcgtcacctagcaagcaagaagcactcgggagcacttgcttcctgcgctcttccgctccgacggtccgacgaggaagaagaaattcgattcgagggagggagggagggagctcgttggctcagttggccatggcacccgcgccgcacaacggagtgaacaacaaccacccggtcgtgcccatggaggtgtcggtggaggccgggaacgccggagccgcagagtggctagacgacgacggccggccgcgccgcagcggcacgttctggacggccagcgcgcacatcatcacggccgtcatcggctcgggagtcctctccctggcgtgggccatcgcgcagctgggctgggtggccggccccgccgccatgctcctcttcgccttcgtcacctactacacggcggcgctgctcgccgagtgctaccgcacgggccacccggagacgggcaagcgcaactacacctacatggacgccgtgcgctccaacctcggcggcgtcaaggtcgtcttctgcggcgtcatacagtacgccaacctcgtcggcgtcgccatcggctacaccatcgcctcctccatcagcatgcaggccgtcagcagggccgggtgcttccacaagcgtgggcacgccgtcccctgcaagagctccagcaacccctacatgatcctcttcggcgccgtccagatcctcttctcccagataccggacttcgaccagatttggtggctctccatcgtcgccgcagtcatgtccttcacctactccgccatcggcttgtccctcggcatcgcgcagactgttgcaaacggtgggttcaagggaagcctcaccggcatcagcatcggcgccgacgtcacctccacgcagaaagtgtggcacagcctgcaggccttcggcgacatcgcgttcgcctactccttctccaacatcctcatcgagatccaagacacgatcaaggcgccgccgccgtcggagtcgaaggtgatgcagaaggcgacgcggctgagcgtggcgacgacgaccatcttctacatgctgtgcgggtgcatggggtacgcggcgttcggcgacaaggcgccggacaacctgctgacggggttcggcttcttcgagccattctggctgatcgacgtggccaacgtggccatcgtggtgcacctggtgggcgcgtaccaggtgttctgccagcccatcttcgccttcgtggagcggcgcgccgccgcggcctggcccgacagcgccttcgtcgcgcgggagctccgcgtggggcccctcgccctcagcgtgttccgcctcacgtggcggtcggcgttcgtgtgcgccaccaccgtggtggccatgctgctccccttcttcggcaacgtggtggggttcctcggcgccgtctccttctggcccctcaccgtctacttccccgtcgagatgtacatcaagcagcgccgcgtgccccgcggcagcaccaagtgggtctgcctccagacgctcagcgtcgcgtgcctggtcgtctccatcgccgccgccgccggctccatcgccgacgtcatcgaggcgctcaaggtttaccacccgttcagcagttaattcttgctgctgtggctgtgctggggcctggactggcctgggtttggacgtatgtgcatgcagcattcattgcggtgcgttcaactgtggtcaacaagggagggagacggatgcagatgtttgcatggaggcccctatagaacaagtgaaaggtttaggcgcccttgtgcacatgctggtcgcattccttgcaagaataccaggggtggggccagaatggcatgagctgggtgtttgttgtgatgacgagtctactgtaggtgtatgaagcagcaacaaaaaacatgttcctttctaactcttcttcttcttcttctattcttcttctttatttacaattttcttttatgtgttttcgtctaattaaggttctggttttgtagttctaccgtgcaactcattgtaccggaaaagaatatatgaacaggaaatcccgtatgaaaaaaaaaaaaaaagcggcc

SEQ ID NO: 2945 - DNA, 162 bp, Zea mays
  Clone ID: PAT_MRT4577_94884C.1
cggactcgtgggccgaggccgtggcctacgcttaggcgcatcacggcatcggcaagaaagacgccatcaacatcatcctgttcgtgctcggcttcaactccttcggctgctttttcgtggtcctgcccttcctggtttccaaggtctttttgtgcccctgct

SEQ ID NO: 2946 - DNA, 238 bp, Zea mays
  Clone ID: PAT_MRT4577_94991C.1
cccccaggcgggctccaatatctcgaggaaaccgctggggcagagggggcaacttatctacacctcggcctccccccagctaacggccgcggagcacatgtggcaccagtaccttccggcgcccgcctgctccgccatagctgctgagcatctagcgctttaaattccccgccaatgcagctactctagtaattgtttggcggggggcgggggaacaacgaccaacgcggggcggaga

SEQ ID NO: 2947 - DNA, 215 bp, Zea mays
  Clone ID: PAT_MRT4577_95056C.1
tcttcctctggcttctcctccccctcttatcaagtcctcctcgggctagggttccttatggttttgtggaggtgctatgtctgcttctgatgtggagtaccgttgcttcgtcggctgacttgccttttccaccagcaacgattcgcttgagaatgccttctcctcctactgcgatatcctcgactccaatgtcatcacctaccggtagacgggga

SEQ ID NO: 2948 - DNA, 361 bp, Zea mays
  Clone ID: PAT_MRT4577_95065C.1
agcaacataaaatgcacattcgtgtaccaacaatggcacccaaaatattccgcttccttatgctcctgggtctttctgcaagctgttgctaccgtaaccattttcccacaatgctcacaagctcctatagctgttcttattaccccatacctgtcaccaacggtgtcttcaatgtgtgaaaacccaattgttcaaccctacatggatccaacatgcaatcgcaacaggcatcttaccattatgaccattgttcctccaacaaccgtgtgccctattacagtaattacctttggtccatttggtggctatccaatacatcagggcacaacaactacaacaacttgtgctagcaaacattgct

SEQ ID NO: 2949 - DNA, 261 bp, Zea mays
  Clone ID: PAT_MRT4577_95066C.1
ttcttcttctcgtccacagaatggggggtttcgtggggactcataagaccaaggcggagttcaaacgtttccaagttaaattcaatagaaggctgtctgtcaagacagactacagggccagtataaggctgattaaccaagacaaaaacaagtacaacacacccaaatacatatttgtttcgcgatttaccaacaaggacatcacttcccaaattatatttgctagtatagcttttgatatggatcttgcttctgtctact

SEQ ID NO: 2950 - DNA, 333 bp, Zea mays
  Clone ID: PAT_MRT4577_95234C.1
gcgctgtgttttcttttgtttgtttttggagagttttattgttctttttagtggcccctttagttaaatctaactttttttctgtttcgcatatacgtagcacattattagaactgggagcgcacccctaaaaaaaagcatatctgttttattccacccaccgcacatagctagctactcacaaaaaagctgagagattcatgacacagataggcgcgcggcaagacacccctcggtgcgccgagatagaacaccaagaacaccgacacaacagagcgcctttcagacaaggagacggcgccaggccttatatagtgtcacctaaatcccgcg

SEQ ID NO: 2951 - DNA, 1425 bp, Zea mays
  Clone ID: PAT_MRT4577_95273C.1
cgatcgatcgagatatcgtgtcaacgtgccggccggggcgtgggaagatgatgaacctatcggctgccgccaacggccgcgacgagttccccccctacgtcgtgccgtccaacgcggccgctccgcccccttccctgctcccaaccatggagcagcagcaggagagcagcatccacagggagcatcatcagctgctgggctacaacctcgaggccaactcgctggccctcctgcccccgtccaacgccgccgccgcccaccaccacaccaccttcgccggcggccacagcccccacgacatcctccacttctacacacctcctccttccgccgcctcgcactacctcgccgccgccgccggcaacccctacagccacttagtctccgcgcccgggaccaccttccaccagacctcgtcgtcctactacccgcccgcggcggcggcgcaggccgcgcccgagtactacttccccaccctcgtcagctccgccgaggagaacatggccagcttcgccgccacgcagctcggcctcaacctcggctaccgcacctacttcccgcccagaggaggctacacgtacggccaccacccgccgcgctgccaggccgagggctgcaaggccgacctctccagcgccaagcgataccaccgtcgccacaaggtgtgcgagcaccactccaaggcgcccgtcgtcgtcaccgccggtggactgcatcagaggttctgccagcagtgcagcagattccatctgctggatgagttcgacgatgctaagaagagctgcaggaaacgcctagcggaccacaaccgccgccgccggaagtcaaagccatcggatgctgatgccggagacaagacaagggcacatgcgaacaaagcagctgctgctaaagacaaagcagagagtagcagcaagaacatggatatcggagatgggttgggcgcacagatactgggaagtgcactcttgtccaaggaacaagatcaagccatggatcttggagaggtggtgaaagaagcagtggatcccaaggggaaggcatcaatgcaacagcattacggcttccccttccattcgtcgtcagcaggatcttgcttcccccagacccaagccgtctccagtgataccacatccaatataggtcaagtgcaagagccaagcttagggttccaccatcagcaccaccaacacagcaacatcttgcagctcggccaggctatgtttgatctcgacttcgatcactagtcaatatgtgatgcacatgcaccctctctttctcaccccacccctccttccctccctctatcttgtttgtgcgcgtaatccgaatatttttcctttttaaattatctgtgttaattactgtaacgtggacataataatgatagtctatgcttgccatgcaatcatctatattatagtt

SEQ ID NO: 2952 - DNA, 223 bp, Zea mays
  Clone ID: PAT_MRT4577_95443C.1
ttttaccacgaaaacaccctttatacatcgaatgctttaacggaagattggtccatccttgtatgctcattgtggtaaacgcatgtgaccacctacagctagctgcatacagattgcctcaacctgtggcaacgtttgaacacttgtttgtagacgacattcttataactaataccctgacttggctgttaaccaatcgacaaccacgatatctcatcgatat

SEQ ID NO: 2953 - DNA, 867 bp, Zea mays
  Clone ID: PAT_MRT4577_95672C.1
gccgaagtcatgggaatcaccatcaactccttccccaagccgcaacctcccacaaatctccgcctcccctccccttccgacccgcccaggccgcagcagagcgccatgtcgtcctcccctacccccgcgccagacgccggcgccgccgcgatggccgtcgacgactcgtcggagaccgaccagctcgactccatgtccacggaggacatcgtccgggccacccgcctcctcgacaacgaggtccgcgtcctcaaggacgagctgcagcggaacaacctggagctcgagaacgtcaaggacaagatcaaggagaatcaggagaagataaagctcaacaagcagctgccctacctcgtcggcaacatcgtcgagattttggaaatgaaccctgaagatgaggctgaagaggatggtgctaatatagatctggactcacagaggaaaggaaaatgtgttgttcttaagacatccacaagacagactatattccttcctgtgatcgggctagttgaccctgacaacctcaagcctggtgatttggttggagtcaacaaggacagctacttgatattagacacgctaccttcggagtatgactctcgagtaaaggcaatggaggtagatgaaaagcctacggaggattataatgacattggtggccttgagaaagagattcaggaactcgttgaagctatagtgttgccaatgacacacaaggagcaatttcagaagttgggaatccgtcccccgaaaggagttcttttatatggaccacctgggacgggaaagacgttgatggctcgtgcatgtgctgcacaaaccaatgcaacctttctgaaacttgctggtccgcagctagttcagatg

SEQ ID NO: 2954 - DNA, 375 bp, Zea mays
  Clone ID: PAT_MRT4577_9575C.1
gccagaaaacccagcccatgtacagggccattcatacaggaaccgatgttttggtagcataccattacccaaactgactttatgacaatgttagccggggatgaccacaatggaaacggtagtttaggaacaagccggcccctttggtggctgggaagggtgaccacacacaaacacaccagaccaggggcagaaccacccgcctggggcgccaacgaggggcgctatccggtatagcacgacaaaagtaaaaataaaacatcacgagggggagggaaactgaataattctagtacagggatataggctccttttttgtgagcgccaaggggccttggggagccgctccattgttggatgaagcacggcacattg

SEQ ID NO: 2955 - DNA, 2386 bp, Zea mays
  unsure (1)..(2386): unsure at all n locations
  Clone ID: PAT_MRT4577_95838C.1
ccggccgggccggggtgtggttgctttgcttagcactggcacagcgcagcacatgaggagaagaagagggaggagtaattatttattaattaacaaagaagaagacttcttccttcctcgtcgtctccagcccattccaattcttgattccatcgccccaccatccacaactcccctaatccttccaacctcctcgtcgtccagtccaccacctccacgcgcaatggccagcggctaggcggcaccaaccagatcacaaggattcgtttcatccggcagcgcagctctagagcctccatgggcagctacgcgtacaagtactgtatgtgcttcacgcgcaagttccgatccccggacgcccagccgccgccggacgtccgcgccgcccacctctccttcgcctctgacgcccatgccctccgccgcttcgtcgccggcgtccagggcgagtcccccgccgacgtcgaccgcatcctcgccatgctctccgggggccacagccatggaatcgcccgcctcgtcacaaggtcgccggcggcatccacgcccacgctcgaagacttcttcgccttcctcttctcccccgacctcaacccacccatcgcgcaccaggttcaccaggacatgtcagcgccgttctctcactatttcgtgttcaccgggcataattcctacctcactgggaaccagctcaatagtgactccagtgacgtcccaattgtaaaggcgttgcagagaggtgttagagtcattgaactcgatatgtggcccaatccttcaaaggacaatgtcgatattcttcatggagggacattgactgccccagtggaaatgatcaaatgtttgaagtccatcaaagaatacgccttctgtgcctcaaattatcctcttgttattactcttgaggatcacctcacatcagatctccaagctaaagttgctacgatgctcactgaaacatttggagatcttcttttcgtccctaatccagacccgatgaaagagtttccttctccagcatctctaatgaagagaataatcatatcaaccaaacctccacaagaatataaggagtttctcaaagccgagaataatcgcagtggcagcggaaacatagctgagttgccagaccaaggaagcctgagaagaatagattcaaatgccgatgaatctgatgggaaggatgaactggatgagcaagacgaggaagactccgacgaggacgatcccaaatttcagcaggatacagcctgtgagtataggaaactcatcaccatccaagctggcaaaccaaaaggccatttgcgggatgcgctaaaagtggatccagacaaagtcaggcggctttctttgagcgagacacagttagctaaagcgacaatctctcatggtgctgaagtcataaggttcacacagaagaatatactccgtgtgtatccaaagggcacgagggttaattcttcaaactacgatccaatgaacgcctggacccatggtgcgcagatggttgcgttcaacatgcagggccatgataaagcgctccggttgatgcaagggtttttcagagccaatgggggctgtggttatgttaaaaagcctgacttcttgctaagaacaggtccaaatggggaagtatttgaccccaaggctagtttgccagtgaagaaacccctccaaggtgaaagtttatatgggagacgggtggcgcatggacttcagtaaaactcatttcgatgccttttcgcctccagatttctatactagggtagggatcgcaggtgtgaaggcacacagtgtgatgaagaagacaagggtgattgaggcccagtgggtgcccatgtgggatgaggagttcacgttccttctgacggttccggagctggccctcctgagggtagaggtccaggagtacgacatgtcggagaagcccgacttcggggggcagacagtcttgccggtatgggagctgaagcagggcatccgtgctgtgcccctgcacgatcgcaagggtgtcaggtacaagtccgtcaggctcctcatgcgatttgattttgtgtagccgagccgagccgccattcagattcagcttctgtttttttccttcttgtgtgaattgaatgtattactcccttccttccatcttcaacgtatatgtgtatgtatgtacttatttttgtcggaataaaagttgtatggaatggaatggaaggaaggagtagaactgtcttcaaactccagcttctagatctgtacgggtgattcagttttacttgctggcacattgtttgtttgtttactttactggagatagatttgtacatgagcttgattattcttcatttagctactggctaagagatagattaananaaaaaaaaaaaaaaaa

SEQ ID NO: 2956 - DNA, 420 bp, Zea mays
  Clone ID: PAT_MRT4577_95881C.1
ccgaagagttccattccctagccgccgtcgactatcgtcttcctcacaggttccggggccggggaactggccgagctctaagtagagaatccgttttcattgtctcagcacaggctctgctgcctctggtggtaatgaaggggacaaattcgagacatctcttccggatcaagcgttccaactcgataatcactgatttcacacatagcttcgacaatttgaatatgatgtactaatggagtctaaagctggcaccaagtctagcaggaaacgttccatgatgtatgaagcttcccatggctacagcattgacgacactcgacactgccggaggcgtgaagaactcccagtcatgctgcttactccaactgcgcgaagaagccatcctgatatccctttcggcttcctcattctagtagt

SEQ ID NO: 2957 - DNA, 389 bp, Zea mays
  unsure (1)..(389): unsure at all n locations
  Clone ID: PAT_MRT4577_96002C.1
cggacgcgtgggttctggagcagctagggttccgtcctcgatccgatccgccnagtgcggaccaggtttccccacgcggatcgaatcgatggccgccgagggcgagaagaagatgataaccctcaaaagctccgatggcgaggagttcgaggtggaagaggcggtggcgatggactcacaaaccatccgccacatgatcgaggatgactgcgccgacaacggaatacgtcttcctaacggccactccaacatcctatgcaaggtaatcgagtgctgcaacaagcacgtacatgccgacgccgacgccggcgacgcctcgaaggccggttaccacaacgtaggtgacgccttcgacaacagcaacgacaactccggtgaggaccgtcaga

SEQ ID NO: 2958 - DNA, 2019 bp, Zea mays
  Clone ID: PAT_MRT4577_96005C.1
gaaacagtcagcgcagggcagggcagcctgacagacagccgcggcggcaccaggccaacggtcagcgcagggcagggcagcctgaaagaaagcggcggcggcagcaggtcactggctcactgctctgtcctctcgtctccagagttcagaccaccgcatcgccatggcgccgccgcagacgatcccccggcgcggcctcttcattggcggggcctggagggagccgtgcctcgggcgccgcctgcccgtcgtcaacccggccaccgaggccaccatcggcgacatcccggcgggcacggcggaggacgtggagatcgcggtcgccgcggcgcgggacgcgttctcccgcgacggcgggaggcactggtcgcgcgcccctggggccgtgcgcgccaacttcctccgggcgatcgccgccaagattaaagacaggaaatctgagctggctttgctggagacacttgattctggaaagcctctggatgaagcaagtggagacatggacgatgtcgctgcatgctttgagtactatgctgatctggcagaagctttagatgggaagcaacagtcaccgatctctctgcctatggaaaactttaagtcgtatgtacttaaagaacccattggggttgttggactgatcactccttggaattatcctctgttgatggcaacttggaaggtcgcacctgccttggctgctgggtgtacaactatattaaaaccttcagagttggcttctgtgagctgcttagagcttggtgcaatatgtatggaaataggcctaccaccaggtgtcttgaacataattactggtctgggccctgaagctggtgctccattatcctcacattcccatgtggataaggttgcttttactggaagtacagagactggtaagaggataatgatttcagctgcccaaatggttaagcctgtttcattagagcttggtgggaaaagtcctcttattgtctttgatgacattggtgacattgacaaagctgttgaatggaccatgtttgggatcttcgcgaatgctggtcaagtctgcagtgctacttctcgtttactgctgcatgagaaaattgcaaagaaattcttggatagattggttgcatgggcaaagaatataaaagtctcagatccactggaggaaggctgcagactgggttcagttatcagtgaaggacagtacgagaagataaagaaattcatctcgactgcaagaagtgaaggtgccacaattctgtatggaggtggccgaccacagcatctcagaagagggttctttcttgaacctacaattataacagatgttagtacgtcaatgcaaatttggcaagaggaagtctttggaccagttatctgtgttaaggagtttaggacagagagtgaagctgtggaacttgcaaatgatactcactatggtttagctggtgccgtgatctccaatgatcaagagaggtgtgagcgcatttcaaaggctcttcactctggtattatttggataaattgctcgcaaccatgcttcgtccaagctccttggggagggaacaagcggagcggttttggtcgggagctcggagaatggggtcttgataactacctgacagttaagcaagtcaccaagtattgctcggatgaaccgtggggatggtaccagcctccatctaagctgtgaaggggcattcactccagggaatgtaatgcatcattaactgacagcatcagtcctgttaatggacaggagctcgtgtacagtacagtgctcgtaaaaaaagctctttgatggtaaagttgcttgctgctatcactactccagaccagaattcaggactggagagtacgatgtcatgagttgtactacttgttagtctgcactctttatcattcgaagtttggcagtggtgtgtagttgcacttggaagattgcaataataataaagataattggataattgatccattttaatcaaaaaaaaaaaaaaactcgaaaatagtaaaaaattggggggc

SEQ ID NO: 2959 - DNA, 1633 bp, Zea mays
  Clone ID: PAT_MRT4577_96019C.1
ttttttttttttttttttgcaattgcaaccacgcatatatttttttccttcattctctttgacaaaacatccatttcgtatttcctcgtttcaatgcttctcgctacaaacaaaaaaaaaacaatttggataagtctggacataacgcaggagaaaacggaatctcgcctgtgggccccgtccccaactcccgtgtcgacaactcgccaccaccttctcttccgttccagaagggacagcgtccgtgtcttccttgctcactctcctcaccactaccctgacctgacctgctcccaagctccctctgcctgcctttataaatcaccggggcagagcgcctcagtgacacacgccgctgctccaagaaaccaccgccgagcccaaccgcacaagcgcgcgaggcaggagagagagagaggcggggagcaaaacaatggaggggaaagaggaggacgtgcgcctgggcgccaacaagttctcggagcgccagcccatcgggacggcggcgcagggcgccgctgacgacaaggactacaaggagcccccgccggcgccgctgttcgagcccggggagctcaagtcctggtccttctaccgcgcgggcatcgccgagttcgtcgccaccttcctcttcctctacatcaccatcctcaccgtcatgggcgtctccaagtccacctccaagtgcgccaccgtcggcatccagggcatcgcctggtccttcggagggatgatcttcgcgctcgtctactgcaccgccggcatctccggaggacacatcaacccagctgtgaccttcgggctgttcttggccaggaagctgtccctgactagggccatcttctacattatcatgcaatgcctgggtgccatctgtggagctggagtggtgaagggcttccagcaggggctttacatgggcaacggcggtggcgccaatgttgtcgcccctggatacaccaagggggacggccttggcgcagagatcgttggcaccttcatcctagtctacaccgtcttctcggccaccgatgccaagaggaacgccagggactcccatgtccccatccttgccccactgccaattgggttcgcggtgttcctggtccaccttgccaccatccccatcaccggcaccggcatcaacccggctaggagccttggcgccgccatcatctacaaccgggatcatgcgtggagcgaccattggatcttctgggtcggccccttcatcggcgccgccctggctgccatctaccaccaggtgatcatcagggccatcccgttcaagagcaggtcttaagctgccgcgggtgtgctgagacatgtggggaatgtattgtctgcccacgcctagtttctctgctgaatcttccatctctcttcccttcagggctgctcactgctgcgccgttctgttaaccgaaacaagaacttcgtgtattcctgtaccgagctgtgtgtatgtttttttttcttccatcgtgtttgctgcaaggtttgccgtctcattttatgcgttgggatgttggcaagaaagggcagatgtcatgtggaaacgtgggtttataactatcagctggatttttcatccaagtggaatcgattcagaattttctttaaaaaaaaaaaa

SEQ ID NO: 2960 - DNA, 2307 bp, Zea mays
  Clone ID: PAT_MRT4577_96073C.1
gtccttctccccaggccccagaactccaaccaccactctgactccagattccttctccctccccgaagactagccggtgccggcgcgggtgccgtgcccttcactttttccggggactttggaccctacgtatccagatctacaagtttccctccctccatatattcggcttccgagcagagtatcccagccccaacccgccgttctctcccgcgcgccgatcggaccggaggctcgccgttccaccatggcagaggccggcgaccccaccctggagcaggggctcctcgctaacccggaggaatcgaaccaacttacatacagtggagatggatctgtcgacttttcgggaaaccctgtcgtgaaggagaaaactggcagatggaaggcatgcccattcatcttaggtaatgaatgctgtgagcggttggcctattatggcatctcgacaaaccttgttacttacttgacaaaaaaactacatgatggtaactcctctgctgctagaaatgtgactacatggcagggaacttgctatttgactccccttattggagctatcctggctgatgcatactgggggaggtattggacgatcgcaacgttctccacaatatacttcattgggatgtcagtactgactctttcagcatcagttcctatgctcatgcctccatcttgtgaaggagccttttgcccagaagccagtcctttgcagtataccgtcttttttcttggtctttatctgattgcgctcggtactggtggaattaagccgtgtgtctcatcttttggagcggatcaatttgatgacacagatccagctgagcgaatccagaagggttctttcttcaattggttctatttttcaataaacattggtgctctcatatcaagcagctttctggtttgggtgcaagacaatgtaggatggggactggggtttggcattccgactgtattcatggggctggcaatcataagcttcttctctggtacatcactttataggttccaaaaaccaggaggtagtccaattacacgagtatgtcaggtgattgttgcctctttgcgcaagtggaatgtgcctgtcccagaggatagctctctcttgtatgagctacctaatggggtatcaacaattgaggggagtcggcaaatagagcacacagatgaactcagatgtttagataaggctgctacagttaccgaagttgatgtgaaaacggctgacttcaacaacccatggcggatatgcactgtcacccaggtggaagaactgaagatactagtaaggatgttccctgtctgggcaacaacaatagtgttttctgctgtatatgctcagatgtcaacaatgtttgtggaacaagggatggtgcttgacccatccttgggctctttcaagatccctccagcttcactatctactttcgacaccctaagtgtcatcatatgtgtcccgatgtatgattacatcgtggttccgatagccaggagattcactggcaacgagaggggctttacagagttgcagaggatgggtattggcctggtaatttccatcatagctatgtcagtcgccgcagtcctcgaaatcaagcggctagcagttgccagggaagcacacctggtggatcagaatgtcccggtcccactgagcatattctggcaaatccctcagtatttcctgattggtctagcggagattttcacattcattggggcgctcgagttcttctatgaccagtcaccagacgccatgaggagcctctgcagcgcgcttaatcttctcactactgcgtttgggaactatctcagcacgttcattttgacaatggttgcgtactttactacgaggggaggtaaccctgggtggattcctgacaacttgaacgaaggccatcttgattacttcttcttgctcatcgctggcatcagttttctgaacctgattgtttatgtcctctgtgctggcaaatacaagagcaagaaggcagcttgagttgtgaaggccaggggctggatggcgtgctgcgcgccatgttatggtggacacttcagttcaaaatctgtatatatgtttcccgcattaaccaccctagctgaagcaaccatctgcaattgttgcaaagtttatattcttcattgtgctggactaagttgattatacattcgtgcttctactttgtgtatgtatatatctgacctaaagttgctgaacatagacaatttcacttgcctctggtatccaggattaagacggcccaatttcacttgcctctggtatccacggttttgattaag

SEQ ID NO: 2961 - DNA, 266 bp, Zea mays
  Clone ID: PAT_MRT4577_96215C.1
acatgaccccttcgaggtcctggaccagaggggagtgggcgagctggtgaagtttgctacagagagggtgcgcaaagctaggtctaacttgaaggtgggcatttgtggagaacacggtggagagccttcctctgtagcttcttcgcgaagctgggctggattacgtttcttgctcccctttcagggttccgattgctaggctagctgcagctcaggtgcttgtcctgagctgcctcctcattggcaaccggatttctgctgctggt

SEQ ID NO: 2962 - DNA, 364 bp, Zea mays
  Clone ID: PAT_MRT4577_96289C.1
attcggctcgagctcactatagttgcttttctccatataccagatccaattcgcgagttctcccttgtgtgcggccatggcgctctctgtggtgaagacctcgtacggactggagtacaaggtcaaggatctctcgcaggcggacttcggacgtctcgagactgagctgaccccggtcagaatgcccggccttatagcgtgccgcaccaagctcagcccgtgcaagccgttcatccgcgctaggatctcggggtctatgcacatgaccatccagaccgccgtcctcatggagacgataaccgcgctcggctccgaggtccgctagtgctgctgcaacatcttctgcactcatgaccacgccgac

SEQ ID NO: 2963 - DNA, 2094 bp, Zea mays
  Clone ID: PAT_MRT4577_96538C.1
cctcgggcattgggaccctcgaggccggccgggagaagccgcagccacgcccccacaccaagccgtatcgtcttctccctcttgtccggttcgggtggtccgcggtcggggtgagtgagtgagcagctttgcttctccatctccccgttcccttccctccccagccccccggcccggcggcggtacgtgaccctgacgccgcagcgctagctagctcgccggaacggcaggtggcggcgcgcgacctgagagcacagcagcaccggaccggctcaggcaggcgaccggcagaaaagatggcgggagcagcagctgtggagacggcggcggcggcggcagcggccaacggaaaagcgtgctgccacgccgccaaggggcccgggtacgccacgccgctggaggccatggagaagggccccagggagaagctcgtctacgtcacctgcgtctacaacggcactggaattaacaagccggattaccttgcgacggtggatttggatcccagctctcctacatactcccaggtgatccacaggctcccggtcacccacatcggcgacgagctgcatcactctggctggaactcctgcagctcctgccacggtgacccatcggccaagcgccgcttcctgatcctgccttccttgctgtcaggccgtgtgtatgtcgtcgacacagcgacagacccaagggcgccatccttgcataaggtggttgagtctgaggacattgctgagaatactgggcttgggttccctcacacgtctcattgccttgcgtctggcgacattatgatttcttgccttggggacaaggaggggaatgcagctggcaatggcttcctgctgttggattcagagtttaatgtcaaaggacgttgggaaaagccaggtcacagtcccttgtttggatatgacttctggtaccagcctcgccacaagacgatgatcagttcgtcatggggagcccctgcagcgttcaggacaggtttcgatcttcaacatgtccaggatggcctgtatggaaggcacctgcatgtgtacgactggcctggcggtgagctcaagcagacacttgatctaggtgacactggactccttccccttgaggtgaggtttttacatgatccatcaaaggacactggctatgttggctgtgctttaacaagcaacatggtgagatttttcaagaccgcggatggatcgtggagccatgaggttgctatctctgtgaaaccactgaaggtccgcaactggattctgccggaaatgccaggattgataactgatttcgtcatctctcttgatgaccgttatctctactttgtaaattggcttcatggcgatattaggcagtacaacattgaggatcccgcaaagcctttcttggctggacaagtatgggttggtggtcttcttcagaagggcagtgatgtcgtctatgttactgatgatggtcaggaacagcagtacaatgtgcctcaagtcaagggtcatcgacttagaggtgggccacagatgattcagctgagcttggatggcaagaggatatacgtgacaaactcacttttcagccgatgggatgagcagtttttcggtgatgatcttgtcaagaagggctcccacatgttgcagatcgatgtcgacaccgagaaaggaggcctggctgtcaaccccaacttcttcgtcgattttggcaccgagcctgatggtcctgccctggcccacgagatgagatatcctggtggggactgcacctctgatatatggatctgaggtcaaggattcggcgtaattaacaggctgctggagaatccctgttgttgtatgcactgtaattaacatggtatccgtgcggtgttctgtcttgtactgcgactgttgccagtggaataaggcatggtttcatgagaactctagattaataaaagaagtcctgattctaaaaaaaaaaaaaaaaaaaaaaaaaaaaaaaaaaaaaaaaaaaaactcgagactagttctctctctctcctcgtgcggggggggggggggggggggggggggggggggggggggggggggggggggggggggggggctcgcggggggg

SEQ ID NO: 2964 - DNA, 261 bp, Zea mays
  Clone ID: PAT_MRT4577_96581C.1
gtcacactgcacgttttggacactgaactgtgagatggcatcagcaaagcgttcccgtgaggaaaatgtgtacatggcgaagctcgcccagcaagcagagaggtacaaagaaatggttgagttcatggacaaggtagcgaaaactgttgactcggatgagctcactgtggaggagcgcagcctcctgtctgttacatacaagaacgtcattggagcccgccgtgcctcatggcgcatcatctcctccatcgagcagaagga

SEQ ID NO: 2965 - DNA, 615 bp, Zea mays
  unsure (1)..(615): unsure at all n locations
  Clone ID: PAT_MRT4577_96713C.1
tcgcccttnnaggcgtggtcgcgtgcgcgagggtctnnttggtgcactttattgggcaccaaaacatcaggnngcacaacaactacaacnnaacttgtgctnnagcaaaccttgctnngcctactctnncagcaacagcagnntttcttccatttcaacnccaactaggttcatnntgaactctgcnnttcttatttgcaacagacaacagagctaccattcaagccanngctaccnnngctgcctacnnccccagcaatnnttcttccattttcaaccaacnntagcagcattgaaccctctcctgctnntatttacagcagcaacccaactactacnncattcagccanngctagctggtggtgagggccctgctaccttnncttgacacaaccacnnagttgttgccgttctaaccagcacgttgncgcctaacgctggcacccntcttacaactgcaacaattgctgccattcaaccaacttgctttgacaaacccagcagtgttctaccaacaacccatcattggtggtgccctcttttagatttcttatgagttatagttcaataataaagttttttatctgatgtttgtggcttcccagaataagaaa

SEQ ID NO: 2966 - DNA, 304 bp, Zea mays
  Clone ID: PAT_MRT4577_9673C.1
ggcgaggcaaaagcgcaaacgcgaccacagacagagcgcgcttcaaggccttttttttttgagataacaaagaggagaagaggagatggcggtcacgatcaccttgggtaaggcgaggcagatcttccgcagccgcggcaaccccaccgtccaagttgacgtggggcccaaggacggcagctacgccaaggggggcgtacccaacggggcatccactgggatatatgagggcttggagttgaaggattgaagatctggataacctggcaaaggtggtcctaaagcctgcaacaacggtaaccac

SEQ ID NO: 2967 - DNA, 2646 bp, Zea mays
  unsure (1)..(2646): unsure at all n locations
  Clone ID: PAT_MRT4577_96895C.1
ggaatggcctctctcgcatactctcttctttcttcttctatctcagccgccgatctctcccgccctaccccgctacccgacggcgtcgttgacaccatagccacacgacaccagctgggtcaaggggtccaagcctgcgctgcgcggccaagcttttgcccagaccatcattgctcctctcatctttagttggggaagtgggaaagcggcaattatccggccgggacccgcctactccgtcttcttatacgagacgccgtgcgcttcttcttggcctagcccttcgagcaggccggctggaggccggggtttcgtcctcctcttcgcattagcgcggccagagagagatgcgggtgggagttgggatacctcggaggcggcgacgacaggatcgcagtggtcagtagccgggtcggccggtggccgcagattctcaccagcagcgccatccctcgccgtcgcccggcgctccagcccagggcaggagaggaggccactctgactgtcactctgagcttcgcgtcacctgagtactgacggacgacatgggagaagttgaggacatgtacacccaagacgggaccgtggacatgaaagggaatcccgccgtgaagaagggcaccggcaactggcgcgcctgcccctacatcctcgcgaacgagtgctgcgagaggctggcttactatggcatgagcaccaacctggtgaactacatgaagacccgacttggccaggtgaactccgttgcctccaacaacgtcaccaactggcaagggacgtgctacatcacgccgctcatcggcgccttcttcgccgacgcgtacatggggaggttctggaccatcgccatcttcatgatcatctacattttcggcctggcgctgctgacgatggcttcgtcggtgaaggggctggtgcctacgtcgtgcggcgacaaggatgtgtgccacccgacggacgcgcaggcggcggtggtgttcgtggcgctgtacctcatcgcgctgggcacgggcgggatcaagccgtgcgtgtcctccttcggcgccgaccagttcgacgagaacgacgagcgggagaagaagagcaagagctccttcttcaactggttctacttctccatcaacatcggcgcgctggtggcgtccacagtgctggtgtacgtgcagacgcacgtgggctggggctggggcttcggcatccccgccgtggtcatggccatcgccgtcggcagcttcttcgtgggcacgccgctgtacaggcaccagaagcccgggggcagcccgctgacgcgcatcgcgcaggtgctcgtcgcgtgcgcgcgcaagtggaacgtggccgtgcccgcggacaagtcgcggctgcacgagacggtggacggggagtccggcatcgaggggagccgcaagctggagcactcggagcagctggcgtgcctcgacagggctgccgtggtgacggccgaggacggcgcggaggcgagcccgtggcgcctgtgctcggtgacgcaggtggaggagctcaagagcgtgatccggctgctgcccatctgggccagcgggatcgtgttcgcggcggtgtactcgcagatgagcaccatgttcgtgctgcagggtaacacgctggaccagagcatggggccccggttcaagatcccctcggcgacgctgtccatggtggacaccatcagcgtcatcgtctgggtccccgtgtacgaccgcgccatcgtgcccctggtgcgctcctacaccgggaggccgcgcgggttcacgcagctgcagcgcatgggcatcggcctcgtcgtctccatcttctccatggtggcggcgggcgtgctggacatcgtgcggctgcgcgccatcgcgcggcacggcctgtacggcgaggacgacatcgtgcccatctccatcttctggcagataccgcagtacttcatcatcgggtgcgcggaggtgttcaccttcgtggggcagctggagttcttctacgaccaggcgcccgacgccatgaggagcatgtgctccgcgctgtcgctcaccaccgtcgcgctcggcaactacctcagcacggtcctggtgaccatcgtcacccacatcaccaccaggcacggccgcatcgggtggatcccggagaacctcaaccgcggccacctcgactacttcttctggctgctcgccgtgctcagccttctcaacttccttgcctacctcgtcatcgccagctggtacaagtacaagaagacggccgatgattaccctggcgccaaaggggagcacggtacagagcactgatgggcgagaatggcggaaattgagtgatttctatgtgtggttagctgtctgtcgacttgttttgccacagtttgggtgcttaaacgttaacgtacgtactagttcaatatagtgtctcgggggcgaattggttgtttacatgtcatgtgtttatatatgcgcaatgttcgatcttagtggaataagtcaagtgctcttatgaatcaaaaggtgttgaggatttgatgcgtcaaaaaaaacgatgtctcggggggcgaattggttgtttacatgtcatgtgttgttatatatgcgcaatgttcgatcttagtggaataagtcaagcgctcttaaaaaaaaaaaaaaaaaagaaaaaccn

SEQ ID NO: 2968 - DNA, 940 bp, Zea mays
  Clone ID: PAT_MRT4577_96897C.1
aaaagtggcaatcattgggaccctcgaggccggccgggacggacccatcaaaagaggccccttcatctttggtggcctagctggattggatatttggacgagtgttcttcttggcttggccacccgcctactccgtcttcttcatacgagacaagccgtgcgcttcttcttggcctagcccttcgagcagggcaggagaggaggccactctgactgtcactctgagcttcgcgtcacctgagtactgacggacgacatgggagaagttgaggacatgtacacccaagacgggaccgtggacatgaaagggaatcccgccgtgaagaagggcaccggcaactggcgcgcctgcccctacatcctcgcgaacgagtgctgcgagaggctggcttactatggcatgagcaccaacctggtgaactacatgaagacccgacttggccaggtgaactccgttgcctccaacaacgtcaccaactggcaagggacgtgctacatcacgccgctcatcggcgccttcttcgccgacgcgtacatggggaggttctggaccatcgccatcttcatgatcatctacattttcggcctggcgctgctgacgatggcttcgtcggtgaaggggctggtgcctacgtcgtgcggcgacaaggatgtgtgccacccgacggacgcgcaggcggcggtggtgttcgtggcgctgtacctcatcgcgctgggcacgggcgggatcaagccgtgcgtgtcctccttcggcgccgaccagttcgacgagaacgacgagcgggagaagaagagcaagagctccttcttcaactggttctacttctccatcaacatcggcgcgctggtggcgtccacagtgctggtgtacgtgcagacgcacgtggggctgggggctggggcttcggcatccccgccgtggtcatggccatcgccgtcg

SEQ ID NO: 2969 - DNA, 2207 bp, Zea mays
  Clone ID: PAT_MRT4577_96902C.1
tgggagttgggatacctcggaggcggcgacgacaggatcgcagtggtcagtagccgggtcggccggtggccgcagattctcaccagcagcgccatccctcgccgtcgcccggcgctccagcccagtctactactcatgcaagaagaatcgttcacaccctgaagaacaagaatcggtgtgtatttgcagggcaggagaggaagccactctgactctgtcactctgagcttcgcgtcacctgagtactgacggacgacatgggagaagttgaggacatgtacacccaagacgggaccgtggacatgaaagggaatcccgccgtgaagaagggcaccggcaactggcgcgcctgcccctacatcctcgcgaacgagtgctgcgagaggctggcctactatggcatgagcaccaacctggtgaactacatgaagacccggcttggccaggtgaactctgtcgcctccaacaacgtcaccaactggcaagggacgtgctacatcacgccgctcatcggcgccttcttcgccgacgcgtacatggggaggttttggaccatcgccatcttcatgatcatctacatttttggcctggcgctgctgacgatggcgtcatcggtgaaggggctggtgcctacgtcgtgcggcgacaaggacgtgtgccacccgacggacgcgcaggcggcggtggtgttcgtggcgctgtacctcatcgcgctgggcacgggcgggatcaagccgtgcgtgtcctccttcggcgccgaccagttcgacgagaacgacgagcgggagaagaagagcaagagctccttcttcaactggttctacttctccatcaacatcggcgcgctggtggcgtccacggtgctggtgtacgtgcagacgcacgtgggctggggctggggcttcggcatccccgccgtggtcatggccatcgccgtcggcagcttcttcgtgggcacgccgctgtacaggcaccagaagcccgggggcagcccgctgacgcgcatcgcgcaggtgctcgtcgcgtgcgcgcgcaagtggaacgtggccgtgcccgcggacaagtcgcggctgcacgagacggtggacggggagtccggcatcgaggggagccgcaagctggagcactcggagcagctggcgtgcctcgacagggcggccgtggtgacggccgaggacggcgcggaggcgagcccgtggcgcctgtgctcggtgacgcaggtggaggagctcaagagcgtgatccggctgctgcccatctgggccagcgggatcgtgttcgcggcggtgtactcgcagatgagcaccatgttcgtgctgcagggcaacacgctggaccagagcatggggccccggttcaagatcccctcggcgacgctgtccatggtggacactatcagcgtcatcgtctgggtccccgtgtacgaccgcgcccatcgtgcccctggtgccctcttacaccgggaggccgcgcgggttcacgcagctgcagcgcatgggcatcggcctcgtcgtctccatcttctccatggtggcggcgggcgtgctggacatcgtgcggctgcgcgccatcgcgcggcacggcctgtacggcgagaacgacatcgtgcccatctccatcttctggcagataccgcagtacttcatcatcggatgcgcggaggtgttcaccttcgtggggcagctggagttcttctacgaccaggcgcccgacgccatgaggagcatgtgctccgcgctgtcgctcaccaccgtcgcgctcggcaactacctcagcacggtcctggtgaccatcgtcacccacatcaccaccaggcacggccgcatcgggtggatcccggagaacctcaaccgcggccacctcgactacttcttctggctgctcgccgtgctcagcctcctcaacttccttgcctacctcgtcatcgccagctggtacaagtacaagaagacggccgatgattaccctggcgccaaaggggagcacggtacagagcactgatgggcgagagatggcggaaattgagtgatttctatgtgtggttagctgtctgtcgacttgttttgccacagtttgggtgcttaaacgttaacgtacgtactagttcaatatagtgtctcgggggcgaattggttgtttacatgtcatgtgtttatatatgcgcaatgttcgatctcagtggaataagtcaagtgctcttatgaaaa

SEQ ID NO: 2970 - DNA, 298 bp, Zea mays
  unsure (1)..(298): unsure at all n locations
  Clone ID: PAT_MRT4577_9696C.1
tccactcntccgcccacgcgtccgtggacgcgtgtgcgatcggaaccctctccatggccgacgaggcgaaggcgaanggttacgcggcgttctctgccggccgcttcgaggaggctgtgcnctgtacttcactgacgccatcgggcttgtccgagacaaccaggtggtctactccaaccggtcggtggcgctcgcactgctccaccggtactccgatgctctgagcgacgcgcagaatgacgctgcgacctcatgcccgactgggccaagggctactcccgcctcggcgcggcgcacc

SEQ ID NO: 2971 - DNA, 1856 bp, Zea mays
  Clone ID: PAT_MRT4577_97035C.1
cacaggcacactcatggtgaactctgccatcccagaaaaattcctcccaccgcgacggcgacgagcacggggaccctccaccgcctccgcctccgcctccgcctcgccgcgtgcggcctccgcaccgccccgacgtcgacccctccgccctccccctcggccaccgacgcggcgccgcccgccctccgccgccgccgccgccgcggcgggctcggtctcctctggaagctcccctacggccgcgcgccgtcccgcccgatggacgcgctgccgcctctgcagcgcgccacgtcgccgccgccccagccccggccccagccgcccgtgccgtccaggaggtacggcgtgcacttctcggcgtccagcttcatccaggcgccgctcaccacgctgctcgagtactccggcatcctccgccccgatccaggcggcggaacccagcaggatggggccggggctgggccgggcgaggtgtcgatccggattgtggcgcccggcgaggcggggacgtcgtctgagaggcccgaggaggtgatcgtggaggaggaggaagaggatggacacgcaacgagaacgcgcccggaggacccgtcacctgcggctggtggcggggagggcggcagggaatcctcctcatcgtaccagcggtacgacatacagcaggtggccaggtgggtggagcagatactgccattctcactgttgctgctcgtcgtcttcatccgacaacatttgcaaggtttctttgtgacaatttggattgctgcggtgatgttcaagtccaatgatatcctgcgtaagcagactgctctgaagagggagagaaaaattccagttcttgtcgggattacaatattatttgttgttcatgtatctgggttttattggtgttacaagaacggggatcttataagacctctcatgatgcttcctccaaaagaaataccaccattttggcacgcaatattcatcatcttggtgaacgatacaatggtgcgccaaactgctatggttgtcaaatgtttactgctgatgtactataagaacagcagagggcgtagctatcgtaggcagggtcaaatgttgacgattgtggaatattttctacttttgtatcgtgcattattgcctacacctgtgtggtaccgttttttcctgaacaaggagtatggaagcctattttcgtctctaaccactggcttgtatctcactttcaagttgacatcagtcgtggaaaaggttcaatcatttttgacggcattgagagcgttatctcataaagacttccattgtggctcatatgcaacaagcgagcaggtggctgctgctggagatttgtgcgcgatatgccaagagaagatgcacgttcccatccttttgcgctgcaaacatgtcttctgtgaagattgtgtgtccgaatggttcgagagggagcggacttgcccgctgtgcagggcactggtgaagccagcagacctccggtcgttcggtgacggttcaacaagcctcttcttccagctattctaatctgagagagccaaaagagctgggcaagctggggcgctccacccgatgtgcagatgttaggtgtgtgtgtgtgtgtgtgttgctgctggcaacgcgtgcgagcagtgcggccctgatgcggtgctgggagagtgtacaccgagctgaagctgaaggcgtacatggttgtgtattgtgattgtgcatattttcatcccatgtataggcactcgcgggatgcttgagcacctgaggatttttacctgaccttatacgcacaaactactacgtaaatagaaatggtgagtatatacaatggttccggatgcgtcgataaaaaaaaacgttaa

SEQ ID NO: 2972 - DNA, 1257 bp, Zea mays
  Clone ID: PAT_MRT4577_97181C.1
gccgggacacagcatccgcagttccccgacccaccgttcctccgagcccaggagcagccccgcgccaggaggaagtttgttcttttaacaatatgtcgagggaggagaatgtttacatggccaagttggctgagcaggctgaaaggtatgaggagatggttgagtatatggagaaggtggctaagactgtagatgtggaagagctcactgttgaggagcgtaaccttctgtctgttgcatacaagaatgtgattggggctcgccgcgcttcatggcgcattgtttcttccattgaacaaaaggaggagtcccgtaagaacgaagagcacgtgaaccttatcaaggaatatcgtggcaagatcgaggctgaactgggcaatatctgtgatggaatcttgaagctgcttgactcccacctagtgccttcttctactgctgctgaatcaaaggtcttctacctcaagatgaagggtgactatcacaggtatcttgcggaatttaagactggtcctgagaggaaggaatctgctgagagcacgatgatggcctacaaggctgctcaggacattgcgctggctgagctggcacctacccatccgataaggcttgggcttgctcttaacttctcagtgttctattatgagattctgaactccccagacaaagcttgcaaccttgcaaagcaggcgtttgatgaagctatctcccagttagacacccttggggaggagtcatacaaagatagcactctgatcatgcagctccttagggacaacttgaccctttggacctctgacctcacggaggatggtgctgatgagggcaaagaagccccgaaaggtgaggctggtgacggacagtaatcttgggagagcgcatattgttcgagcccattgttttagatgctctatgctgtcgaagctgaagctgtgccgtgctattattgtagctgatttcctgttccctcacttctttttttatattagtaggctggtagtgttcgaattagttccccattgctttgtgttgccgctagttggcattaagtccgtgtggactggtattattcactggatttgagaagcatgtcagtggttgctctagcgttttattgagttttgaagtcatctccctcatttcggtttcaatcatttagcagattgtgcatatggttgtgtaaaacacagttttgcacaattgcacaatttacgtagtgtggtttgaaataagagtgagatttgggctggatgaaaaaaa

SEQ ID NO: 2973 - DNA, 1380 bp, Zea mays
  Clone ID: PAT_MRT4577_97182C.1
cattgggtacctcgaggccggccgggccgggaccacagcatccgcagttccccgaccacaccgttcctccgaggtccgagcccaggagcagccccgcgccaggaggaagtttgttcttttaacaatatgtcgagggaggagaatgtttacatggccaagttggctgagcaggctgaaaggtatgaggagatggttgagtatatggagaaggtggctaagactgtagatgtggaagagctcactgttgaggagcgtaaccttctgtctgttgcatacaagaatgtgattggggctcgccgcgcttcatggcgcattgtttcttccattgaacaaaaggaggagtcccgtaagaacgaagagcatgtgaaccttatcaaggaatatcgtggcaagatcgaggctgaactgagcaattcaggctcgagggagaacactatctgtgatggaatcttgaagctgcttgactcccacctagtgccttcttctactgctgctgaatcaaaggtcttctacctcaagatgaagggtgactatcacaggtatcttgcggaatttaagactggtgctgagaggaaggaatctgctgagagcacaatggtggcctataaggctgctcaggacattgctctggctgagctggcacctacccatccgataaggctgggacttgctcttaatttttcagtgttctattatgagattctgaactccccagacaaagcttgcaacctggcaaagcaggcgtttgatgaagctatctctgagttagacagccttggtgaggagtcatacaaggatagcactctgatcatgcaactcctgagggataacttgaccctttggacatccgacctcacggaggatggtgctgatgagggcaaagatgccccgaaaggtgatgcaggcgagggacagtaatcttcggaggggggtgcaaagttgttcgagccccaatgttttagatgctctgtgctgtcgaagctgtgctgtgccattattgtagctgatttcgtctccattcacttcttttttcttgttagtaggctggtagtggtcgaattagtaccccattgctttgtgttgccgctagtccatgtggactggtattgttcccctggatttatttggcaagcgtgtccgtgctcgctctagcgttttattgagcttttaaagtcatcgcattcttatttgattgcaatcagttattggctggatatgcggtggctgtttggatcagaagtagcgcttgggctctgcagccggagtttcttcaccggagcgtgtaacaatgtggaaattggaaaccacgcaaacgtctcttatttgtacccctgagtatacagggcttgtttggttcggttttttttaacagcttttctg

SEQ ID NO: 2974 - DNA, 1630 bp, Zea mays
  Clone ID: PAT_MRT4577_97187C.1
ctcgaggccggccgggaaatttctgtccttcctgatctagttgcgtgtttgttctacgggagatgcggagtgctgcgacgccttatttatttattttcggttggtgttctgcgatgtggcgagatccgctttgtgctcggtgcctttgttcgagctagatccgccagatccgaggcttcgagcgaacgtgacgcctagatccgcctgatttgggaataatttggtgcgaggaccggctgttgatgagcttttgggtttacgttccccttttggggttaggaaccgtatctgttacgggcttggagcggggacacggatggttgaatgtggaatttgttgagtgaagtagtgtcggcatgaggtggatatttgatttgtatgtacaagtgccttcacggctagtatattaaagtaagtttgttcttttatcgatatggcgagggaggagaatgtctacatggccaagctggctgagcaggccgaaaggtatgaagagatggttgagtatatggagaaggtggctaagactgtagatgtggaagagctcactgttgaggagcgtaacctcttgtcggtcgcatacaagaatgtgattggggctcgccgtgcttcatggcgcattgtctcttctattgaacagaaggaggagtcccgtaagaacgaagagcatgtgaaccttatcaaggaataccgtgcgaagatcgaggctgaactgagcaatatctgtgatggcatcctgaagctgcttgactcccacctagtgccttcttctactgctgctgaatcaaaggtcttctacctcaagatgaagggtgactatcacaggtatcttgcggaatttaagactggtcctgagaggaaggaatctgctgagagcacgatgatggcctacaaggctgctcaggacattgcgctggctgagctggcacctacccatccgataaggcttgggcttgctcttaacttctcagtgttctattatgagattctgaactccccagacaaagcttgcaaccttgcaaagcaggcgtttgatgaagctatctcccagttagacacccttggggaggagtcatacaaagatagcactctgatcatgcagctcctgagggacaacttgaccctttggacctctgacctcacggaggatggtgctgatgagggcaaagaagccccgaaaggtgaggctggtgacggacagtaagggacagtaatcttgggagagcgcatattgttcgagcccattgttttagatgctctatgctgtcgaagctgaagctgtgccgtgctattattgtagctgatttcctgttccctcactttttttttatattagtaggctggtagtgttcgaattagttccccattgctttgtgttgccgctagctgtcactaagtccgtgtggactggtattattcactggatttgagaagcatgtcagtggttgctctagcgttttattgagttttgaagtcatctccctcattttcgtttcaatcatttagcagattgtgcatatggttgtgtaaaacacagttttgcacaattgcacaatttacatagtgtgatttgaaataagagtgagatattgctttgggcaaaaaaaaaaaaaaaaaaaaaaaaaaaaaa

SEQ ID NO: 2975 - DNA, 1195 bp, Zea mays
  Clone ID: PAT_MRT4577_97190C.1
ggccggccgggaaaaaaaaaaaaaaaaaaaaaaaaaaaaaaaaggcccaccgctagcatccgcagttcccccgcgcccgagacgcaaccccgcgccaggagtaagtttgttcttttatcgatattatcgatatggcgagggaggagaatgtctacatggccaagctggctgagcaggccgaaaggtatgaagagatggttgagtatatggagaaggtggctaagactgtagatgtggaagagctcactgttgaggagcgtaacctcttgtcggtcgcatacaagaatgtgattggggctcgccgtgcttcatggcgcattgtctcttctattgaacagaaggaggagtcccgtaagaacgaagagcatgtgaaccttatcaaggaataccgtgcgaagatcgaggctgaactgagcaatatctgtgatggcatcctgaagctgcttgactcccacctagtgccttcttctactgctgctgaatcaaaggtcttctacctcaagatgaagggtgactatcacaggtatcttgcggaatttaagactggtcctgagaggaaggaatctgctgagagcacgatgatggcctacaaggctgctcaggacattgcgctggctgagctggcacctacccatccgataaggcttgggcttgctcttaacttctcagtgttctattatgagattctgaactccccagacaaagcttgcaaccttgcaaagcaggcgtttgatgaagctatctcccagttagacacccttggggaggagtcatacaaagatagcactctgatcatgcagctccttagggacaacttgaccctttggacctctgacctcacggaggatggtgctgatgagggcaaagaagccccgaaaggtgaggctggtgacgtacagaaaggcacagtaatcttgggagagcgcatattgttcgagcccattgttttagatgctctatgctgtcgaagctgaagctgtgccgtgctattattgtagctgatttcctgttccctcacttctttttttatattagtaggctggtagtgttcgaattagttccccattgctttgtgttgccgctagttggcattaagtccgtgtggactggtattattcactggatttgagaagcatgtcagtggttgctctagcgttttattgagttttgaagtcatctccctcatttcggtttc

SEQ ID NO: 2976 - DNA, 269 bp, Zea mays
  Clone ID: PAT_MRT4577_97200C.1
gttgacttctcctccccctccggttcgggttcgggttcacgaggttctcctaatttgggctgggtgcataagcggatcgagatggccacttaccatgtttagtaccgctgcttcatccgcggcctctcctgggccacggacgaccactccctccacaacgccttcaacacctacggcgaggtcctcgagtccaatatcatccttgatcaggagacccatacttccctcgacttcagcttcgacaccttctacactgaggactcgatgcg

SEQ ID NO: 2977 - DNA, 328 bp, Zea mays
  Clone ID: PAT_MRT4577_97404C.1
aaaccaccaagatttcctgttccattaaaattagtttaggcaaacgacattaccacgagggcagaccaccccttgtcagaatttagagggggggaagaaaaaaaccgttcttttttggttttggggctcccaccacaaaaacacctgagtgggttttgggcaaacaccaccatacattttttgggaccggacaaacattgtaacaaaagggagaagggagctagtattgctccacaagaaaacatccccatccttttccttttttagtagggctccactggggccctgaactttgctccggggtaaaccgcgggataaccgagctttt

SEQ ID NO: 2978 - DNA, 1556 bp, Zea mays
  Clone ID: PAT_MRT4577_97516C.1
cggccgcgtggggcgaaaaaaaaaaaaaacgaagcgaaagcgaggctgctgtctcacggctgcggctgcggctgcggcggttcgggctcctcctccagactccagggatggccgccggtgcgggaggcggcgaactggaggcgctggagggcgtgcgctccatcgtgctcaagccgtcggagtcgctcgacgagtcgcggttcacgaggatcgccggcgccgacttcaacgacccggccgtcggactcgaggggctgctcgcctcgctcgcgtccaccgggttccaggcatccaacctcggcgacgccatcgacgtcgtcaaccagatgttagactggaggttgtcgcatgagaagcccagcgaggattgtgatgaagctgaacttgaccctaaatatagagcatctgtgaagtgcaagatatttctgggcttcacctcgaacctcgtgtcttctggcatccgggatataatccgttttctagctcagcatcacatggtggatgttattgttacaagtgctgggggtatagaggaggatctcattaaatgccttgcaccaacttacagaggcgatttttctttacctggagcactgctgcggtcaaaaggactgaaccggataggaaatctgttggtgcccaatgacaactattgcaagtttgagaactggatcatgccactcttcgaccagatgctacaggagcaatctactgagaatgtttggacaccgtcgaaggtgatagcgcgccttggcaaagaaataaatgatgaaagctcctatctttattgggcatacaagaataacatccctgtatactgcccagcattgactgatggatcacttggagacatgctgttctgtcatgcagttcgtaatcctggccttattattgacattgtacaagatatacggctgatgaatggggaagccatccatgcaacaccaaggaagacagggattatagttcttggtggaggccttccaaagcatcatatatgcaatgccaatatgttccgcaatggtgcagattatgctgtctatattaacacggctcaagagtttgatggtagcgattctggagcacaccccgatgaagcagtctcatggggcaagatcaagggttcagcaaaacctgtaaaggtgcattgcgatgcaagtatcgctttcccgcttcttgttgcagcaacatttgcacgtaaggttcataactccaaatgaacagactgaatgggattcagtggagtgaatgggcaacagaattttgttgaactctccaaatgacctttttggagcacgaggtctacttcacctgcacagggatcatgtgcaagttttttcggtgactcgcggcaaccacatgccatcattatttcgatgttcacttgatgctgtactagctggttgatagcatttttgttacaactgataatttattgaaatacagacatacgattgttcatccgagtcgtctgcttacgaattttttgtagaccgaaacatctgcttacgaaattgacaaatggcctgttttatgaacacattttttttcacctg

SEQ ID NO: 2979 - DNA, 362 bp, Zea mays
  Clone ID: PAT_MRT4577_97632C.1
ataataaagtcctgacggggtgtaacagcacccaacgatccgcattccaagctggttgatgcatgggtctgctggagccgaggctgaacacagccactaacaacctgagcacaggagtcgacgcttcaatgcaaaaacacaggggggcaacaacaaacacgagaccgaacgaagaaaacactctggactagggtaaacaacacggccccgaacaggataactaggccgcgcgggccccaccgcccagttccggcaaaaaccgcaggagctggcgtagccgccggcacggttgccaccgtcgtagccggcgccaccaacaccgtatccgtcgccggcagcaccggagccggcgccaccggcgt

SEQ ID NO: 2980 - DNA, 315 bp, Zea mays
  Clone ID: PAT_MRT4577_97676C.1
cttgggttttttttttagaaatggactttattatttctgggaagccacaaacatcagacaaaaaactttattattgaactataactcataagaaatctaaaagagggcaccaccaatgatgggttgttggtaaaaccctgctgggtttgttaaaacaagttggttgaatggcagcaattggtgcagttgtaagaaggtgccaacgttaagcccaccgtgcaagtaaaacggcaataaactgtgttgtgtcaaaaaagcaacagggctcacaccaacttactggctgaatggtaaaatatgttgcctgctgtaata

SEQ ID NO: 2981 - DNA, 473 bp, Zea mays
  Clone ID: PAT_MRT4577_97760C.1
atattattcgataccactagcaacatagaaagcacaatactgtacctacagtggcagctaaaaacttcgcctccttatgctccttggcctttctgcaagtgctgctacggcgaccattttcccacaatgctcacaagctcctatagcttcccttattcccccgtacctctcaccaacggtgctcttcggtatgtagaaaacccaattcttcaaccctacaggatccaacaggcaatcccagctggcatcttacctttatcacccttgtgactccaacaagtcatcagcgcctattacagcaggtacctttggtgcctttattggcacaaaacattaatgcacaacaactacaacaacctgtgctagaaaccttggtggctactcttagcaacaagaagttttttcatataaccaactaactggattcaactccgcttcttatttggaagaacaacaactaccattcagccagc

SEQ ID NO: 2982 - DNA, 1875 bp, Zea mays
  Clone ID: PAT_MRT4577_97786C.1
ccccttctttcttttttgttgcgatcgttatcgcggtaggtttattatttccatgtctttgacttgctctctccgtattattaggagtaactgcaatgctcaagctcaacaccagggacaccgtgtcaattgtgggacacgattgctggtaaatacattctctacagttgttacgcggtactgcactacactctgcgtcgcggccgggcgggtagcagcgaaattcatccaaaagaaactcctgataaatataaaaaggagggaaaaagaaaaacacttgcagcggcatccaccaccggagctcccatcatcggtctatccctccgtgtcaaccccctcctcagaagttctaattgcagttcagcccctggccggtccgccgggccaccggaaggagccgctcgccggaggaagccccccatctccttgccctgcggcgggtttatggggttctcgctgtaccccatgaagacgtccacgcggttgctctggagcactagcttcttccgccataagctcagctcctcctcctgcttcctctgagcccgccccacccgcgtcgatcacctcggcggcggcccgctgttgctgcgcggtcctagcacccgttcgagtgtgtgtgtttgtgttctttgagtttcaagattgggttttgttgcgttcttggggagacgaagggactaaggcgcagtgagcggacaagaatcagcatggatccgagcgcggtcagtttcgactctggcggcgcgcggcggggcggcggcgcgcagatgctgctcttcggcggcggaggcagcgccaacagcaacggcttcttccgaggtgttccgatggcggtcctgggcatggacgacgcgacgcgcgtgggcaagcggcccttcttcacgacacacgaggagctcctagaggaggagtactacgacgagcaggcgccggagaagaagcgccgactgacggcggagcaggtgcagctgctggagcggagcttcgaagaagagaacaagctggagccggagcgcaagaccgagctggctcgccgcctggggatggcgccccgccaggtagctgtttggttccagaaccgccgcgcgcgctggaagaccaagcaactcgagaccgactatgaccgcctcaaggctgcttacgacgcactcgccgccgaccaccagggcctcctggccgacaacgataacctccgggcacaggtgatctccctgacggagaagctgcaaggcaaggagacatccccgtcggcaaccactgctgcccaagaggtcgaccagccagacgaacacaccgctgtgtcaggcacggaagaactgctggcgcagcagctcaaggacaacctccacagcagcggcgactgcactggccatggcaccctctcttcggaagaagacgacggtggcgtggtcagtgacgagggctgcagcttcgctctcccggatgccatgttcgctgccgggttcacccaccatggcgccgaggaggtgcagctggccaactggacatccatgttctggaactgatcagcggatggatgcatccaagtgcaaagatcggatcctctcctcgtctcgacccttttctgcagcatataattaccgtgttaattatgtgccgtccgatgtttttaagtgctcatgttttaagtttgtgtttttttgaagattttgtatgttcatatatataataatgtgcttcgaacatgacactcgaaaagttgaataattggacatgtcgacctgctgtgcactagcagctggcatgttttgtttaaaaaaaaaaaaaaaaaaaaaaaagggctggtttgggaagttcatttttcaaagaattcatatttttcaaagggaaatgaactaattttacttaggg

SEQ ID NO: 2983 - DNA, 1970 bp, Zea mays
  Clone ID: PAT_MRT4577_97787C.1
ggattgccgggtggtgtaaggggaagaaactaaagcacgaggagttttttttttttttttttccatgtctttgacttgctctctccgtattattaggagtaactgcaatgctcaagctcaacatcagggacaccgtgtcaattgtgggacacgattgttggtaaatacactctctacagttattacgcggtactgcactacactctgggtatccactcgtgcccctgtatgaagctggcgacgctgtacgcgtcgacgtggaccttgggaacctggctgctccacgccaccctctggcccgcggcccggccggggccggtagccacaaatttcacccaaaaccaaaaaaaatcccaaattaaagaaaacgaggagaagaaaaacaactttcatcgccgtccgccaccggagctcccttcgtcggccttccttcagtgtcaacccccttctcaaaacttgtatttgcacctcagtccctgccggtctgcccggtcgccgcctcgccggaggaagcccctcgtctccttgccctgcggcgggttcatggggttctcgctgtaccccatgaagacgtccacgcggatgctctggagcactagcttcttccgccataagctcagctcctcctcctgcttcctctgaggacgccccacccgcctcgatcgcttcggcggcgggccgctgctgctgcgctgtcctagcatccgttcaagtgtgggtttgcgttcttgggtttcaagattggcttttgttgcgttcttggcgagacgaagggactagggcgcggacaaagaatcagcatgcatccgagcgcggtcagtttcgactccggcgacgggcgggcggcgcggtggcgcgcagatgctgctcttcggcggcggaggcagcgccaacagcaacggcttcttccgaggtgttccgatggcagtcctggccatggacgacgcgacgcgcgtgggcaagcggcccttcttcacgacacacgacgagctcctggaggaggagtactacgacgagcaggcgccggagaagaagcgccgtctgacggcggagcaggtgcagctgctggagcggagcttcgaggaagagaacaagctggagcctgagcgcaagaccgagctggctcgccgcctggggatggcgccccgccaggtggccgtgtggttccagaaccgccgcgcgcgttggaagacaaagcagctcgagaccgactatgaccgcctcaaggctgcctacaacgcgctcgccgctgaccaccagggcctcctggccgacaacgatagcctccgggcacaggtgatctgcctaacagagaagctgcaaggcaaggagacatccctgtcggcaaccatcgctgcccaagaggtcgaccagccaaacgaacacaccacaggcactgagaaattgctggcgcagcagctcaaggacgacctgcacagcagctgcggttgcactggacatggtgccctgtcttcggaggaagaggatggtggcgtggtcagcgatgagggctgcaactttgatctccccgacgccatgtttgctgttggggtcaccaaccatggtgctgaggaggcgcagctggccaactggacatcttggttctggaactgatcggttgatggatggatgcatcaagtgcaaagagcaaatcctctcctggtttcgactcttttctgcaacatataattactgtgttgattatgtgccgtcagatgttttcaagtaatgaaacagaactgatgttgtaagtttatgtttctgaagatttgtatgttcatatatataataatatgctttgaacatgagactccaaaagttgaaataagtggatgtggagacctgttgtgcactagcagccagcatgcgtttttatgctgctttagacatgaaaatgtatatccaacacaggcctgtgaataagatgatgaaagtatatccaatcgctgcacttcatttggttgtgtgcc

SEQ ID NO: 2984 - DNA, 380 bp, Zea mays
  Clone ID: PAT_MRT4577_97851C.1
cggctcgagggtgggttggcttctcctcccgctagggttctagttcgggggtggtgaggatctcccgcgttcgggttcatgggtgagcagatcgagatggcggcgtctgatgttgagtaccgctgcttcatccgcgggctctcctgggccacagacgaccactccctccacaacgccttcagcacctacggcgaggtcctcgcagtccaagatcatcctcgatcgggagacgcagaggtcccgcggctttagctttcgcaccttgttcacggaggaagcgatgcccaacgccatcgagggcatgaacggcaaggagctggacggtcgcaacatcacctgtaacaaagcccaatcccgcggctgccgtagaagctgcggcg

SEQ ID NO: 2985 - DNA, 537 bp, Zea mays
  Clone ID: PAT_MRT4577_9787C.1
ctcggcccccccccccccccccccccccccccccccccccccccccccccccccccccccccccccaaaaaaaaaggaatttaattcccatggcaacaaaaaacctaccctggggacaacacaaaaccaaaacccagggccccagaacaacataaccttttttaactcaactaaaaaatgaacccagtacaacataacctttttaactcaactaaaaaataaccccatttgcaaagaaaaaggctctttttttggaaaggccaaaaaaacagttttaaacccctacttttttggaaatgcaggggggttggtttatcccatcctggaaccaaggcgctcgtttttaaactaactcattcagaaaatagtctaccttggcaatgttgacactgggcatcaccacaacgggagcaatattcctttaaaaagccagttgccaccttggaaaaaatttttaatcctttggcctttaaacacaaccgggctactgagctcgttaagcatcgttccaattcctgcttccttgaggcaattttt

SEQ ID NO: 2986 - DNA, 161 bp, Zea mays
  Clone ID: PAT_MRT4577_97913C.1
ctatagtgagtcgtattaaacagagcggcgtggggctcaggagggtccgccgtgagtacaaggcaaaaaagatgtcggaggaggactacgtcagtgccatcatggaggcggtcaacagggtcgtgaagctccaacaagagcgtgggattgaagtgcttgtc

SEQ ID NO: 2987 - DNA, 751 bp, Zea mays
  Clone ID: PAT_MRT4577_97919C.1
tggttcgccgcccgatccagcgatggattcagcctccagagttgccccgccgccggtcagcgctggtgtccgcgtccgcgcgccgctggtagagtccgtctcctgttactgcagattagatacaggccttaaaactgtcgtggatgctagaaaattgcttctggagcaaagatgtgcatgcaacctgatgtcaaacaaaccaagcgcaagtcaaggggctcgcggaaggagaggtgccgagctcaagcaccacttttgcctggccttcctgatgatcttgcaattgcctgtcttatacgggttccacgagtggaacaccccaatctccggacagtttgtaaaagatggaaccgccttttgtcaggaaattactattattccttgcgcaagaaactcagcatggcagaagaatgggtttatgtctttaaaagggatcgtgaggggaaaatatcctggcatgccttcgatccactgaaccagctctggaagtcccttccacctgttccaccagagtattcagaagcgttgggttttggctgtgctgttctgagtggttgctatctgtacttatttggcggtaaggatcctttgaggggctctatgagacgtgttgtattttacaatgcccggaccaacaaatggcatcgagctccagatatgttacgaaagcgacacttttttggttcctgtgttataaaaaaatggctatatgttgctggaggagagtgtggaagcatacaaaggactcctt

SEQ ID NO: 2988 - DNA, 219 bp, Zea mays
  Clone ID: PAT_MRT4577_97947C.1
cgtgcgctggctctgcatatcccgcgcccgactcccggtgctgcgtgcggaaggccgactagtcgcgccgtgctgtgcttggcttgattgaacccgccgggatgggggtgttggaagacctcctcgcgatagcgggttttttgcgcggacatagacagctgcttctccacacaactagaggcgctcggggccgacatcaacgacccgatctggagcgcc

SEQ ID NO: 2989 - DNA, 419 bp, Zea mays
  Clone ID: PAT_MRT4577_97997C.1
gtagtatgtccaacactctatagtgagtcgtattatgctaacgcgcatgcctggcatctcgtcgcggcaacaatcactcttctcctgtcccagctagccgggcgtttgttcgcattcactcttccactaccgcttaccgccaatctgctccacagtagccatccgcctctctccattcatcgacccacacttccaacccgccatggaggaccacgaattcgtcaattatctactggaggtggaacaccctatcagcggtcggaaaggtgtcccccacgttcttatttcaggggcgggcttgggaggcctcttcctggccatcctcctagaggaggccgggatctcctacactatcttcgagcggtccagggacatcaggcccataggggctataatggcgttgtcggccaacatcttac

SEQ ID NO: 2990 - DNA, 372 bp, Zea mays
  Clone ID: PAT_MRT4577_98095C.1
gggggggccacacataacaccggtgttacttattattgaacacaattatacacgcatgcagagaaaacgaagcgagtacaggaacacgccttttttgacgtagccggccccacgcccaccaccttttatccctcagtctcactcaccacaagcaacagcagctaccaaggtccggagagggactcattattgggaaccatcaaattacacacgcatgcagtacagaattaaacaggtgtgtggtttgtgtgcgccggagctagctctagctcggtcgcgcgccggccggtactacggtcagccgaagaggtggtggtgcttcttctcgccgctggcctccttggcgtacttggggtccttcttcttctcggg

SEQ ID NO: 2991 - DNA, 691 bp, Zea mays
  unsure (1)..(691): unsure at all n locations
  Clone ID: PAT_MRT4577_98097C.1
cagccaactggtagccaagtggagtgtagtatagcaaccagctgaccagagcagcatcagcagccatgtcggaggagaagcaccaccacttcttccaccaccacaagaaggacggcgaggagcagcccaccggcgagtacgggtactccgagacggtggccgccgaggtggtgaccaccggcgaggacgagtacgagaagtacaagaaggaggagaaggagcacaagcacaagcagcacctcggcgaggccggcgccatcgccgccggcgccttcgcactttacgagaagcacgaggcgaagaaggaccccgagcacgcgcacaggcacaagatcacggaggaggtcgcggcggcggcggcggtgggcgccggcggctacgccttccacgagcaccacgagaagaagaaggaccacaaggacgccgacgaggccagcggcgagaagaagcaccaccacctcttcggctgaccgtaccgtaccgtaccgtaccggccggcgatgatggagctccggcctccggcgcaccacgtaccacctgttgaattctgtactgcatgcgtgttaatttgacggttcacagtaaataagtcccttttccggaccttgctaataagctgtgttgcttgtgtttgtgtgagtgagactgagaagaggtggtggggtggggccggtcctgtgcgtngnggtgt

SEQ ID NO: 2992 - DNA, 950 bp, Zea mays
  Clone ID: PAT_MRT4577_98100C.1
cattgggtacctcgaggccgggccggcatcctactgtcacacacacacagagagagacaagtggtttccaaagccaagtgtgtactagcagtctagcaaccagctagctcgggcggcagcaggcagccatcatgtcggaggagaagcaccaccacttcttcaaccaccacaagaaggacgaggagcagcccgccggcgagtacgggtactccgagaccgaggtggtcaccgccaccggcgagggcgagtacgagaggtacaagaaggaggagaaggagcacaagcacaagcagcacctcggcgaggccggcgccatcgccgccggcgccttcgcactctacgagaagcacgaggcgaagaaggaccccgagcacgcgcacaggcacaagatcacggaggaggtcgctgccgcggcggccgtcggcgccggcggctacgtattccacgagcaccacgagaagaagaaggaccacaaggacgccgaggaggctagcggcgagaagaagcaccaccacctcttcggctgaccgtagtaccggccggcgcgcgaccgagctagctagctccggcgcacacaaccacacacctgtttaattctgtactgcatgcgtgtgtaatttgatggttcacaataatgagtccctctccggaccttggtagctgcttgcttgcttgtgagtgagagtgtgagactgagggagaagaggtggtgggcgtggggccggctacgtcgagagaggcgtgttcctgtactcgcttcgttttctctgcatgcgtgtataattgtgttcaataataagtgagagcggtgtgatgtgtggctccccttgtcaggctcatgtgtatccgtattgaatcctggcaccatgcatgactgaggatctggatgtctatgaagcaccgtgtatctatcatcacttttgtaaaaaaaaaaaaaaaaaaggccccta

SEQ ID NO: 2993 - DNA, 500 bp, Zea mays
  Clone ID: PAT_MRT4577_98174C.1
atgcaacatgccaaccggctttataattattacaaaaggggcaaacacctccaatcacacgtgaagggggggccgggggggagaaaaaaatcttattaaaagggagggggaaaatgaccaaattaaaaaataaggggacactttggcacggccactcattatatatccaacgacccgcgccggccggggggtttactcgctgcccggaccggagggagctttcgggaccccggggaaaaagaccctggggccgaacaattccttgccgaccttgggggggaatgggtcgtagcggaggaagagctccacgaggaggaccctgcccacgagcaccaaaaagttcttcccggggcactgtttgttggcaaccctggggttttcggtctcgggggcggtggaccaatacacgtactggagaagtttgctgccctcctcgccgaggaagcgggcgggcacaaaatccccgggggggtcgccgaacacccgggggtccttggggg

SEQ ID NO: 2994 - DNA, 683 bp, Zea mays
  unsure (1)..(683): unsure at all n locations
  Clone ID: PAT_MRT4577_98231C.1
tttttttnnnnnnnnnnnnnngaggggctggatcacgtttctagcccaacggcatgcgcgtcatcccaactggaacttgcgtgcgttgatctacatctcaggactttcatctggggttattggaagaaggaaacacacgtaaagagatacggatccgaggcaagaattcatcatcccaccaagtgtggcgattttttatggaggggaataataaccacaacaaactaaaacatgataaagagatgagcaaaaatccgacagacgcaatgagagcagccagtctgagcgagagaggacggaaggggttcaagcgccgaagccgtagagagtgcgaccttggcgtttgagggcgtaaaccacatccaaggaggtgacggtcttgcgcttggcgtgctcggtataagtgaccgagtctcgaataacgttttcgaggaagatcttaagaactccacgagtttcttcgtagatcaagccagagatacgcttgacgcctcctcgacgagcaagacgacggatggcaggcttggtgataccctggatgttgtctcgcaagatcttacgatgacgtttggcaccccctttaccaagacctttccctccgcttttccctcttccagacatggtggcgagatgttagggctgtgttaatagttgtttggtgaagctgtgtggctcgtgccgaa

SEQ ID NO: 2995 - DNA, 244 bp, Zea mays
  Clone ID: PAT_MRT4577_98283C.1
tctggtttctttgaggtcactcatgatgtctgtcaccttacatgtgctgattggctccgtgctcctggggtccagacacctgttattgtccgtttctctacagttgtgcatgagcgtggaagcccttggaccttgagggatccacgtggttttgctgtcaagttctacaccagagtgtggtactttgaccttcgtggtaacaacatgccctgggtttttcattactttatgggattaaatttcc

SEQ ID NO: 2996 - DNA, 1806 bp, Zea mays
  Clone ID: PAT_MRT4577_98362C.1
ttgtaccccgatgcttgaaacacccgccgcgggccgcgtcggcgtcggcatccgtcgccacaaaactctcctcgcaagcgtcgccgccccgcacagatcaaccgctcgaaatttgggggaagcaagcgagagcagcagtaagcctcatcgggaagtggagagatggaggcggcgggtcgcctcctcctcctcatcgtctcctccctcctcctgctcttctcgccggagcggccggcggaggccgcgccgccgcgaatccagccgctcgccaccgccgcgctgagccgcctctacgacacctccaactacggcaggctgcagctcaacaacggcctcgcgctcactccgcagatggggtggaacagctggaatttcttcgcctgcaacatcaacgagacggtcatccgcgagacagctgatgcgctggtgtccacgggactggctgcgctgggctacaacttcgtaaatatcgatgattgctggtcatacgtgaaacgaggaaagcaggatcaattgctgcctgatccaaagactttcccttcaggcgtcaaagcacttgcagattatgtgcatggaaaaggtctgaaacttggtatatactctgatgctgggaaatttacttgccaagttcgacctggatcactcggtcatgaaaatgacgatgctgcgatctttgcttcatggggtattgattacctgaagtatgataactgctacaatttgggaataaagcctcagaaaagatatcctcctatgcgagatgctcttaattcaactgggcgccaaatattctactctttgtgtgaatggggccagtatgatccagccttatgggctggcaaagtgggcaatagttggcgtacaactgacgacataacggatacatggaaaagcatgacagacattgctgacaagaacaacaagtgggcatcatatgctggacctggtggttggaatgacccagatatgctggaagtaggcaatggtggcatgaccttagcagagtatcgctcacattttagcatatgggctctcatgaaggcccctctattaattggctgtgatgtcagaaacatgacttctgaaacaatggaaatactgagcaacaaagaagtaattcaagtaaaccaagatcctcttggagttcaaggaagaaaaattttaggacaaggaaaatatggatgccgtgaggtgtgggctggtcccttgtctgggaatcggcttgttgttgctctgtggaaccgttgttcagatactgctaacgttacaatgaaactgccagcagtaggccttgatgggtatgctgcctattctgttagggatctgtggaagcatgaaactctatcggaaaatgtcgtaggaacttttggcgctcaagttgacgtgcatgacaccaagatgtacatcttttctcctgcaaccattgtcgcttcggtttgatcaggaccggtggatccaagatgacagcaccgctattattcaaggatatgtcacgacaacaagggccttcgtttttcctgctgcattctgttccacccgagtgcagaagtccacttcgtgcagaactgtctcagtgatgtttgtatttctcacggaatagctctatttatctcaagattgagcaagctcgaggcttactcggtgtaccggcgttgtatccttggggcatccaagatcttgtacgatttgaaacagtctgaaccaatgatgtaaaacaagatagtgaaaatacaacttcacaaattgcagccgtacaagcagcacttgtacaaggactccgtaccgaggaaaaaacttacgacgcgt

SEQ ID NO: 2997 - DNA, 2108 bp, Zea mays
  Clone ID: PAT_MRT4577_98428C.1
tgggtacctcgaggccggccgggacgcccactccgaaatttcccccacggagctcaactgccggtgccggcgcgcgacaggcggcacacacgcccctcggctcctcgcgtatggcgaccacgttgacgcccacgcagcgctatgcggcggggacgctcctggcgctggcgctccgccaggcgcagatccaccagtccgagcccctcggctccggccccgacgacgaggagcgcgccagcagcgccagcgggagctcctcctccaccatatccagcagcggctccgacactacctcgggcgccggactctggacgcacgattcccgcggcctcctccgccccgccttcaggttcctggagatcgagcccaaggtatgggcggtgatggaggacacggccgtgcgccggctcactcccccgacgctcgcgtcgcgcgaagacgaccaacgtgccgaaacaatcaaccagcaacactcttctcgtataacataatacagcgaaggtaactcacatggcaacttccatgggttgtctcgtcttgctctgccttgtttcttctctccttcccagtgccgtccttggccacccatggggtggcttgttcccacagttctatgaccattcgtgccccaaggcgaaggagattgtgcagtccattgtggcacaggctgtgcgccccgggccggccgggatccacaagaggagaagaaacaatcaaccagcaacactcttctcttataacatagtacagcgaaggtaactcacatggcaacttccatgggttgtctcgtcttgctctgccttgtttcttctctccttcccagtgccgtccttggccacccatggggtggcttgttcccacagttctatgaccattcgtgccccaaggcgaaggagattgtgcagtccattgtggcacaggctgtggccaaggagaccaggatggcggcatctttagtcagactgcatttccatgactgctttgtcaagggctgcgatgcttcggtgctgttggacaacagcagcagcatagttagtgagaaagggtccaacccgaacaggaactccctcagggggtttgaggtgatcgaccagattaaggctgctcttgaggctgcctgcccaggcacagtctcctgtgccgacattgttgcccttgcggctcgtgattccaccgccctggttggtggaccatactgggacgtgccacttggccggagagactcgctcggtgcaagcatccagggctccaacaatgacatcccagcccccaacaacacactccccactatcatcaccaagttcaagcgccagggcctcaatgttgttgatgttgtcgccctctcaggtggtcacaccattggtatgtctcggtgcactagtttccggcagaggctatacaaccagacaggcaatggcatggctgacagcacactggatgtatcctacgccgcaaagctgaggcagggatgcccccgctctggtggtgacaacaacctcttccccttggacttcatcacccctgccaagtttgacaatttttactacaagaacctcctggccggcaagggccttctaagctctgatgagattctgttaaccaagagcgctgagacagcggccctcgtgaaggcatatgctgctgatgtcaatctcttcttccagcactttgcacagtctatggtgaatatgggaaacatctcgccactgacagggtcacaaggtgagatcaggaagaactgcaggaggctcaacaatgaccactgagggcactgaagtcgcttgatgtgctgaattgtttgtgatgttggtggcgtattttgtttaaataagtaagcatggctgtgattttatcatatgatcgatctttggggttttatttaacacattgtaaaatgtgtatctattaataactcaatgtataagatgtgttcattcttcggttgccaaaaaaaaaaaaaaaaaaacggccaaaaaataaaaaaaaacgaaaaatagcggctgatgggaaatatcttgtggcttttagccgaaaccatcaagatttgattgtataccgtccaatctggttcacatattcatgcaatgaagaatgtgaaactcatgagc

SEQ ID NO: 2998 - DNA, 2149 bp, Zea mays
  Clone ID: PAT_MRT4577_98430C.1
cattgggtacctcgaggccggccgggaatccaagaggagaagaaacaatcaaccagcaacactcttctcttataacatagtacagcgaaggtaactcacatggcaacttccatgggttgtctcgtcttgctctgccttgtttcttctctccttcccagtgccgtccttggccacccatggggtggcttgttcccacagttctatgaccattcgtgccccaaggcgaaggagattgtgcagtccattgtggcacaggctgtggccaaggagaccaggatggcggcatctttagtcagactgcatttccatgactgctttgtcaaggttcaattctgcttcctctgttatgttctttatattacatgctctgacaaagctataaagcttgatactgcagtataatataacaagttagctacacaagttttgtacttcaagtcttttaactatatgttggtgcaataagattatgagtaatccatatgaaggtgttgcaagagaacatgaaaggcaaagataaacggatgaacccattactagctttggctgtatcagaccaataacttgaaatgcacttgtgctagcatgcctaagtattagaaaaggtagcatgggagaatctatattattttggctaacttctttagttactattgattgatgagaaagcctaccattgcccatgccagccctaatgtcccggtgacatgattgagccagtactatgattaatttactctattgttctccttttttgagtgctgtataagatgtcctttttttgagccactcgagaagatgtttacttaactctagtgcgcaatgattggagctctcagtgcaacgcatgtgctctgtaatctactgtcaccactactctgtagtgtgtgcttaaactctaaactattccacgtggctagtaattaccaatcatttacaacactgttacatgtgtagggctgcgatgcttcggtgctgttggacaacagcagcagcatagttagtgagaaagggtccaacccgaacaggaactccctcagggggtttgaggtgatcgaccagattaaggctgctcttgaggctgcctgcccaggcacagtctcctgtgccgacattgttgcccttgcggctcgtgattccaccgccctggtatgttccactatcgacaatcctttccaacctcaaggaacagacatgatatttgtgtgtgtgtgtgtgtgtatatatatatatagtgatagctttggcaaacttagatattttctgagctctaaaccgtaggttggtggaccatactgggacgtgccacttggccggagagactcgctcggtgcaagcatccagggctccaacaatgacatcccagcccccaacaacacactccccactatcatcaccaagttcaagcgccagggcctcaatgggggtgatgttgccgccctctcaggggatttttcttgtatttattaggaacatctggccttcgttattcaccaacttagcgcacactcatattacgcatggatacaatatcatgtgtgaataccggtggccacaccattggtatgtctcggtgcactagtttccggcagaggctatacaaccagacagcaatggcatggctgacagcacactggatgtatcctacgccgcgaagctgaggcagggctgcccccgctctggcgccgacagcaccctcttccccctggacgtcgtcgccccagccaagttcgacaacttctactacaagaacctcctggccggcaggggccttctcagctccgacgaggttctgttgaccaagagcgcccagacggcgtccctcgtcaaggcgtatgccgccgacgccggtctcttcttccgccactttgcgcagtccatggtcagtatgggcaacatctcgccgctcactgggtcacaaggtgagatcaggaagaactgcaggaggctcaacagcggccactgaggtcggtcgctttatgtgcgtggtgctgctggtggcgtgttttgtttgaataagaaagcatggctgtggttttatcagatgctctggttttttttttgtgtgtgtgtgtgtgttttatttaaacacattgtaaaatgtgtgtctattaattaataactcagtatatgagatgagttcattcgt

SEQ ID NO: 2999 - DNA, 3878 bp, Zea mays
  Clone ID: PAT_MRT4577_98473C.1
aaacctgctcgctgtgtcttctgtcttctccacttcgccctgcgtacgctccccagtctcactctctctccccctctacctcgttcgtggcgacgacagggcgaccgccgctgccaccgccgcctctccactgtgggcctggtgctttgcccggccgttcgccggcgacgggcactcaccaccaggtgacaaaggaaaaggaagaggggcagcaaatcggtgcgctgctgttcatcaaatgctggggaggaaatcaacagatcaggggcctggtgaaatgctgcgcagcgagggtgactgactggcaactccgcccgccgacgcccgtttcgtgcttactggcatgctcgcagcataaaggaatcttctcggaattagccccccttcctgtggtcgtgacggccccaagtttcaagacatggaccatgtgccggctctagttcttgccgggtgctgcttcctggccctgctgcctggctgggcctgtggccttggctccatgtcgtccattgcggtgtcctatggggaggatggtccggtgttctgtggcctcaactccgacggctcccacctcgtcgcctgcttcggtgctgatgcatctgtcctgtacggcgcaccacccaacatccctttccttggcctcacggcaggggatgggttcgtgtgtggcctcctgctcgacaccaggcagccatactgctggggtagcaactcctatgtcaagagcggggtgccacagccgatggttgagggcgcaaggtactctgagctcagtgcgggggacaaccacctctgcgcactgagagctgctcaagatgggggtcgtggttccagtgctgctacatcgctgattgactgctggggatacaatatgaccgccacacatgctgttgatgaagccgtgtcgactgtttcagctggttcggtgttcaattgtggcttgtttgctcggaacaggacggtgttctgctggggcgacgagacggtgagtggtgtcgttgggctggcaccgagggatctgcactttcagtctataggcgcgggcggttaccatgtctgtggggtgttggagaatgcacaggtgttctgctggggcaggagcttggagatgcagcaggtggtgccatccagtgctatcggtgatggtgatgtgaacatagtgccgatggatgcaatgagcactgtggttggcgggcggttccatgcttgtggcatcaggagccttgaccaccaagtggcttgctggggcttcactcttcataacagtacatcgccaccaaaagggctgaagatgtatgctcttgtggctggggattacttcacttgtggagtgcctgctgagacttcgctgatgccgaggtgctggggcaacagtgggccattggcattacccatggccgtacctcctgggatttgtgtacctactgcatgcagccatgggtactatgaatatgtgaaccatggtgaagttggcagcatcaaggtgtgtaagcctgcaaactctagactctgcttgccctgtagtacaggttgcccggaaggcttgtatgagtcatctccttgcaatgcaacagctgaccgtgtttgccagtttgattgcttgaagtgtgtcacagatgagtgcctgtcattctgcttatcacagaagcggaccaagagccgcaagttgatggcttttcagatgcgcatctttgttgcagagattgtctttgctgtcgtcttggtactcagcgtgtcagtaaccacttgcctgtatgtccggcacaagcttcgacattgccaatgctcaaatagagagctgagactggctaagagcacagcatactctttccggaaggataacatgaagatccagcctgatatggaggacttgaagatcaggagagctcaggaattctcctatgaagagttagagcaagcaaccggtggcttctcagaggattcacaagtcggcaaaggcagcttctcatgtgtattcaagggcatactgagagatgggacagtggttgctgtgaagcgtgcaataaaagcatcagatgtgaagaagagctcaaaggagtttcacaacgaacttgacctcctatccaggctcaaccatgcacatttgctgaatttgcttggttactgcgaggatggcagtgagaggctcttggtttatgagttcatggctcatggatccctgtaccagcatctgcatggcaaggatccaaacttgaaaaagcgactaaactgggcaaggcgggtcaccattgctgtacaggctgctaggggaattgagtacttgcatggctatgcttgccctcctgtaattcaccgggacatcaagtcgtcaaacatattgattgatgaggatcacaatgcccgtgttgctgactttggtctgtctatattgggtcctgcagatagcggtaccccactgtctgagctgccagcagggactcttggctaccttgaccctgagtactaccgtctccactacttgactacaaaatctgatgtctacagcttcggggttgttctcctggagatactaagcggcaggaaagcgatcgacatgcagttcgaggaggggaacattgttgaatgggcagtacctctgatcaaagcaggggacatttttgccatccttgatccagtcttatctcctccctcagaccttgaggccctcaagaagattgcttccgtggcatgtaagtgtgtcagaatgcgaggtaaagatcggccttccatggataaggtgacgacagctctagagcacgcccttgcactgctgatgggcagcccctgcatcgagcagcccattctaccgaccgaggttgttctcggaagcagccgcatgcacaaggtgtcacagatgtcctctaaccactcttgctcagagaacgagcttgctgacggggaggaccaggggatcgggtacagggcaccttcctggataacttttcctagcgtgacctcatcacagaggaggaaatcatctgcatccgaagctgacatcgttggtcgaagggccacagacggcaggaacgtcgggagcagcataggtgacggactgcggtcactggaggaagaaatcgctccggcttcaccacaagagaacctgtacttgcagcacaacttctgaagaaattcaggagatgcagaaacctgagcagcgactttctgccattgttgagcagtattttaagttcggcctttcatgccctgttgaagtgttcatacgttctatataatagcagcctaaaaacagggagctaattagtactggaagaattctttttagcgtccagaagcattcatctgtagattcgtatggtcccttttattttcctggtacaatttatcttctggtggctgcagttgatggattatcgtgtatccttagcttgcaaaactgggtagtttccttaatccttcagatcatctctctggctcccgatgctgtttctgcatcctaaatggcagtagctttgggaaccaactgcatgtctgggtcgggtcaccatgttcagcattctttcgcttgtatccttgtggaaggtttcttcagttgcttgatttgtgattcgcagcaacaggctgtctgcccattcttctcttcagagacaggtgagatgtggttctcagaggtctacctcagcaatggctgctgtcatgttccatgatcctgtttagggtgctgttttgaacacaatgaaaggcaggttgttgctaaccatttaatgtttcttggacctagctaacttgccattatgtctgatgcctgatgccaatgcttcttccagaagtcatcttagtttgtaaggccgtacgcactgaatgaattttattgcttctgggacagaaaagattcaataatgtctcaggctttcatcttt

SEQ ID NO: 3000 - DNA, 384 bp, Zea mays
  Clone ID: PAT_MRT4577_98547C.1
gcgcgcttgctcatccatcaacccttagctctatcacagcagttacctttgctccagcgggttgcacaaaacattagggcgcagcaactacaacaacttgtactaacaaaccttgctgcatactcttagcaacatcaattagttccattcaaccaactggctgcattgaactctgctgcttattcgcagcaccaattaccattcatacagatagttgatgcctaccaccagcaatttcttacattcaaccaactatcagcattcaactctgctgcttatttacagcagcaacaactactaccattcagtcagctagctaatgtgaaccctgatgccttcttgacacaacaacatttgttacagttctacctgcacgctatgcct

SEQ ID NO: 3001 - DNA, 356 bp, Zea mays
  Clone ID: PAT_MRT4577_98621C.1
aggggttgaaaaaattttttccttctatgggaggggacaagaatacaaatccaggacataaacgttattgctttaatgaattagggatccattacattgggaaatacataccaaaacaaactttgaaaagcttccaaaaccaaaaaaaaggatctccttttgggggaccgcattaaggattttgcaaacacaaatgctttaactatgcatgcctactgatcgtcaaaaaagtgaaagtatagttatatgcaaagtgagagagcgacagggaaccctttcaaggaggatgtgcccgcccccctatggatgcgagtatatacaaccactggaacgggggaattaaccaagttaagcaa

SEQ ID NO: 3002 - DNA, 146 bp, Zea mays
  Clone ID: PAT_MRT4577_98685C.1
caggataataaagatgtgaggcatgtcaagacttatgaactcgcactgaaggacaaagattttatcgaagggccttggtctcagaataatgtagacaatggtgctggtttgtcgatacctgtaccagctccacttggcggtgtgat

SEQ ID NO: 3003 - DNA, 247 bp, Zea mays
  Clone ID: PAT_MRT4577_98731C.1
ctagcaacatagaaagcacaatagtgtaccaacaatggcagccaaaatattttgccttcttatgctccttggtctttctgcaagtgctgctacggcgaccattttcccacaatgctcacaagcttctatagcttcccttcatcccgcgtacctatcaccagcggcgtgtgctgtctgtgaatactcaatactctaaccctatacgatccatcacgcactcgcaactggcatcatacctctatgatcc

SEQ ID NO: 3004 - DNA, 1787 bp, Zea mays
  Clone ID: PAT_MRT4577_98913C.1
tttgccgtactcaagccatgctgctccaatacccttggcagaggtgaagtgagactgcggatgggccctctcggcccaaacgccgacacggcattggcgcgttgaccgcacgacctgccgattccttcgagcgatatagggcgcccccgtccacaccacccctcgtctccgccctagcgccactgagccactcaacgtcgagatcgagacgacccgagtccgccgcgcccgtgcaccaccgaccgtcgaactcccgaaagtaactctatttcttgatcaacatcaacatgtcgcgggaggataatgtttacatggccaagctggctgagcaagcagaacggtacgaggaaatggttgagtacatggagaaggtggctaagaccgtagatgtggaagagctcaccgttgaggagcggaacctcttatctgttgcctacaagaacgtaattggggcccgccgtgcctcatggcgcattatctcctccatcgagcataaggaggagtcccgtaagaatgaggaacatgttattcagatcaaggagtaccgtggcaagattgaggctgaattgagcaacatttgtgatggtatcctgaagttgatcgactctcaccttgtgccttcctccactgctgcagagtcgaaggtgttttacctcaagatgaagggagattatcacaggtaccttgctgagtttaagactggtgctgagaggaaggaagctgcagagagtacaatgatagcttataaggcagctcaggatattgcgttggcggaactggcatctactcatcccataagacttggacttgcacttaacttctcagttttctattacgagattctgaactctccagacaaagcttgcaaccttgccaggcaggcgtttgatgaggctatttctcagttggatacgcttggcgaggattcatacaaagatagcaccttgatcatgcagctcctgagggacaacctaaccctatggaccgctgacagcacaacggaggacggcatcgaggagggcaatgaggcctcgaagggtgatgctggtgagggtcagtagtctggtaaaacctcgattgatggttcggcatgtttttgaagtctactgtgttggaaaccatgttctaatagaaggcgtctcccgctccatgcattccaagattctgtcctccccctccctccccccatgttgtaggctggtagtggtcaaattagttggccctgggtccatttggactgatgtattgtttactgctattgaagtcattcgttctcgttttgctcttgcagtggatcgctatagccttgtgttttcaatcttttagggcctgtttgggaatgcagtttcaaaatactgtaattttgagataccatagtttataattgtacatgacataaatactacggtattgctttaccacaataaaactatagtattgctcaaaaaaaaaaaaaaaaaagcggccagcaacgtcgaaccggagcctagttgaccaaccaatcatatcctcgacgtgttgcaagttatcagctttggggaaacaatgccctgaataagtttgcttttttgagttggaagggtttcagtgtcctatattttctttgaaacttaatcttttagaaagatttattttcattattaaaaaaaaaaaaaaaaaaaaaaaaaaaaaaaaatccgaggggacgctgttgcggcaaaccacccctgtagatatctgtcacatgctgaagaaaactaccagcagccgtttagcctgaataattgttaaatgataggttaccgttg

SEQ ID NO: 3005 - DNA, 1504 bp, Zea mays
  Clone ID: PAT_MRT4577_98915C.1
ttgggtatcgcggggccggccggggactcctcgtccccgtgcacaccaccctcgtctccgcgcccgcgcccgcgccactcacatcgtgatcgagacgacccgcgtcctccgcggtccgcgcccgtgcaccatctcgcctcgcattcccgaaagtgttttttttttgttattgcagtatctgtattccttgatcaacatgtcgcgggaggagaatgtttatatggccaagctggctgagcaagcagaacggtacgaggaaatggttgaatacatggagaaggtggctaagaccacagatgtgcaagagctcactgttgaggagcgtaaccttctatctgttgccttcaagaatgtgattgcggccccccgtgcctcatggcgcattatctcctccatcgagcagaaagaggagtcccgtaagaatgaggaacatgttgcacagatcaaggaataccgtggcaagattgaggctgaattgagcaacatttgtgatggtatcctaaagctgcttgacacgcaccttgtgccttcctccactgccacagagtcgaaggtgttttacctcaagatgaagggtgattatcacaggtaccttgctgagtttaagactggtgctgagaggaaggaatctgcagagagcacaatggtagcttataaggcagctcaggatattgcattggctgaactgccacctattcatcccataaggcttggacttgcacttaacttctcagttttctattacgagattcagaactctccagacaaagcttgcaatcttgccaaggaggcgtttgatgaagctatttctcagttggacatgcttggtgaggattcctacaaagatagcaacttgattatgcagctcctgagggacaacttgaccctctggacggaggacggcattgaggagggcttagaatcctcgaagggcgatgctggtgagggtcagtagcctggtaaacttagattgatggttcgacgtgtttctcaagcacatcgtgttggacgcccagtgctgacagaaggcttttgctgctccatgcattccaagcttctgccctttcgttcgcaccctcttcatgttgttggctggtagtggtcagatttagtcccattggtttagttggccctgggtccatctgaactgatgtattgttactgctatggaagtcattcctttagttttgctctggcagtggattgctgttgggtcgtgttttcagtctttattggttccgatcggacgctgttgcggcaaaccacccctgtagatactcttcacatgctgaagaaaactaccagcagccgtttagcctgaataattgttaaatgataggttaccgttgaggctgattggtttttatttttttttaccctgtgacatcaagttcttgggtaactttttttaccgttgatgctcaaacaaattgttaagtgggagaattgtgaagtgggagtggtaatggatcatgatctaaatgattcttcacaattcattgaa

SEQ ID NO: 3006 - DNA, 536 bp, Zea mays
  Clone ID: PAT_MRT4577_99007C.1
ctacttgtttcattgattatagaaaagatcgatctttttttgcaccacaaggcctaggatggcttgcacctgctgatcaagttgttgctgctgctcaagctgcaagtgcggcaagaagcactccttacctgcaggagacgagtaccggcgtgcaagccaccgctgggctacaacctgccccggagaagaaagccgctcccgatttacacgaggacggggatgaatcccatgaggatgtacaccgcctgaagcctgaagcgtcaactgcaattgccacctctgcaattgctcttaacatcgatacacgaccatggatatgattattatgtatctagctcatgagcgccgttgaacaataactagcgaggccgagctacctgccatacatatacctcgcctggtgtgtgtagatacagagagaaacacaactctgcacatggctatcactctctccatgcttctgcctgagattttcaacttatacacctacctgtgtctacccggatgtccggtgatccaattgtatacgctggaac

SEQ ID NO: 3007 - DNA, 1720 bp, Zea mays
  Clone ID: PAT_MRT4577_99082C.1
cgtaccgcgcccggccgcggggcaggcgcagcagcagcagcgtcagcgcccgaggcgcgcacgagagaaacagaggctgacgaggtggggcccgtgcgggccttgaccaatcggagttcgacaacagcctggccacccacaaaccacactccttcgcctcgcgccggccgtcgtcgcctccctccaccgaacgatccctcctcctcctcctcctcctcctcgcatcccaccccaccccaccttctccttaaagctacctgcctacccggcggttgccgccgccgcaatcgatcgaccggaagagaaagagcagctagctagctagcagatcggagcacggcaacaaggcgatggggcgcggcaaggtacagctgaagcggatagagaacaagataaaccggcaggtgaccttctccaagcgccggaacggcctgctcaagaaggcgcacgagatctccgtcctctgcgatgccgaggtcgccgtcatcgtcttctcccccaagggcaagctctacgagtacgccaccgactcccgcatggacaaaattcttgaacgctatgagcgatattcctatgctgaaaaggctcttatttcagctgaatctgaaagtgagggaaattggtgccacgaatacaggaaactgaaggccaaaattgagaccatacaaaaatgccacaagcacctgatgggagaggatctagagtctttgaatcccaaagagctccagcaactagagcagcagctggagagctcactgaagcacatcagatcaaggaagagccaccttatggccgagtctatttctgagctacagaagaaggagaggtcactgcaggaggagaacaaggctctgcagaaggaacttgcggagaggcagaaggccgtcgcgagccggcagcagcagcagcagcagtgcagtgggaccagcagacacatgcccaggcccagacaagctcatcatcgtcctccttcatgatgaggcaggatcagcagggactgccgcctccacacaacatctgcttcccgccgttgacaatgggagatagaggtgaagagctggctgcggcggcggcggcgcagcagcagcagccactgccggggcaggcgcaaccgcagctccgcatcgcaggtctgccaccatggatgctgagccacctcaatgcataaggagagggtcgatgaacacatcgacctcctctctctctctctctcgtcatggatcatgacgtacgcgtaccatatggttgctgtgcctgcccccatcgatcgcgagcaatggcacgctcatgcaagtgatcattgctccccgttggttaaaccctagcctatgttcatggcgtcagcaactaagctaaactattgttatgtttgcaagaaagggtaaacccgctagctgtgtaatcttgtccagctatcatgtatgcttgttactgcccagttacccttgaatctagcggcgcttttggtgagagggtgcagtttactttaaacatggttcgtgacttgctgtaaatagtagtattaatcgatttgggcatctagtaactaaattaagggtgtgtttggtttggcttttgatttctaaaagacaaaagccaaactaaagagctggatccataaaatagcattttctaaaagtcagactttgtggcggtacaaaaaaaaaaaaaataataatattaataattataaaaaaaattatattaaataatatatatt

SEQ ID NO: 3008 - DNA, 735 bp, Zea mays
  unsure (1)..(735): unsure at all n locations
  Clone ID: PAT_MRT4577_99248C.1
atcccatcctcacagctagcatgcggacagacgaataatctcttcttcaccttactagctaacaccagctagcagctcgatcgctctgcgctgcaataatggccgctcgctcctcctcccagcatgctggacgcggcggcggtcctggcagcggcgctgctgctgctggcggcgggggccgggacggcgtacgcggcggtgagctgcgaccaggtgacatcgtacgtggcgccgggcctcgggcacgcgatgcgcagcgcggagtcgccctccgcggtgcgctgcagcgtggtgcgctcggtcaacagtcgagcgtcgtccgcggcggaccggcaggccacctgcaactgcctcaagagcatgacggaccgctncgccggctggggtcagcatggacaacgccgacaacatccccggtaagtgcggagtgtccgtcggcgtgcccatcagccacaccgccgactgcaccaagatcaactgatcgatggaaccatagagcatgtagctcgctcgttggatggcagcggacgtggccatcagccgtatgcagtcggcgtcgtagcagagatgtcctatctacgagcgactcatgcatcatactggcacatgatacataagtagatcatgcacccactagtgatcacttagcatagtgtccatccgttcaatgtcgaacgtcgtcggcgtgtaccttacgcgacatgctgcatgacgtacgctagcagatcagcacct

SEQ ID NO: 3009 - DNA, 482 bp, Zea mays
  unsure (1)..(482): unsure at all n locations
  Clone ID: PAT_MRT4577_99251C.1
ctcgaggccggccgggatcnctccctccagctagctagcgttcctagtcaccgacgaataatctcctcttcacctcactaacaccgagctagcagctcgctctgtcctgcaacaatggccgctcgctcctcctcccagcagctggccgcggcggcggtcctggcagcggcgctgctggtgctggcggcggcggccgccacgccgccggcggcggcgagctgcggcgaggtgacgacgtcggaggcgccgggcctcgcgtacgcgatggacagcgcggcgccgccctccgcggcgtgctgcagcggcgtgcgctcgctcaacagccgcgcgtcgccggcggcggaccgtttggtcatctgcacctgcctccagagcatgacgggccggctcggaggcggcgtcagcaatgaccaaagacggcaactaccccggcaagtgcggaggcccccttgccgcgaccataaacccaaacggccactgcc

SEQ ID NO: 3010 - DNA, 965 bp, Zea mays
  Clone ID: PAT_MRT4577_99256C.1
gcccggcggattcgccgtatcccatccatcacagctagctagcgttccctcttcttcacctcactaacaccagcagctcgatcgctctgtcctgcaataatggccgctcgctcctcctcccagcagctggtcgcggcggcggcggcggcggtcctggcagcggcgctgctgctgctggcggcgggggccgggacggcgtcggcggcggtgagctgcggcgaggtgacgtcgtcggtggcgccgtgcctcgggtacgcgatgggcagcgcggcgtcgccctccgcggcgtgctgcagcggggtgcgctcgctcaacagccgcgcgtcgtcgacggcggaccggcaggccacctgcaactgcctcaagagcatgacgggccggctcggcggcggcgtcagcatggccaacgccgccaacatccccggcaagtgcggcgtctccgtcggcgtgcccatcagccccaccgttgactgcaccaagatcaactgatcgatggaccgtagtggaggtagctatgcctctgcatgctcgttggatggcagcgtggccatcagcagcatgcggtcgtcgtcgtcgtcctagcagatgtcctagctacgtgtgtgtcctcagactggcactgtggcacataataaagaagtagatcatgcacccactagtcatcacttcgtctagtccctccgttcgctgtcgtcgtcgtcgtcgtcatcgtcgtcgtcgtgtacctcgtacgtgacatgccgtagcacgtacgctagcagagcagcacctcaatgtccttgggtttgctttgctggctctctgttttcgtcttgtgttgcttttaatctggcacaggtttctaaattataataatgaatactttttgttcattatatataaaaaaaaggcccctggccacatatacaaaccgccccaatattattcttacaacaaaaaaaaaaaaaaaggcccccaagggccct

SEQ ID NO: 3011 - DNA, 1117 bp, Zea mays
  Clone ID: PAT_MRT4577_99257C.1
aacattttccccccattattttcttacatgtttgtgggtttcgttctccattcgttacgatgaaatggtctgatgctaaatttgggagatggttcttgtgcacttagcgtggcttgttgcggacgggacacttttggtggtgtggaaccttaatccaactgggtcttgcaagctgtccatgtaatttctgcatatccctgtgatgaggattttagtaatctgagagtgctcacggtcacttggtgctccctcctcatcgctcacgatgggagaggttgaaggaaccaatgtctctgcactacattgctgagatgtggcattctgagggatatcacccatccatcacagctacatagcgttccttatctccgacgaataatctcttcttcacctcactaacaccgagctagcagctcgctctgtcctgcaacaatggccgctcgctcctcctcccagcagctggtcgcggcggcggtcctggcagcggcgctgctgctgctggcggcgggggccgggacggcgtcggcggcggtgagctgcggcgaggtgacgtcgtcggtggcgccgtgcctcgggtacgcgatgggcagcgcggcgtcgccctccgcggcgtgctgcagcggggtgcgctcgctcaacagccgcgcgtcgtcgacggcggaccggcaggccacctgcaactgcctcaagagcatgacgggccggctcggcggcggcgtcagcatggccaacgccgccaacatccccggcaagtgcggcgtctccgtcggcgtgcccatcagccccaccgtcgactgcaccaagatcaactgatcgttggatggcagcgtggccatcagcagcatgcagtcgtcgtcgtcgtcgtcgtagcagatgtcctagctacgtgtgcatgtcatcagactggcacatatataataaagaagtagatcatgcacccactagtgatcacttcgtctagtgtcccctgtcgtcgtcgtcgtcgtgtacctcgtacgtgacatgccgtagcacgtacgctagcagagcagcacctcaatgtccttgggtttgctttgctggctctctgttttcgtctctcgtgttgcttttaatctggcacaggtttctaaattat

SEQ ID NO: 3012 - DNA, 859 bp, Zea mays
  unsure (1)..(859): unsure at all n locations
  Clone ID: PAT_MRT4577_99258C.1
cgctttcgcagctagctagcgttccctcttcttcacctcactaacaccagcagctcgatcgctctgtcctgcaataatggccgctcgctcctcctcccagcagctggtcgcggcggcggcggcggcggtcctggcagcggcgctgctgctgctggcggcgggggccgggacggcgtcggcggcggtgagctgcggcgaggtgacgtcgtcggtggcgccgtgcctcgggtacgcgatgggcagcgcggcgtcgccctccgcggcgtgctgcagcggggtgcgctcgctcaacagccgcgcgtcgtcgacggcggaccggcaggccacctgcaactgcctcaagagcatgacgggccggntcggcggnggcgtcagcatggccaacgccgccaacatccccggcaagtgcggcgtctccgtcggcgtgcccatcatccccaccgttgactgcaccaagatcaactgatcgatgcaccgtagtggagggagctatgcctctgcatgctcgttggatggcagcggggccatcatcagcatgcggtcgtcgtcgtcgtactagcagatgtcctagctacgtgtgtgtcctcagactggcactgtggcacataataaagaactagatcatgcacccactagtcatcacttcgtctagtccctccgactcgctgtcgtcgtcgtcgccgtcatcgacgtctccgagtacctcctacgcgacatgccgcatcacgtacgctagcagagcagcacctcaatgtccttggccttgctttgctggctctctgttttctgcttgtagttgcttttaatctggcacaggtttctaaatcattgcaaaaaaaaaaaaaacatatggccccta

SEQ ID NO: 3013 - DNA, 939 bp, Zea mays
  Clone ID: PAT_MRT4577_99262C.1
ggaaaaaaaaaaagctccatatcccatccatcacagctagctagcgttcctaatcaccgacgaataatctcttcttcacctcactaacaccgagctagcagctcgctctgtcctgcaacaatggccgctcgctcctcctcccagcagctggtcgcggcggcggtcctggcagcggcgctgctgctgctggcggcgggggccgggacggcgtcggcggcggtgagctgcggcgaggtgacgtcgtcggtggcgccgtgcctcgggtacgcgatgggcagcgcggcgtcgccctccgcggcgtgctgcagcggggtgcgctcgctcaacagccgcgcgtcgtcggcggcggaccggcaggccacctgcaactgcctcaagagcatgacgggccggctcggcggcggcgtcagcatggccaacgccgccaacatccccggcaagtgcggcgtctccgtcggcgtgcccatcagccccaccgtcgactgcaccaagatcgactgatcgatggatccatagtggaggtagctcgctcgttggatggcagcgtacgtggccatcagcagcatgcagtcgtcgtcgtagcagagatgtcctagctacgtgtgtgtcatgcatcagactggcacataataaagaagtagatcatgcacccactagtgatcacttcgtctagtgtccctccgttcaatgtcgtcgtcgtcgtcgtgtaccttacgtgacatgctgtagcacgtacgctagcagagcagcacctcaatgtccttgggtttgctttgctggctctctgttttcgtcttgtgttgcttttaatctggcacaggtttctaaattataataatgaataattttaaaaaaaaaagtgttcattatatataccccgtacatatgtatgtatgattaagggggtgtttggtttgcccctgctaaaatttagcccct

SEQ ID NO: 3014 - DNA, 419 bp, Zea mays
  Clone ID: PAT_MRT4577_99318C.1
gggagcaccaaaaagcaccatttttttccttagggttaaacttaaaaaaaagccggggggggggaaaagcacccatcgatccgcagcccatgctgggtgatgcatgggtctgctggagccgggggtgaacacaggactaacaacgggcacagagggaccttaaatcaaaaacacagggggggaacaacaaacacgagacgaacgaagataaaccctcgggactaggggaaacaacacgggagcgaaaaggataacttgggcgggggggccccaccggtaaattcctccagttcccgggggagttgccgaaaccccccccacgggtgccaccgccgtagccggcgccaccaccaccggagccgccgccgccaccaccggagccgccgccaccggcgtagccgccgccgccataacggggc

SEQ ID NO: 3015 - DNA, 477 bp, Zea mays
  Clone ID: PAT_MRT4577_99484C.1
gccggggcagcatctcaagccccatcgaccttcaagcctgcgctacgaagcagagcaataaaaaaagcagccgcaatggcgagcatgaccatggccctctcctccacggccttcgccggcaaggccgcgaacgtgccgtcgtcgtccgccttcggggaggcccgcgcgacgatgcgcaagacggcggcgaaggccaagccagcggcggcctccgggagcccgtggtacgccccccaccgagtgctgtacctgggagcactggccggggagccaccgacctacctggcgtgcgagagcgcggagcgagtacgcagtaatcaccgcgggggttagagcgctattggtgccagaggcctcttttttctttctcggggcgatgcctattggctgcaccgcgacggtataggttggttgcatgcctgccacctgctgtaggctggcgcagggtgattggcagcccgtacatgcaggctgtga

SEQ ID NO: 3016 - DNA, 157 bp, Zea mays
  Clone ID: PAT_MRT4577_99523C.1
tacgcaagggtctccattttttattaaccgaccaacattctgggaactgggagggggaaactttatgttccaaaaggggctcgccatgagcatcaggtcttggcctggttgaaacgctttgtagccctgaacccatacctacctcagggaaggcata

SEQ ID NO: 3017 - DNA, 774 bp, Zea mays
  Clone ID: PAT_MRT4577_9957C.1
attgggaccctcgaggccggccggggcaaatatctgtcgccgtctcgccaacagcaccaaccgcgcctcctcgaattcgaccgtcatggcgagccaaggaaggggaagaaggattactctacggcgatcctggagaggaagaagtcgccgaaccggctggtggtcgacgaggccaccaatgatgacaactccgtcgtcgctctgcacccggacaccatggagaggctccagctcttccgcggtgacactgtcttgatcaagggtaagaagagaaaggacactgtctgcattgtgcttgcagatgagacatgtgaggagccaaaggtccggatgaacaagattgtcaggaagaacttgagggtacggcttggtgatgttgtatctgtccatcaatgcccagatgtcaaatacgggaagcgtgtgcacatacttccaattgatgacaccattgaaggcatcactggcaatttgtttgatgcctttctaaaaccatacttccttgaagcctatcgtcctttgaggaaaggagaccttttcctagtcaggggtggcatgagaagtgtagaattcaaagtcatagagactgatcctgcagagtattgtatcgttgcaccagatacagaaatattttgtgagggtgagcctattaagagggaggacgaggaaagactcgatgaggttggctatgacgatgttggtggagttagaaagcagatggcccaaatcagggaactggttgaacttccattgcgtcatcccagcttttcaagtcta

SEQ ID NO: 3018 - DNA, 600 bp, Zea mays
  unsure (1)..(600): unsure at all n locations
  Clone ID: PAT_MRT4577_99607C.1
gaatcccttaaaagagaaactgctccagnattccttacggagcatggagtgcggcgtccatctatacttggagttagagagcacatttttactggcagtgtatcctcccttgcatggttcatgtcaaatcaggagcacagttttgtgactattgggcagcgtctccttgcaaaccctctgaaggtccggttccactatgggcatcctgatgtatttgatagacttttccatctgacaacgggtggtgtcagtaaggcatcaaagagtatcaatttaagtgaagacatttttgcaggttataactcaactcttcgtggaggcaatgtaacacaccatgaatatgtacaagttggtaagggaagagacgtcggattaaatcagatctctaagtttgaggctaaaatagcaaatggaaatggtgaacagactcttagtcgtgatatctaccggcttggacaccgctttgattttttcaggatgctttcatgctacttcacaaccgtggggttttatttcagtacactgttgacggttgttacagtttatgtatttctgtatggacgcctttatcttgctctcagtggacttgaagaggggcta

SEQ ID NO: 3019 - DNA, 3129 bp, Zea mays
  Clone ID: PAT_MRT4577_9961C.1
cccactgacctcgaggccggccgggccgggatgacctcgagggcgggaaaaaaaaaaatgggactaggtttgctggccgggtcgaccctcgtcttcatcttcccacttcagcccccaaacccgaacactcgcaatcgcaagtcgcaaatatctgtcgccgtctcgccaacagcaccaaccgcctcctagaactcgaccgccatggcgagccaaggcgagccgtcttcctccgatccgaaggggaagaaggattactcgacggcgatcctggagaggaagaagtcgccgaaccggctggtggtcgacgaggccaccaatgatgacaactccgtcgtcgctctgcacccggacaccatggagaggctccagctcttccgcggtgacacggtcctgctcaagggtaagaagagaaaggacactatctgcattgtgctcgcagacgagacgtgtgaggagccaaaggtccggatgaacaaggtcgtcaggaagaacttgagggttcggcttagtgatgtggtatctgtccatcaatgcccagatgtcaaatacgggaagcgtgtgcacatacttccaattgatgacaccattgaaggcatcactggcaacttatttgatgcctttctgaaaccatactttcttgaagcctatcgtcctttgaggaaaggagaccttttcctagtcaggggtggcatgagaagtgtagaattcaaagtcatagagactgatcctgcagagtattgtattgttgcaccagatacagaaatattctgtgagggtgagcctattaagagggaggatgaggaaagactcgatgaagttggctatgatgatgttggtggagttagaaagcagatggcccaaatcagagaactggttgaacttcccctgcgtcatccccagcttttcaagtctattggtgtgaagccaccaaagggcatattgctgtatgggcctcctggctctggcaagacccttattgctagagctgtagctaatgagacaggtgctttcttctttttgatcaatggaccagaaatcatgtcaaagctagcaggagaaagtgaaagcaatctcagaaaggcatttgaagaagctgagaaaaatgcaccttcaatcatttttattgatgagatagattccatagcacctaagagagagaagacccatggagaagttgaaaggcgtattgtttcacagctcttgactcttatggatggcctcaagtctcgtgcacatgttattgttatgggtgccacaaaccgtccaaacagtatcgatcctgctcttagaaggtttggtcggtttgatcgtgagattgatatcggtgttccagatgaagttgggcgccttgaggttcttcggattcacacgaaaaacatgaagctggctgaagatgttgacttggagatcattgcgaaggatactcatggttatgttggtgctgatcttgctgccctttgtactgaagctgctcttcaatgcattcgtgagaagatggatattatagatcttgaggatgagacaatagatgctgagatactgaactctatggctgtctcaaatgatcatttcaagactgcacttgggacaagcaacccatctgctctgcgtgaaactgttgttgaagtgccaaatgtctcttgggaagatattggtggcctggaaaatgttaagagggagctacaggagactgttcaatatccagtggagcatccagagaaatttgaaaagtttggcatgtctccttcaaagggtgttttgttttatggccctcctggctgtggcaagactttgttggccaaggcaattgccaatgaatgccaagctaacttcattagtgtgaagggtcctgaactgcttaccatgtggtttggtgagagtgaggccaatgtccgtgagatttttgacaaggctaggcagtctgctccatgtgtcctcttttttgatgagctcgactccattgctactcagagaggaagcagtgttggtgacgccggtggtgctgctgatagggtgttgaaccagctgcttactgagatggatggcatgaatgccaagaagacggtttttattatcggtgcaactaacagaccggacatcattgacccagccttgctgaggcctgggcgtcttgatcagcttatctatattcctctgcccgatgagcagtccaggcttcagatcttcaaagcctgtctcaggaagtctcctgtggccaaggatgttgacttgaatgctctcgccaaatacacccagggtttcagcggtgcagatatcacagagatctgccagcgcgcgtgcaagtatgccatcagggagaacatcgagaaggatatcgagagggagaggcgcaggaaagacaaccccgaggctatggaggaagacgaggtagacgacatcgctgagatcaaggctgctcacttcgaggagtccatgaagtacgcccgtcgcagcgtgagtgacgccgacatccgcaagtaccaggccttcgcccagacactccagcagtcccgcgggtttggcagcgagttccggttccccgaccaaccgacggcagctgctgctgcggccgatcccttcgcatccgctgcagcagcagctgacgatgatgacttatacagttaaattagcagtcctgtgttgtgacgcatattgagtactttgcttcgttatatatgcttattatagtagactacgtgcaagacgcggagtcgctgtacctatatataatacttaagttaatattttggtacgatcctctgaatcgtgccatgagccatggtttgtgttcatttgagattatcaaagatggccagctctaccattgtgaatgataaattttcgttcaatgagaagtttaggttgcattcacattggatcatcgtatcgccgtgcagggcttcaccacgatgaagtctcctttgtttggttgcaatgtgcaatggcggatggttacaatgaaaaaaaaaaaaaaaaaaaaaaaaaaggaaaaaaaaaaaagaaaaaaaaaaaaaaaaaaaataattttggaggggttcctgcaggcgaacaaactttcactatagtgattcgtggcagaccttggcctgataatgggcatagtttattactttgcgaaaatgggggggg

SEQ ID NO: 3020 - DNA, 365 bp, Zea mays
  unsure (1)..(365): unsure at all n locations
  Clone ID: PAT_MRT4577_99757C.1
taccaacataaaaagcncanttttatactaacagtgccatgcannatatggtgctgacttatgctccttgtcctttatgcaagtgctgcttcctcaaccattatctcacaatgctcacaagctcctatagcttccttacttccaccatacactttcaccaacgctgtcttcaaaatgtgaaaacccaattctttaaccctacaggatccaacaggcattcgcaccaggcatcttaccttaatcacccttgtttctacaacaaccgacagccctattacagcatttacctttgtagcatttgtcggcacaaaacattcaagcacagcaactacaacaacttgtgctaggaaacctagctgactact

SEQ ID NO: 3021 - DNA, 292 bp, Zea mays
  Clone ID: PAT_MRT4577_99767C.1
ctcaaacccataattggtgatgtattgaaaaacagagttttgaaccatggagcagtttggaagttttacctgactggggaaaaaaaggacatgggattgttttttttatgagcgctgctactagtaatgttcacatagcatgggtttgtaaaaatactgtggagcaccacatcccccaccaacaggcattccggttgccaatgaggagggggtcttaaacaagcccctgagctgtaggtagcctatcacttggaaccctgaaaggggggcgagaaacttatctccccccccc

SEQ ID NO: 3022 - DNA, 283 bp, Zea mays
  Clone ID: PAT_MRT4577_99835C.1
tgtttcctatattctaaatgtggattgtgaccattacttcaatagtaataaagcttttagggaagcgatgagcttgatgatggatccagctataggatggaaaacttgtcatgcacaactaccacaacgatgtgatggcattgatttgcacgatcgatatgctaataggaacataatcttcttatgatatcaactgtgaaagtctatatggctttcagtgtacagatgatgggggaacaagatgcgttttcaataggcaggctttgtatgggtaggatcctgt

SEQ ID NO: 3023 - DNA, 384 bp, Zea mays
  Clone ID: PAT_MRT4577_99841C.1
tatttctttttttttttttggtattttttatttggttttttttgaagggttggcgttttctgcaaagccataaataattgccatattctacattgtagggggggctcctggtttactaatcaaagaacaatagcacttaggttacaacattgttacccttagagctacatccaaatgttggataggcgccagccagctaaggtacaagcacgcttgaccatgatagaattttaccaatccattgacctgccaatggcgctctttatatgcaagccttcaaggattgcaaaaacttccgcatgcccccagtgggccacgctttgaggagtttaaaagacatattcatgaagctcacggcttgcggagcttgaagccaaagacacc

SEQ ID NO: 3024 - DNA, 377 bp, Zea mays
  Clone ID: PAT_MRT4577_99927C.1
tcgcgagaacatgaacggcaaggagcggggcggccgtaacatcaccggtaaccaggcccagtcccgtggcggtggcggtggcggcggtcgctactgctgaggtcgcggacgccgcagctatggtggcgggccccatgacagcagctatggcgccggtggcggctactgcggtctgcccgcgggtggtggcggcacctactgaggcggtggcggctacagcagtcggcgcgagggtggtggtggcggctactgcggccgcagcggctgctggagggactgatgtgtgcgcccatcctggcttctgccgagttatcttatctatctatagtatcgtgttaccgctcgcttctgtcaccgtgttagtgtccgttctacct

SEQ ID NO: 3025 - DNA, 1252 bp, Zea mays
  Clone ID: PAT_MRT4577_99994C.1
acccgtaatcttcaatctccccagcaatccctagcagaagccttccatcctcactcgctcgatggcccgcacgaagcagacggcgaggaagtccaccggcggcaaggcgccgaggaagcagctggcgactaaggcggcccgcaagtctgcccctgcgaccggcggagtgaagaagccccaccgctcccgccccggcaccgtcgcgctccgggagatccgcaagtaccagaagagcacggagctgctgatccgcaagctgccgttccagcgcctggtgcgggagatcgcgcaggacttcaagaccgacctacgcttccagagctccgctgtctccgcgctgcaggaggcggctgaggcctaccttgtcgggctcttcgaggacaccaacctctgcgccatccacgccaagcgcgtcaccatcatgcccaaggacatccagcttgcccgccgcatccgtggggagagggcctaagcatcatatattctgtcatcagtgcccgatcagaagatgtagagatgtgctgggttctgtagtttgggttactgtcgaatcatcgagtagttggttgttcactgctgtaacttgttatcatgatgcatatgaaatggcaatgaactatgttatcagttctcgaaaaaaaaaaaaaaaaaagcggccgcttttttttttttttttttagacacaaaatggagcatgtttgagtccagagcaagccagcattgacaacatttcttcagacaaacacaccatgtgcacataccgcactgcagttctacagtatctagcatttttccgcccacacaaacaacttgcgaactgcagcaacaccagaaccgcagcgacggcgaatcgcggcgcggcaggcctagccgccgaagccgtagagggtgcggccctggcgcttaagcgcgtagacgacgtccatggcggtgacggtcttacggcgcgcgtgctcggtgtaggtgacggcgtcgcggatgacgttctccaggaagatcttgagcacgccgcgggtctcctcgtagatgagccccgagatgcgcttcacgccgccccgccgcgccagcctccgtatcgccggcttcgtgatcccctggatgttgtcgcgcagcaccttccggtgacgcttcgcgccgcccttgcccaggcccttgccgcccttgccgcgccccgacatcttcgccgcggagacgagaggattggggaatttttgcttgttggttggtgtggtgggtggatgattatcccggc

SEQ ID NO: 3026 - DNA, 3102 bp, Oryza sativa
  Clone ID: PAT_MRT4530_100020C.1
ataggttttttttttttttttttttttttttttttttttgctccaaaattaactttcatacattaatattctcaggtacctgaatttctcaatttagactatttattaatacagaaaataaatacccatgtaagcatacaggttaactaagcaatgataagtggagccaagcaagccaccataataattagatcttccagccaaggtaagacctcatacacaacaattatcacaggagagatggacatattacttatgtgtgacttgagtgtagggcttgattggatcgttatcccatagtcccccgccgcattaacaagattctagccaacatatccaaaatcgacaacactatatgatctgcgtaaaagtaacaattaaggcatcacaaagtacaaggcaagaacatttagaaggatcttgagaagtcccggcagcaactctcagtccatggcggacagtgcagagttatttgacatactaaccatatgccggaaaactcacagcacccagctggtttgttgaaccacatggcgacttttttcattttcccaatcgaatatgcagcacctcagggcatagaagtcagtctccggtgagtatccatctaccagtagaaaacccagcaagaccagtttctgtaaatcttctcgatgtgccttattatcccattccatgtaaatctcttgtttgagaagatcctcgaagtcgcttctttacatccttgaaagtcaggcttaaaaatgtgtccaagctgctccacaccatccatcacaagttgctgatgacccaatactttgcgactcttcataatacgcacaattgatgcatcaattgcgtatctgcgatccttatcaacatcttcaactactttcttcttctcatcaactggaggaagaggtatctttaatcttcgcagcttgtcagtaaactttgagttgaactcgaagacatcatttggtgaaatagatctattatttggttctttgctaagaatcttgtattttgcacaagatagagaatggagcaatcgaacaacatcatcatctgagagatttaactgtgtcacaatctcagaatagctgagtctatcaactccattaaacagcagcagcaatgcagcctgataagttgtaacaatgagctcaatagttttggcctcaaatttagcattaatattacaggttcccagtgaataaatccaggtaagtttcctgtgttttgttcttgtttggtaaaactccttgaaaacctctacacatttcaccatttctgcaggtagatttatatcaaaagatttgtaacttggccaaaatcctgttgtgaggacagtaacagctaaggctattccaggattcaactctgagtgtgtgcttatgaactcttcaaatttagcctggtgatctcttgccacagtgagatcagtaaccatgccctccattttggaagtgaactgccctccacattgttgctttagcttggtaaggatgcttctctcatgttcatcattagcactcttgtcaaaaagcaatctccttgcaagcttctttctatagaactcagcaaacaagtccttgtcactaatgtaggcaagtaaccttacaaccttctcaagggtatcttcaattgcttcatcactaagcttttcactaccgcctttctttaagatattgtcacagaaggtagctagtaattcagcacttgaactgccagaaacacctttgttgcaaaaaacttcaaaagcctccttaagtgccttatggaagagagtgtgcccctgaaaacaatccgtaacataagctacatacttgtcatgaagctcaatgattttccggacaaaaacctgttcctgtaaaccaactatctccttcttctctggcttcttattactagcagcatcttcggcttgcttcactaaggcagtgccctcattagtaacatgctgcttaaatatttgagaaacaggttctaaaccacgagttattctggaaaagagcctgtacattctagagagatcatcaaccttgtcatcacgaagcaatgcatggcatccagaatgctccttctccaggagctgacttgcgtattgagttagcaactcatgttgcactttctccaacaacttctgttcactactggagtgcaaataatgagcaactcgctctttctcccttttcagacactcctctgcctttaacatgtaatctggacaagagtcctcaagaatccaggtctgggcttttatagagtaatagtctgcagtatctttgagcaagaaatcttcaaaatcattttcgtagtagtccatgctagtcaagccaatctcaacaaatatatccagaacattctttaacagggccctatcaatttgttcaccctcacgttcttgatctatctgttcgagaaagtatgtcaaggatatcaccgcactttttacttttcctttgatctcttgatataccagatcccggaaacagctaagcccaacttcacttagttgtggtagggacctccttgaaataaagtaccgatcaagataatggaagaagcgtgatagccaccgaaccatcactttatggtttgaccaccgttttactagctccctcagcataaactcgtcatgtttctctcttaatgaaggtaagaccatggaggtgatgtactcctcgaaggactcgcggtacttgtcgtagagctgctgcgagtagtcgtgcggcggcttctgcgtgcacatgttgtaaatcgtcgtgtagagcatcatgtagtcctcggagctgaactggggctcgggcttcccctcgaggatgttcttcagcttggtgatgcccttctgcatgaacgcccatccctcctccagatcgatcgtcctccgctcgtgggccgccatcgggcagccgccgccgccgccgccggtgaacggaggccgcgcggaccaaaccctaggggagagacgccgccgcgtgagatggggagagacagaggaggaagaagagatggctgagaatgacatgtggggcccatgtgggtcttaccattttttttattaatttctatgtaaacctgacatgtgggtcctaggaggtttattattttttggaattg

SEQ ID NO: 3027 - DNA, 5037 bp, Oryza sativa
  Clone ID: PAT_MRT4530_100065C.1
atgccgtcgtggacgcccaagcgacggagcaagcaacaacagtcccgcatcctgttcaagccctcctcgtcgctcgagcggccatcggtatctgcgaatctggtttttccccaggaactggccatgggccaagaagatggtgatgttccccaacccggcgttcaccgtccaagaagcagaagcggttctataagacgtgatgctgtggcttttgaaataactagtcccgctgacaagcgggccccacatgccatacactcgtcgaaagaaaataaggggagagatggagatggcagcggcggcggcgtcatcggcctcggcggcggcggcggctcggcaaggaggacgcgcctcctccacggccggcgaacgaaggggcggcggcgccgggaggaggaggcgccggtcgggaaaggacgggagcggcgctggcgtcgggttggccggcgtcggttagggatgggcggggacggcgtcgggcggcgccggtcggggaagggcaagagtggcgccggcgtcgggttgggcggcggagtaggcctcggtggcgtcgtcggcctcgagcggcggcggggagcggcagtgcgcacggcgtcatcggcctcggtggcagcggtggtggcgccggaggggaggtgtccttggtcctcggacgcggagagacggcgtcaacaggagtggatgaaaaacgcaactgagtggtatggatccaatttctcaaaattacagtggcacccagccgatatgacgaatagtagtgattcatcaacaacactgttggccctcttgaacaggaacatgctgaaagaatcactgcatgacaccatcgctggtcatatcgagcgcaactgcaaggtcgacatcgacgccacccttcctcggaaagtgccggcggctgcggcgcccaagcgtccccagcatttggccgccagcaccagcgcttctgtcccaggtgacaaggagcatcctcagccggggggccgtggagtcctgtcctggacccctgggatggccgcgattgagcagcagatgaggaagcgtgcgctggtcacgtcggtgctgtccgggagaagggaggtctcgccggcgatggtggtcgcagctttggggcgtcgctgcagggttccctcggaagatgttcgcatcgaggtcaccaggccctcggacttcctcatctcctttcggcgtgaggaggactgcgcatccgtcctggggtggtccggcaggttcagcgtggagggggcgtcgatctccttccgtcattggcaccgctcagttcatgctcggaggtccaagctcctgtttgtcgtcaagctggccgtggaggggctcccagcgcatgcattggagtttgaagccatcaagcagttcctcaacaagattgactgccagttcatcgaactgttcttgccagtcgacgcatgcatgacggaggtgctggcctggtcggtggacccgtccaaaattcccaaggaattcaccctcgacattccggagccgatgcaagaatggtggatgccgccggtgatggaggaccctgacatacacgagccgctagtctcgcagacaccgccggcgcccccgatagagaagaggtgcctctcgtttgacctgctgatccatgtcctggaagtggttgacccagttcagcagctgctggacagcccccccgatgacccctacaacgacgatcgcgaggctctgcgcaggtgcgcctacggcaccttcctcggcaggatcgatggcaccggcccggtggttctttccccgccggagccaacgccagtcgagatggagccggcctccgccttgggctctccgcccgagcacacaccggaagcgatggcgtccttggcatctctgggatccccgccgggcacggccctcggcggtttggaggtggatgtcatctccgacgtggtctcgtcaccgatgctcgcaccggaagggcctgaaacggtcaccatcttgggagcaccggtcgagcacgcgtcaccaaacgaggtgctgatctccatcgagacggtcgtgatggggccgggctcattaactcgcccagcatcagcgccagcaaaactagtggtggacccacatgtaagggagtccctgggtgtggggcttgccaggcaaatatccttcgaagaacccgccagagatttgctgagttcagtggcatttacatcgtcgccacctcttccggctgtggcgccgctggcagttgtggagggcgcgaacctcacgttcaatccgcccggtgagcgggaatcggttcccctttctacaggggcgctggagatggttcttgggccgtggcccgaggtgcacgtcgccagcccacaaatagtctaccgcaaacgccacctcctcccaacctcaggccgcaagtggcctacccatcgggccgctttgggccttactcaggacggctcgccaggggtgccgctttccctggcccactcggagcggacctcgcaggtcattgatggctccctggcgcttcccagcgctgcgttcccagcggccgccgcgtctctctctccgggtgaggcagttccatcgctgggtgaccttgtggcaccccagccagcggcgatcatcggcacgcgtccgcaggcgacaccagctcgatccaaacggcggattgagccatactcccacactccaagacgcagcgaaaggctggccgccattaatggcgggcgacaccagcactcggtgtccaaagcccagcgtgtgctcatgaagaagctcagggtggttgaagacgagagcaaggtggaagacactgacatcctcaaatacttggagctcttcaagtcccctcttgtgccggcccatgtgcaagccttggcggcactgtgcaacgtcaggctgtcgtctcctcagagcgtcgagcttgttgttcaatcttgtggctcttttttagatggttttgagttcatccctgctgagggaactagaggggggttgttcactgcctggcgcagtgatcgtttcaatatgagttgtcttcataaaggggtatggtcgctctcgctgtgtgtgaccaatctggaagggggtgcgtcatggacgttgacaaatgtctatggaccccaggagaccgagcagaaaattcagttcctggaggagctaacctgggtggggcaacagtgcgtgcagggggcctggtgcattgtgggtgatttcaacctcctggcagcagagtcggacaagaacaatggcaatgtcaatagaggcttgattaatcggttcaggggtctgttgaacactttggagctccgtgagctctacttgttcggccgacgctacacatggagtagtgagcaagaacgaccaaccattaccaagatcaataaagtcttgatgaatgctgattgggaggacttcttccgtgacgcacatctgcaggcgctcagctcgtcggcctctgaccattgcccccttctgctggcttgtgaggcgatggtgcacagatcgcgacgcttcaagtttgaagctttctggcttcatctggaaggcttcgaggaggtggtccggtcggcgtgggatgtggtgccagctggttcaaacgccctaagttccctccacttcaagctacgagcgacggcgatggcgctgaagtcatggggtgagcgtcgtattagcgagttgcgtttgcaacttgcgatggcgcatgagataattctaagactagacggtgctatggacttgcgtctgctgtcccacgaggagcgttctttgcgtgcggcactcaaaggccggtgtttggcgctcgcggcgctggagcgcattcggctgcggcagcgggcacgcctgcgatatctcaagcacagtgggacagcctcccaattcttctacttgaagatcaacgcgagaagaagaaagaagacaattcctgtgctgcagcaaggcggagtttggggggtgacagaggaggacaaattggctatggctcatgactacttcctcgaaattatgggctcgccctcgccaccaatggtggcgctcgacctaggacgccttggtctccctacccttgatctctctgagctggaaattgagattttggaggatgaagccaagaaagtcatgctagaaatgctgagtgaccgcgcaccggggccggatgggttcggcgcagccttctacaagagatgttgggaaattgtgaaggaggatgtggtggcggcgctgaacctggtgttgaacgcgaactcgcaacaccttcaccttctcaacacggcgtccattatcttgctccccaagaaggaagacccaatgcagctggccgactataggccaattagtctaatccacagtttcatcaagctgttcactaaaggggtagtgcagaggcttcaccgtgcgaaatgccctgctatcctactcaagctcgacattgcaaaggcgttcgacacggtgtcctgggaattcctgcttgagctccttcgccatctcggttttggagttaaatggcacgactgtattgccgtgcttctcgtctcctcgtcgactactgtttatgagggatgcaactggtttggtctcgaacttcgcgaaagttccatcacgcccatacattgctcggacgaacaacttgcggctgtgactgaagtgctggggtgcccggtgcggttgctccccatcgtctatcttggacttcctctttcagtgcgcaagctgggaaaagcggacctgcagccaatgatggatcgtcttgctaagagtctggctagttggaagccgaagctcctcgctctagacgctcggctcgcaatcatcaagcatgtgttgatggtgttgccgttatacttcatgtctgtgctggagctaccagtttgggcaatcaaggaaattgagaagaaatgtcgcggcttcctatggaaaggggatgaaaacgcagcgggcagctgcagcctggtggcctgggataaactctgtctaccaatcgagaacgggggtctcggcattaaggacctgcgtctcatgggcgtcgccttgagaactcgctggccatggctctgccgtgtctag

SEQ ID NO: 3028 - DNA, 256 bp, Oryza sativa
  unsure (1)..(256): unsure at all n locations
  Clone ID: PAT_MRT4530_100215C.1
aggggctcgggaagggcggcgcgaagnggcacaggaaggtgctgcgcgacancatccaggggatcacgaagccggcgatccggaggctggcgaggaggggcggcgtgaagcgcatctccgggctgatctacgaggagacccgcggcgtnctcaagatcttcctcgagaacgtcatccgcgacgtcgtcacctacacggagcacnnccnncgcaagancgtcaccgncatngacgtcgtctacnagctcaagcgcca

SEQ ID NO: 3029 - DNA, 379 bp, Oryza sativa
  Clone ID: PAT_MRT4530_100251C.1
cccactcatccgcattcgaatgcaagaagctcgtatctgccaccaaggcaaggctgaagcttgatgagagtgcggactagaagaagcggcacgaggaactcacggcgaagttcgagggactgggcaaggtgatcaaggatgcgctcgctgactaggcaacaaaggttgctgtctctgacccagtggcggactctcgctgctggctagtcactggggagtatggatggactgctaacatggaaaggatcatgaaggtccatgctctagaggactccaacatgtcacggctacatttctagcaaagaagaccatcgatatcaacctggataatgccatcatggacgagctccgcaagcgtgccgacgcggacaagaatgac

SEQ ID NO: 3030 - DNA, 654 bp, Oryza sativa
  unsure (1)..(654): unsure at all n locations
  Clone ID: PAT_MRT4530_100287C.1
ccacgcgtccgggacgggctcgagacgacagaaacgactactacgccatcggcacctacgacggcgagaccgatacctggacgccggacaacgccgacatcgacgtcgggatcgggctccggcacgactacggcaagttctacgcgtccaagacgttctacgaccccgtcgggcggcgtcgcgtgctatgggggtggatcggcgagaccgacagcgagcgggctgacatactcaagggctgggcctcccttcagtcaattccgaggacagttatgctggacacgaagactggcagcaacctgctccagtggccggtggtggaggtggagaacctccgtatgcgcggcaagagcttcgacggcctcgacgtctctcccggctccgtcgtgccgttggacgtcggcaaagcaacacagctggacatcgaggccgtgttcgaggtggacacttcggcagccgacggtgtcgtcacggaggctggagcagcagcatacagctgcggcacgggcggcggtgcggttggccgtggcttgatgggccccgtcgggcttctcgtgctggccgatgatcagttgtcggagcggacggctggcttcttctacctggtcaagggagncgacggnaaccttacaaccttcttctgggaagacgagc

SEQ ID NO: 3031 - DNA, 428 bp, Oryza sativa
  Clone ID: PAT_MRT4530_100303C.1
cccacgcgtccgcccacgcgtccgcccacgcgtccgcccacgcgtccggagagagggagagagaacggaggagagaaaggacagaaagcttgatactgatcaactccaacaatgaggccattattctccaaggaacatttggacctgatgacaaccaggatgactcgagcaatacaagttctggtgtttcacttggtgactactttcttggtcctggattagatatcctcttgcagcatttggcggaaagtgatcttaatcgttctggtacaccacctgccaagaaggaagctgtagaagcattgccaactgtgaacatccaggaagtgttaggctgttctgtctgtcttgaggatttcgaaatggggacagaagcgaaggagatgccttgtcaacataagttccactcccagtgcatacttccatgg

SEQ ID NO: 3032 - DNA, 2407 bp, Oryza sativa
  Clone ID: PAT_MRT4530_100469C.1
aatcgcacgaggcaaccgcacacgaaagaacaagggccgccaagttgcagttagctagctgttgcgctcgctttcccccaaacgtgacccggccgggagggagaagtcgccatgaagcagcctcccgctgctgctttctctctctcgcctcgttaaaatctctcttccaccccgaaccccatccagttcagttccctctcgatcgcttcccgtgctctcgctctctcgcttgctagatcagagattcccctctgcggcggttgtgaggtttccgcttcggctcgctagctagctctgctgtttctgtgagagccgggagcaccaaccgcgcgtggggtgggtgcccggaggtttgatgcgcgtggccgccggtttctccccgtcgtttgatgggcaacgcatgcggcggttcccttagatccaagtacctgagcttcaagcagaccgcgtcgcagcgccacgacaccgacgacaacaacaacgccgccgcggccgactcgccgaagaagccctcccgccctccagcagccgccaagacggacgaccacccagtctccgcgtcggcgccggccgccgccatgaggcgcggccaggcgcccgccgacctcggctcggtgctcggccaccccacccccaacctccgcgacctctacgccatgggcaggaagctcgggcaggggcagttcggcaccacctacctctgcaccgagctgtccactggggtggactacgcctgcaagtccatttccaagcgcaagctcatcaccaaggaggacatcgaagacgttcgccgcgagatccagatcatgcaccatctctcgggccacaagaacgtcgtcgccatcaagggcgcctacgaggaccagctatacgtgcacatcgtcatggagctctgcgccggcggcgagctcttcgatcgcatcatacagcgcggccactacagcgagcggaaggccgccgagctcacgcggatcatcgttggggtcgtcgaggcctgccactcgctcggggtcatgcaccgggacctcaagccagaaaacttcctgcttgccaacaaggacgatgacctctcgctcaaggccatagattttggtctctcagtcttcttcaagcccggtcaaacttttaccgatgttgtcggaagcccatattacgtagctccagaagtgttgttgaaacactatggaccagaagctgatgtatggactgcaggtgtcattctctacattttactaagtggtgtacccccattctgggcagagacacaacaaggaatatttgatgctgtactaaaaggtttcattgattttgattctgatccttggcctgtgatctctgagagcgcaaaggatcttataacaaaaatgctcaatcctcgcccaaaggaacgcttaacagcacatgaagttctatgccatccatggattcgtgatcacggagttgctccagatcggcctcttgatccagctgtcctatctcgcatcaagcagttctctgcaatgaataagttgaagaagatggctttgcgggtaatagctgagagtctctcagaggaggaaatcgctgggttgaaggaaatgtttcagactatggatgctgataacagtgttgctatcacatatgatgagcgtaaagaaggctttagaaaatatggctcaacacttcaggacacctagaatcgtgatctaatggattgggcaaatatagacaaccttcggaacaatcgtatatatcgaaatcatttcctcgatattgtctctcaataaactggagcgagaggaacatcttgtggcagctttttcatattttgacaaagatggaagtggttacatcacagtggatgaactgcagcaagcttgcaaagagcataacatgcccgatgcttttcttgatgatgtcatcaatgaagctgatcaggacaatgatgggcgcattgactatggagaatttgttgccatgatgaccaagggcaatatgggagtcggacgaagaacaatgagaaacagcttgaatatcagcatgagggacgcacctggtgcactctagacttccacgatgtacagcttacggattttagcttcttcctgtcttcctgcccaacgaactcctgcgattttttagcgttgtcagatgtccgcggatgtgtttttctggtggttctgatttaacttgtcaattgattccatggaatgcataacaagatgtccatgccacgctcaaacgaagctgggttgtaaatctctcgtacgccattgctcaactctgaaggtgttcggtgaactagctcgtattctttgtgttgcaatggatgaacttatactggctgtgttgggtgtaattgcattgccaacatttacaggggcatgtgagatcccgctttatccaaaaaaaaaaaaaaaaaaaaaaa

SEQ ID NO: 3033 - DNA, 1178 bp, Oryza sativa
  Clone ID: PAT_MRT4530_100499C.1
ctaccttgccggcccagagcatccctccgttgcctattcatgttctcgcgacgacgggttcgtcttcattcgaaggcccactggttctccctcctcacctcctcttcttcctcgggggtgaagtcattcttgatgttgaaggtcttgcggatctcctctggtgtcttccccttgatcatgtcagccacggtctggcaggtcagatccagcagtcccttgatgttgaggtagtttgcagccaggatgagatcgaagagggtggactttttttttttttttttttcagcaaagcatttcactgcagattgatagtattaattaatgcagataacaggttcagcagttctgaccacatcagttctttttttcctggatagaacttaaccatttaaccaactaaacgtgcacatgaacccccatcggactccaaaatacttacaaccagcacgacatataaaagcagagcatacgtagatacggggtaaggatctaagcaccaagacatcagaggccttgatgccttctactcaaaagcccactggttctccctgcggatctcctcttcctcctcaggggtgaagtcgttcttgatgttgaaggtcttgcggatctcctcaggagtcttccccttgatcatgtcagcaacagtctggcaagtaaggtccagcaaccccttgatgttgaggtagttcgcggccaggatgaggtcgaagagggtggcctggtcgaccttgacgaagtcggcgtcccagttcttgaggtcctcgccggagggcggcggcacggctgcggcggcggacgcggcgtcgtcggcggccttggaggccgcggcggccgcggcgtgcacgtgcttgttgcagtactcgatgaccttggagaggatcttggagttgacgttggggagcgggatgccgttgtcggcgcagtcgtcctcgatcatgtggcggatcgtctgcgactccatcgccaccgcctcctccacctcgaactcctccccgtcggagctcttcagggtgatcatcttcttctctccctcagccgccatcgatcgagccctccgaaatcgctcgcggtctcggtcgtcgccgaggaggtgaatcgcacgaaaccctagctttcgcagcggcggcgatggggattgcggcgagattgggcgtcgggctccgcgcgggcggggg

SEQ ID NO: 3034 - DNA, 3822 bp, Oryza sativa
  Clone ID: PAT_MRT4530_101067C.1
tttttttttttttttttttttttttaaagtcaaaccatattttattcatgtagtagtaacttgaatgctctcagcatcaagatacagcatattacagattggtgttttcacttccaatcttaatgagttcaggcgagcaacagcacgcatttgcaacttagaagattacacatactgacattagcatggtgaagaagacgacagtacataaccaaatgtgccatacgaccatttatctgtaaagtcaaccatttatctgcagccagtgaatcttcagtctgcaagtacgtccaatcctaagcacaagccaccgtcgtggctatacgaacgaacatttcatgattattttgctggagcagaagcaagttcgacgctgaggatgaaggttgacatgccagcttccctcatatgtcggacatcgccattcatgagcctcagcaggtttctagaaaccgcaagactcatgccttcatccgactgctccttattgtcatcctcgtacatttgtgacagcagatctgctgggactcctttgccctggtgcttgatcctaagttctaggtctatgagatgaaggttttccccaatgctgttcttggtcaggctacaagagatctcaacagaacccccaacaggagagaacttcactgagacgaataggaagtcagagagaatctgctgtagtcgaacaccatccccgtagactgtttgcttcatatatctctccggtaggttgcaagagactctaatcccttttccctggcaagttatgagtacttgacttacagcagccacaaacacatcttgcaatacaaactcaaccatctccaaatccaagcaactagacttgttcatgacgctatcttgatccaagtcagaaagtattttattcagctggcggtgacaactatctgcaacattgacctccttcatctgctcttcattcagacctgtgttcttcagtgctttcctagagtaaagcatacctgagagagggttgttgattgcatgtctcatgtaggagtaagctttcaactttgttagtgcattctgctgtgaggcttgctgcacatgtagtgcatgttgcagctcatgactaggaacttgaatgaaacaaaatactccagtgatgacaccatctgcatttacttttctgttaacagaaagaaggcactcgatatacttcccgttccggtcgaagaagctgaatggagccttttctgtttcatcaccagctaatgcactgttgataagaatgcagagacttacaaatgcatctttattcttcacaagacaggaggcgttggtgctatcaaacacctcaccaagaagcatcttattgatcacctcatctctatgccacccggtcaatttcgtcatggcagcattccactcagagcaccatccaaattcgtcagcaccaaatatgggaggaataagcggggcttggattgtgaataattgctttgtagtctccctcaacccgagtaaatttgtccatgaccaacttatgaacagtcatatcttgtgcaacaaagcacacaccaacaacatggtcgtgaaggtcccggctggcacaggcattcacaaccaagataacagggccatcatctctcttggagccatgagttttcacctcaaatttcacttccttctcttctttgccttgcaaagctaaatacagcatcctctggacaactggtacagaagattcctctacaacggtaagtatgtgtcttccaatagcctcatctactctcaaccctgtcaactcagcaaccttctgattccatccattgaccaatccattgctatctacagccaagattgggacagttgctgtttccatgagacgaaccatttcacttgtaactgcctgcaattcagcaagcccatcaagcttgagatcaccaacctgattatctaaactagcggcccttgttggcttgatgtcatcattcagtgtccctctaagtataagttgtaatgagtgaatagcatccatctcatagtcattccaaggcaagctcttcatcttgacaacctcaaggaatgccttgaaggacagcctagggtgcattcttctgctgtcatccttgtctgatggatcatgttttgcacctccccatctgatttcagcagctgtatgtgacctgaaccagaacaggatatccttggaatttattttagctactgccattccacaaatcatatcaccaagagcagcagctcctggatatccagcatcatgtaggctatcagtactcaggccagtggaatccctgtggacatctgacagccagaaggcaatatcacgtatctgagactcagttggagcattctgtagccgccacacttttcccccatacaaaagagcagcaccatcacatttcacaaggtccatgatgttgggagtccctgatactatactcagaggagaggattccctgagaagcatgtcagagagcattgtttgcatcctcaatatgcttttctcgcgtacttgcctctctaattcaaactccttgttaacatggacagcaaacacttgtgctaagaactcacaggcataccgcaatgggaaaggaacatatctggggctctcatggtggcaaacaaggagtccccatagtttcttcctcttctgctgttgtgcaggttgatcagccccaacttcatcatcatcctcattctcattaaccacaacagccatgacaagggatgcaatcgagttcatgttctccatatactgaagatgacaactgtgtggtgccctcagtgttgaaccacataagctaatatccaagtggagcgactcatcttcgataatcttgatagatcttgcacggcaatcacaaatcatccggactttgttcttcatgaaaagaaacctggctgcctgagggatatcagtagctggataatgcaggccaagataaggttcaagaccaggctttgtgatctcagcaaagacttcaccatggtcatcttcatggaacttataagccataactctatcatatcctgtgaggtcaaagagttccttgaccaccgtattgcatagcacctccatgcttccacctggcagtgactggatcttagagattgccttggcagcaagtttgtaagattgcaaagccccagcggcagttgctggaaattctgtaggtttcacaggctcaaagtctaccaccaaacaaccagttgcccgatgaacaatggcatagaaaggcttgcctgaggtcttgcattgaactaggatagggttcagcaaggaaacatcagcaaatcccagtgccttctgcagtgctgtggcacctgggtcagtgaaaagagaccatacattggtgccaatgcgtagctttgggggatcatcaacacttggcactgcatggctgacagttgtaagcatctctggtgcattctcgctgagcgctataacattgaaggtcttctcatcaagggccaacaagcaaccaaatggttggattagctttgctctctgaatgtgatgcaagtaagctatgaccttctcagaacgagcttgctgctcaggtccagtagttctctgtgcttcaaccaatttggagtaatcaaaggagtcgccatattcttcatattcagcattgagttcagcatcaagagttgtttgtgctaatatccttgcccgggagctttggcgggtcctgctggatgaactggaacattgagtaggtcttgaagaagacatcatctgccttgattgcctgaatcactcaagagtcttatctgctgtataccactcctgctcggctcagctcagctctgctccagtagtggaaa

SEQ ID NO: 3035 - DNA, 5186 bp, Oryza sativa
  Clone ID: PAT_MRT4530_101087C.1
ctccactcctcgccttccactctccacacctcgcctcgcgtcgagcacctggcaatggcggctcacgcgccctcgatgcgccccacccacgccctctcctcgtgagatcgcctgctgcgctctctccccgcgcgcgcgcgcgcctccctccctgtttgttgaatccaagagcgagcccgaccgcatcttggaccctcccctccccgcggttcttggacgacgccggtgcgcgcggtggctctgctgtccccgcgccgcaccgcgccgaatccgagcagaacgcgcgcgcgtcggcggggggatctgcaatggcggccgtggcggtgcccccgctctccgcgtggctcgtcgccgcgcgctcctcgacgcaggcggaatgcggcggcgccgacgagcaccaccaccaccaccatcagcagcagcaccagtgctgcgtcggcggcgggtccagcacggtgatgttcggcccgcgccgccgccgcttcctcggcggcggcgcgcggcggcgcggcgcggcgcgctctggaatggccatggctgttgccctgcagcctgaaaggagaactgttgaaaagaaacctgatgttaaacaaagaagggtggttatcactggcatgggtgtagtaacaccgttgggccatgatcctgatgtgttttacaacaaccttctggatggtgttagtggaataagcgagatagaaaggttcgactgctccacgtttccgacgagaattgcaggagagataaaatccttttctactgatggttgggttgctcctaagctagctaggcgaatggacaagttcatgctatatttgataactgctggaaagaaggcgttggaacatggtggtctcactgaagaactcaggaatgaattggataaaaccagatgcggtgttctcattggttctgcaatgggtggcatgaaggtttttaatgatgcgattgaagcattgagggtctcctacaagaaaatgaacccattttgtgtcccttttgcaactacaaatatgggctctgcaatacttgcaatggatctgggctggatggggccgaactattctatttccaccgcgtgtgctaccagtaatttctgtatcctcaatgcagcaaaccatatcagaagaggggaagctgatgttatgctctgtggtggttctgatgcaccactcatcccaattggattaggaggttttgtggcttgcagagcactttcacagagaaacagtgacccaactaaagcttcccggccatgggatgtggaccgtgacggttttgttatgtccgcaggggcgtgggttcttgtgttggaagaacttgaacacgccaagcaaagaggtgcaaaaatatatgctgaatttctaggtggaagcttcacgtgtgatgcataccacatgactgagccacatcctgaaggaagagggattattctttgtatagaaaaggcactggctgattcaggagtagcaagggaagaaatcaactatgtcaatgctcacgcaacgtctacacagtcaggtgatttgaaggagtatgaagctattgtccgctgctttggccagaaccctcagctaagggtgaactcaacaaaatcaatgactggacatctaataggtgcagctggtggaatagaagctgttgctgctattcaagctataagaactggctgggtccatccgaatctgaatttggagaacccagagaaaatagtggatgtgggcgtgctggtcgggtcgcagaaggagagatgcaaagtgaatgtggcactgtcaaactcatttggatttggtgggcacaactcatcaattctgtttgcacccttcaagtgaacttcgcctacgattatcgcttgctccctcaaattttcaaccgcgccatgggacccggaaccgcgtttagaaaactagcaagcaagatgggtgggctcgaggagatcaagaatgaggccgttgatctggagaacataccgatcgaggaggtgttcgagcagctgaaatgtacgcgcgaggggctctcctccgaggaggggaaccggcgtatcgagatgttcggccccaacaagctcgaggagaagaaggagagcaagatactcaagttcttggggttcatgtggaacccgctgtcgtgggtcatggagatggccgccatcatggccatcgcgctggccaacggcggcggcaagccaccggactgggaggacttcgtcggtatcattgtcctgctggttatcaactccaccatctccttcatcgaagagaacaacgccggcaacgccgctgctgctctcatggccaaccttgcacccaagaccaaggtgctgagggatggccgatggggcgagcaggaggcagcaatcttggttcccggtgacattatcagcatcaagctcggtgacatcgtccctgctgatgctcgtctccttgagggtgatccccttaagattgaccagtctgcacttactggggagtcccttccagtgaccaagaaccctggtgatgaggtcttctctggctcgacctgcaagcagggtgagattgaggccgtggtcattgccactggagtgcacaccttcttcggcaaggcggcgcatcttgttgacagcaccaaccaagttggtcacttccagacggtgctcactgcgatcgggaacttctgtatctgctcgattgcggttggtatcgtgatcgagatcatcgttatgttcccgatccagcaccgtgcctaccgcagtggcattgagaacctgttggtcctcttgatcggtggtatcccaattgccatgcctaccgtgctctcggtcaccatggccattggttcccacaagttgtcccagcagggtgctatcaccaagaggatgactgccatcgaggagatggctggcatggatgttctgtgcagtgacaagaccggaaccctcacccttaacaagttgagcgtcgacaagaacctcgttgaagtgttcactaaaggtgttgacaaggaccatgttttgttgctggctgcaagggcatctaggacagaaaaccaagatgccatcgatgctgccatggttggtatgcttgctgatcccaaggaggcaagagccggtatcagggaagtgcacttcttggccttcaacccagttgacaagaggactgctctaacatacatcgatgccgatggtaactggcaccgtgccagcaagggtgctcctgagcagatcctgaccctgtgcaactgcagggaggatgtaaagaggaaggtgcatgctgtgattgacaagtatgctgagcgtgggcttcgttctcttgctgttgcaagacaggaagtacctgagaagtcgaaggagtctgctggtggaccatggcaattcgttggtctgctgcccctgtttgatcccccgaggcacgacagtgctgaaactatccggaaggctctccatcttggtgttaatgttaagatgatcactggtgaccagcttgctattggtaaggagactggtaggaggcttggaatgggtacaaacatgtatccttcatccgcattgctcggacaaaacaaggacgcttcacttgaggcacttcccgtggatgagctcattgagaaggctgatggttttgccggagtcttccctgagcacaaatatgagatcgtgaagaggttgcaagagaagaagcacatcgtcggtatgaccggagatggtgtcaatgatgcccctgctcttaagaaggccgacattggtattgctgttgctgatgctacagatgctgcaagaagtgcttccgacattgtgctcactgagccaggtcttagtgtcattatcagcgctgtcctcactagcagatgcatcttccagaggatgaagaactataccatttatgcagtttccatcaccatccgtatagtgcttggatttttgcttattgctctgatctggaaatacgacttctcacccttcatggtccttatcattgccatcctgaatgacggtactatcatgacgatctcgaaggacagagttaagccttctcccttgccagacagctggaagctgaaggaaatcttcgctaccggtattgtgcttggaagctaccttgctctgatgaccgttattttcttctgggccatgcacaagacagactttttcacggacaaattcggtgtcagatcaatcaggaacagtgaacatgagatgatgtctgcactgtacctccaagtcagtattgtgagtcaggccctcatcttcgtcacccgttctcgcagctggtccttcatcgaacgccctggtcttctcttggtcactgcattcatgcttgcacaactggttgcgacattcctcgctgtctatgccaactggggctttgccaggatcaagggcattggctggggctgggctggcgttatctggctttacagcattgtgttctacttccctcttgacatcttcaagttcttcatccgctttgtgctgagtggaagggcctgggacaacctccttgagaacaagattgcattcaccaccaagaaggattacggtagggaggagagggaggcacaatgggccaccgcacaaagaacacttcacggccttcagccaccggaggtcgcctccaacacgctcttcaacgacaagagcagctaccgcgagctctctgagatcgctgagcaagccaagagacgagctgagatcgcgaggctgagagagctgaacactctcaagggccacgtcgaatcggtggtgaagctgaaggggctggacatcgacacgatccagcagaactacacagtgtgaggaaccccctcggcattcaacgagagatcgtcatcagcgctggagcgggaattgcaaacggcgctctggttaaaggaaattttcgatgaatgattggaagaacaaaaaacaaaaaaacatggctgatctgaacagccctagttgtaaagtgctaccaaatatatggtccggtttccctcttctagagaggttttacgttctagtggagtaccgtacgtacgtgttggagtacgacgacgtgttgtgatcgtttttggtctttttttactcttttccccctaactagcggtcttcttgcggaatgcaagatggagaaataatggatgaaaaattttctgccacgttaaaaaaaaaaaaaaaaaatgggtctgcttcaattaattcaaaaataaaaaacaaaaaaaaaaaaaaa

SEQ ID NO: 3036 - DNA, 2011 bp, Oryza sativa
  Clone ID: PAT_MRT4530_101198C.1
cccacgcgtccgcggacgcgtgggcgcgccaccgccaccgccaccgccaccctcgccgcggcgccgcctccactccactccaccgccgccgcctatataacccacctccacctcgcttccccggcctcgactccactgctccaccaccatgcaggcgcacgcccacacgctcgggctccgcatctccccgccgccgcctgcgccgccgcggcgccgcgctcgcccgcgccggcgcgcagtccgtgtcgccgcggcggcgtcggcgccgcggcgggagacggacccgaggaagcgggtggtgatcacggggatggggctggtgtccgtgttcgggaacgaggtggacgccttctacgagcggctgctcgccggggagagcggggtcggcgccatcgaccgcttcgacgccggcggcttccccacgaggttcgccggccagatacgcgggttctcctcggaggggtacatcgacggcaagaacgaccggaggctcgacgactgcctccgctactgcatcgtcagcggcaagaaggcgctcgagaacgccggcctcggcaagggctccgatggccacaccaagcttgacaaagtccgggctggtgttcttgtgggaactggcatgggtggcctcactgtgttttccgatggtgttcaaaaccttattgagaagggatacaagaaaatttcgcctttctttatcccatacgctataactaacatgtactcggcattgctagcaatggatgctggttttatgggtccaaactactcaatttcaacagcttgtgcgacctccaactactgcttctatgctgctgccaaccatatacgtcggggtgaggctgatgttatcgttgctggtggtactgaagctgcaattattccaattggccttggaggttttgtggcctgtagagcactatcgcagaggaacgatgacccagaaactgcatctaggccatgggacaaagagcgagatggttttgttatgggcgaaggtgctggagtactggtcatggagagcctagagcatgcgatgaagcgggatgcaccaataattgcggaatatttgggaggtgccgtgaactgtgatgcttaccatatgactgacccgaggtcagatggactgggtgtatcgtcctgcattaatcaaagtcttgaagatgcaggtgttgcgccagaggaggtaaattacatcaatgcacatgcaacttcaactcttgctggtgacttggctgaagtaagagccattaagcaagtcttcaagaatccatctgatattaaaatcaattcaacgaagtctatgataggccattgcctaggtgccgctggtgggttagaagctattgccgctgtcaaagccataactactggatgggtgcatcctactattaaccaatttaaccccgagcctgaagttgattttgatacagtagccaacgagaagcagcagcacgaagtgaatgttgctatctctaattcatttggatttggaggtcacaattcagtggtagtatttgcgccattcaagccatgatttccaattttttgcttcagaaattctattatcctgcagcattttctggcagttggtaattagtgaggaattgctaaatgtagcatatttgattttaccggccttcttcgtcaagggactaatattgattttagtataactgtgtatagcgttgttttgcataatttgcaattgattcctacctacttctgtataatggaaaatgtgggaatttctagaattgtcatgtagaagcaaaagttagatctcctgttccatagaaatgcttgagccaaggaattgcttgtctgtaatttgtatctggtctagaaaaatgttctcttcatttttttttcttgtccagtatgccaatgtccgtctagtggaataaaatgtattcagttttgcttaacttgctcggctaatagcttggttcgatgagatgaaatattctagatttcgcctgaatgtgtacaaaaaaaaaaaaaaaaaaaa

SEQ ID NO: 3037 - DNA, 4024 bp, Oryza sativa
  Clone ID: PAT_MRT4530_101539C.1
ggagatattatcttgggctgccttgccgtgcagtgtggctcgctgtcccactcaggtgcggcgctattccaatccgtgcttatccccggcagaatccaatccccctcgcggcttttctccaaaagcgctccgccttctcgcctatttcgctcgctgccgcggccatgattccccgctgatacctccgcgcgcccatttggttcctcctcgccgaatcccccttcgcagccggtggttctagttgaggaggaggaggaggggatttggttgggggcgagggggaggagggggttgtggagatgtcgtcgtcgcggtcgaacaaccgggcgacgtgctcgcggagcagctcggcgcggtccaagcacagcgcgcgggtggtggcgcagacgccgatggacgcgcagctgcacgcggagttcgaggggtcgcagcgccacttcgactactcgtcgtcggtgggcgcggccaatcggtcgggcgccaccaccagcaacgtctccgcctacctccagaacatgcagcgcggccgcttcgtccagcccttcgggtgcctgctcgccgtccacccggagacgttcgcgctgctcgcctacagcgagaacgccgccgagatgctcgacctcacgccgcacgccgtgcccaccattgaccagcgcgaggcgctcgccgtcggcaccgacgtgcgcacgctcttccgctcgcacagcttcgtcgcgctgcagaaggccgccaccttcggggacgtcaacctgctcaaccccatcctcgtccacgccaggacctccgggaagcccttctacgccatcatgcaccgcatcgacgtcggcctcgtcatcgacctcgagccggtcaaccccgtcgacctgcccgtcaccgccacaggcgcgatcaagtcgtacaagctcgctgccagggccatcgccaggctgcagtccctgcccagtgggaacctctccctgctgtgcgacgtgctggtccgcgaggtgagcgagctcactggctatgacagggtgatggcgtacaagttccatgaggatgagcatggtgaggtgattgctgagtgcaagagatctgatttggagccgtatcttggcctgcactacccagccactgacattcctcaggcatccaggtttttgttcatgaagaacaaagtgcggatgatatgcgattgctccgcaacgcctgtgaagatcatccaagatgacagcctaacacaacctataagcatatgcggatctactctcagggcaccccatggttgccatgcacagtacatggcaagcatgggctccgttgcatcacttgtgatgtcggtcactataaatgaggatgaggatgatgatggagacactgggagtgaccagcagccgaaagggaggaagctgtgggggttgatggtctgccatcacacaagcccgaggtttgtccctttcccgcttaggtatgcttgcgagtttctcttgcaagtatttgggatacagatcaacaaggaggtggaactggctgctcaggcaaaggagaggcacatcctccgcacgcagactcttctctgtgatatgctccttcgagatgctcctgttgggatatttacccaatcacctaacgtaatggatctagtgaaatgtgatggtgcagcattgtattaccaaaaccagctttgggtgctaggatcaacgccctctgaagcagagataaaaaacattgttgcttggttgcaggagtaccatgacggttctactggattgagtaccgacagcttagttgaagcaggttatcctggcgctgctgcacttggtgatgttgtgtgtggcatggcagctataaagatctcttcaaaagatttcatcttctggttccgatcccacacggcaaaggagattaaatggggaggagctaagcatgaaccaattgatgcagatgacaatggtaggaagatgcatccacgatcttcattcaaagccttcttggaggtagttaaatggaggagtgttccttgggaggatgttgaaatggatgctatccattctctgcagctaatattacgtggctccttgcaagatgaagatgccaacaagaacaacaatgcaaagtccattgttacagctccatctgatgatatgaagaagattcaggggctccttgaactgagaaccgttacaaacgagatggtgcgcctaattgagacagcaactgcgcctatcttggctgttgacatcactgggagcataaacggatggaataataaggctgcagaactcactggattacctgtcatggaagccatagggaagcctctggtcgatctcgtcatcgatgattctgttgaagtggttaagcaaattttaaattcagctttacaaggaatagaagagcaaaatctgcaaattaagcttaaaacatttaatcaccaggaaaataatggacctgtaattttgatggttaacgcctgctgcagtcgtgacctttcagagaaagttgtgggggtttgctttgtagcacaagatatgacagggcagaacattatcatggataagtacactcggatacaaggggactatgttgctatagtaaagaacccttcggagctcatcccccctatatttatgatcaatgatcttggttcctgcttagagtggaatgaagctatgcaaaaaattactggtataaagagggaagatgcagtagataaattgctaatcggggaagttttcacccaccatgagtatggctgtagggtgaaagaccatggtactctgaccaaacttagcatattaatgaacacagtgatatctggtcaagatcctgagaagcttctttttggtttcttcaacaccgatggcaagtacatagagtcactgatgacagcaaccaagaggacagatgctgagggtaagatcactggcgccctttgctttcttcatgtggccagcccagagcttcaacatgctctgcaggtgcagaagatgtctgaacaagctgctatgaacagctttaaggaactgacatacatacgtcaagaattaaggaacccactcaatggcatgcaatttactcgaaatttgttggaaccttctgacttgactgaggagcagaggaaacttctagcatcaaatgtcctctgtcaagaacagctgaaaaagattttacatgacactgatctagaaagcattgaacagtgctacacggagatgagcaccgtagatttcaacctggaggaagccctgaatacagtcctaatgcaagccatgccccagagcaaggagaaacaaatttccattgaccgtgattggcctgcagaagtatcatgtatgcacctctgcggggacaatttaaggcttcaacaagtcctagcagacttcctggcatgcatgcttcaatttacacagccagctgaagggcctattgtgctccaagtcatccccaggatggaaaatattggatctggaatgcagattgctcatctagagttcaggcttgtccatccagctccgggcgttccagaggctctgatacaagagatgttccgccacagcccaggtgcatctcgagagggccttggcctttacataagccagaagctcgtgaagacgatgagcggcacggttcagtacctccgggaatcagagagctcgtcgttcatcgtcctggtagagttcccggtcgcccagctcagcaccaagaggtgcaaggcttccacgagtaaattctgaacttagggctatggccaaaattcttgtgggtgctgtattgttgttgttgctgctgctgctattagcagatcaggcagtctgaggagtacgttagctgaagatgtatcagatgtgtgtagcttgtgaaagtgaaggtagtggttggatagatgtatttgtcacgttgatgtctggagagctagtgagcgagctactaggtgttagtgtaatttaaccggcaaatgtatgaacgaattatgaataaaatcttcacttgtgttgtcatgaaaaaaaaaaaaaaaaaaaaaaaaaaaaaaagggggggctcgtgc

SEQ ID NO: 3038 - DNA, 1390 bp, Oryza sativa
  unsure (1)..(1390): unsure at all n locations
  Clone ID: PAT_MRT4530_101669C.1
ttttttttattttttttttttttttntttttttttttttttttaaaaaaggtatcatcacttcatcaagaacttatgtacaacagactgccttctgctttcacttaaaaagcaaaagttttacaacacaatttccttctcggagctaaatccatttggtaaaatggtacatttcccgcacaagaacaggatatgaatagtaccttgatatccagagtaaaaaggaaagaaatgaaagaagaaaaatgccgggaacaaccacaacggcatgcatccacaaccacaaccagatggcaatatgaggacatcaaactatgttgctattcacaagctagcttggtaccaaagctgctgaggctgatagcaaaggcttgaaacgctgagagtggctgccggtaatccatcgtgaagatattgtcatcgaccttaccaaactgcaacagaactgtttcctcatccttcgagctagcaggatcattgggatcagcagcagcaactagttggaaattcttgacagatgcaactgtcacccgcccatggaagttcaagcaccagcactgcaagtgctcatgccagcggggagctttgtttcttagaactgtgttccctgtgggttttctgaacttcgtctttagacagttttcccatgtctcttgagttgaagggcactcaagtgcacaatacattctcctaggacctctggatttgagcaggttgtatttataggaaacctgtccaacttcatagtttcctgctgacacttggggacttatccttctacttccaaaacgccgactggatcgactacttgatgctttagcgccatcatatggtggcttgctatcatatattttgaagtttgtcccccaaaaatcagatctcagtttccccatgtatgcattgcttccttgtgaaaggtcatcagcatcaagggatacgatgtactcggtatggggaccacgtctaaaccttctagcagccatgaggaacttccctttatccacagttgcatttgtcaaaccaaggtagaggtagaacgtagagttcttcttattccgcttaatgaaacattgcattgggaactcccttggccctggctgcttgagcgaggacgggaaggtgatcttgccggactccgcgggcggccgcacgacggcgacggcagcgtcccgccaccgccggcacacgcaggcgcaggagaccacgtccttccgcgcgggccaacgctcgcccccggacgcctccacgcgccgcaccacctcggacatcagctccggcagcagccgcgcccacctctcctcctggtcctccgcctgcccgtcctccccctccaccacctcgtgcacctcgccgccctccggcggcggcggcggcggcgtctcccgaggcat

SEQ ID NO: 3039 - DNA, 1404 bp, Oryza sativa
  unsure (1)..(1404): unsure at all n locations
  Clone ID: PAT_MRT4530_101732C.1
ctcgatcgatccatccatcgatcgatcggtcccccccaccgcgcgcgacgcattccgccgccgtctcgccgtgtccacgtgatgggggccggggctaggggataggcggatagccagcagccaccaccaccagtagttgccgtgtggggataggtgtggctatagggctagtggtcgtcgctgatagcgaggtgggtagggttaattttggttggaggtagagagagagagagagggagggagggaggaggaggaggaggaggaggaggaggaagaacaggaggaagatggggcggggcaaggtgcagctgaagcggatcgagaacaagatcaaccggcaggtgaccttctccaagcgcaggtcggggctgctcaagaaggcgaatgagatctccgtgctctgcgacgccgaggtcgcgctcatcatcttctccaccaagggcaagctctacgagtacgccaccgactcatgtatggacaaaatccttgaacgttatgagcgctactcctatgcagaaaaggtccttatttcagctgaatctgacactcagggcaactggtgccacgaatataggaaactgaaggctaaggttgagacaatacagaaatgtcaaaagcacctcatgggagaggatcttgaatctttgaatctcaaagagctgcagcagctggagcagcagctggaaaattcgttgaaacatatcagatccagaaagagccaactaatgctcgagtccattaacgagcttcaacggaaggaaaagtcactgcaggaggagaataaggtcctacagaaagaactggtggagaagcagaaagtccagaagcaacaagtgcaatgggaccagacacaacctcaaacaagttcctcatcatcctccttcatgatgagggaagcccttccaacaactaatatcagtaactaccctgcagcagctggcgaaaggatagaggatgtagcagcagggcagccacagcatgttcgcattgggctgccaccatggatgctgagccacatcaacggctaaggaggcttcagatccataccagtaatcacaagttgcaacctgacccggtccggtcgcctgctgctctggtttactactagtactattgtcatcttgcggttgcgagacgaggaaagcattttagccctaaattcagcattagtagcaagctgcaatgtgtatattttggcttcgtccagcaccgtcttcctcccaccagtaatttacccatgtaatatatgcgagtagcatgaacaaattttcccgtttccaaccatctccattggtgtcatgtgtgacttaaatagcgaaatttcagcattgtgcatagtgtgattactgtaagataaataaactttgtagacaataagtctccgttatnttgctgataaaaaaa

SEQ ID NO: 3040 - DNA, 2024 bp, Oryza sativa
  Clone ID: PAT_MRT4530_102034C.1
cggacgcgtgggccagacctccaccatcgccaccacctccgcctcgtttccatcgccaccacctcctcccgccgccgccgccgccaccgccgcgatgcagagcctcctcctccccaccttcgccgcggcctccgccgcccccccgcggagggggcgcgtgcctcccgccggtcgcgcctcggtctccgtgcgcgcgtccgcgtccgcggcggcggtggcgccgaggagggagacggatccgaggaagagggtggtgatcacggggatggggctggtgtccgtgttcgggaacgacgtcgacgcctactacgaccgcctcctcgccggggagagcgggattggccccatcgaccgcttcgacgcctccaacttccccacccgcttcgccggccagatccggggcttctcctccgagggctacatcgacggcaagaacgaccgccgcctcgacgactgcctccgctactgcatcgtcagcggcaagaaggccctcgagtccgccggcctcgccctcggctccaaatccatggacaagattgaaaagactcgggctggtgtacttgtgggcaccggtatgggtggtcttacagtgttctctgatggtgttcagaatcttattgagaaggggcacagaaagataactccattcttcattccaggcgaagccgatgtgatgattgctggtggcactgaagccgcaattattccgattggtgtcggtgggtttgtcgcgtgtagagcactttcacagaggaacgatgaccccaaaacagcatcaagaccttgggaccaagaccgtgatggttttgtcatgggtgaaggagctggagtactggtcatggagagcctagaacatgcaatgaagcgtgacgcaccaataattgcggagtatttaggaggtgccgtgaactgtgatgcttaccatatgactgacccgagatctgatggccttggtgtttcgtcttgcattaagcaaagtcttgcagatgctggcgttgcaccggaggaggtcaactacataaatgctcatgcaacgtccaccctagctggtgatctggcagaggtgaacgccattaggcaagtcttcaaggatccatcagagattaaaataaatgcaaccaagtccatgattggacattgccttggtgcggctggtggcttggaagccattgcaactgttaaagctataaccactggatgggtccatccaagcataaaccagtttaacccggagccagctgttgaatttgacacggtacctaatgtaaaaaagcaacatgaagtgaatgttggtatctcgaattcctttggatttggtggacacaattcagttgtagtatttgcaccatttaagccttgattggacattgccttggtgcggctggtggctttggagccattgcaactggtgaagctataaccactggatgggtccatccaagcataaaccagtttaacccggagccagctgttgaatttgacacgggtacctaatgtaaaaaagcaacatgaagtgaatgttggtatctcgaattcctttggatttggtggacacaattcagttgtagtatttgcaccatttaagccttaacttgctgcatgttacacaaatcttggccagaatagtaaatgtcttttcaggaagttctgagttattctgcatgtcttttctttgggtgaagcaactgttgatttgacagccggcaacgttacaatgaactggatctgagattaattccattttaggcactcccatcttccattgaaattgagagctctgtataacgttgttttgcataatttgcaattgattctacctacttctgtataatggaaaatgtgggaatttctagaattgtcatgtagaagcaaaagttagatctcctgttccatagaaatgcttgagccaaggaattgcttgtctgtaatttgtatctggtctagaaaaatgttctcttcatttttttttcttgtccagtatgccaatgtccgtctagtggaataaaatgtattcagttttgctt

SEQ ID NO: 3041 - DNA, 1979 bp, Oryza sativa
  Clone ID: PAT_MRT4530_102156C.1
ctcacactgttacttcaccacgtctcctcctccattgctgcgccgcgccggcgacgacgcgacgacggtcacgacgcgctgagaggtttgttggtggtggcggcgagatgttggagaagaaggcgacgaggagtactagggtggatggggtgagcggcgaggcggtgatcgaggagttcgagcgggtgacgcgcgacgcggccaatgtgcagcgggagacgctgcggcggatcctcgccgagaacggcggcgtcgagtacctccgggggctgggcctcgccggcgccaccgacccggccaccttccgcgcgcgcgtcccgctcgccacccacgccgacctcgagccctacattgaccgcatcgccgacggcgacgcctcccccgtcctcaccgccaagcccgccacctccatctccctcaggtcagtgtccccgcccgccgccgcttgctgctctttgacctcgatcgagaacgtcgctgaccatggcggggatcacctcaccgccggtgcatgcagctccggcacgacgcaggggaagcgcaagtacctgctattcaacgaggagctcgtcaagtccacgatgcagatataccggatctcctacgcgttccggaacagggagtttccggtggagaacgggaaggcgctgcagttcatctacagcagcagggagacgaggacgaagggggggcttacggcgacgacggcgacgacgaacgtgtaccggagcgaggagttcaaggcgacgatgagggacatccagtcgcagtgctgcagccccgacgaggtgatcttcggcccggacttcgcgcagtcgctctactgccacctcctcgccggcctcctcgccgccggcgacgtgcagatcgtgtccgccaccttcgcccacagcgtcgtcctcgcgttccagacgttcgagcgcgcctgggaggacctctgcgccgacatccgccgcggcgaggtgtcgccgtcgcgggtcacctcgccggccgtccgccgcgccatggcggcgctcctcgccgcgcccaacccgggcctcgccgacgaggtcgcccgcaagtgcgccgccctgagcaactggtacggcgtcatcccggcgctgtggcccaacgccaggtacgtgtacggcatcatgacggggtccatggagcactacgtcaagaagctccgccactacgccggcggcctgccgctcgtcgccgccgagtacggcgcctccgaggggtgggtcggcgccaacgtcgagcccgggacgccgccggagcgcgccaccttcaccgtgctccccgacatcgcctacttcgagttcatccccctcaagcccgtcgccggcgacggcggctacgccgaggcggagcccgtcggcctcacggaggtcgccgccggcgagctctacgaggtcgtcatgaccaccttcgcagggctttaccggtatcggctgggggacgtggtgaaggtggcagggttctacaacgcgacgcccaagctcaagttcgtgtgcaggaggaacctgatgctgtcgatcaacatcgacaagaacagcgagcaggacctgcagctggcggtggacgcggcggcgagggcggtgctcgccggcgagaagctggaggtggtggactacaccagccacgccgacgtgtcgtcggacccgggccactacgtcgtcttcctggagctcaacgccgccgaccccgccgccgtcgacggcgacgtgatgcaggcctgctgcgacgagctggacagggcgttcgccgacgccggctacgtcgggtcgaggaagtccggcgccatcgccccgctcgagctccgcgtgctgcagcgtggaaccttccagaaggttctccgccactacctctccctcggcgcccccgtcagccagttcaagtccccccgctgcgtctcccgctccaactccggcgtcctccagatcctcgccggctgcaccgtcaacgtcttcttcagctccgcctacgactga

SEQ ID NO: 3042 - DNA, 1855 bp, Oryza sativa
  Clone ID: PAT_MRT4530_102188C.1
ccggccggggataaaaaccacggaattcccgggtcgacccacgcgtccggcctcatctgtctcatcagatcagcgtgaagcagcggcaagaacacaaaaatggcggacgagaagctcgccaagctgcgtgaagccgtcgccggcctctcgcagatcagtgacaacgagaagtccgggttcatcagcctcgtcgcccgctacctcagtggcgaggaggagcatgtggaatgggcaaagatccacacgccgacggacgaggtggtggtgccgtacgacaccctggcggcgccgccggaggacttggaggagaccaagaagctgctcaacaagctcgccgtgctcaagctcaacggcggcctcggcaccaccatgggatgcaccggaccaaaatcggtcatcgaagtgcgcaacggattcacattcctcgacttgattgtgatccagatcgagtccctcaacaagaagtatggcagcaatgtcccactgcttctgatgaactcattcaacacccatgaagacaccttgaagattgttgagaaatacaccaattcgaacattgaagtccatactttcaatcagagccagtatcctcgtgtggtagccgatgagttcttgccatggccttccaaggggaagacctgcaaggatggctggtaccctcctggccatggtgatatcttcccatccctgatgaacagtggcaagcttgatttgttactttcacagggaaaggagtatgtgttcattgcaaactcagataacttgggtgctatagtggacatgaagatactgaaccatttgatccacaaacagaatgaatattgcatggaggttaccccgaaaactctggctgatgttaaaggtggcacactgatctcatatgaagacaaggttcagctcctggagattgcacaagttcctgatgcacatgtgaatgaattcaaatccatcgagaaattcaagatcttcaacacgaacaatctatgggtgaacttgaaggctatcaagcgccttgttgaggctgatgcactaaagatggagatcattccaaaccctaaggaagtggatggagttaaagttcttcagttggaaacagcagctggtgcagcaatcaggttctttgatcacgcaattggtatcaatgttccaaggtcccggttcctaccagtgaaggcaacatcagatttgcagctagtacagtctgatctatataccttggttgatggctttgttacacgcaacccggccagaacaaacccatcgaatccctcaattgaactgggtccagagttcaagaaggtcgggtgtttccttggtcgcttcaagtcaatccccagcattgttgagcttgacaccttgaaggtttccggtgatgtttggtttggctctagcatcacattgaagggcaaggtgaccatcacagcccaacctggtgtcaaactggaaatcccagatggagcagtgatcgagaacaaggatatcaatggccccgaggacctttgagcgaaaggatgcagagttcacaaagagagatcatatcaccattccatataatcaatcaagctccacgacattgtggagaatatttttgatccaatattgcttcggcataaggaataacaaaattagtacatgtcttttacctacttgactttgcttcttgttctattttctccttgtgagtgggcaaacaagtcatgtcccggcaaaatatcatatgaacatatttggttacatatctgttcaacaatcagcaagaaaacaaaatgttataattccattaacgtttgtcactaaaacctgtgaaaaatcctaaaaaaaaaaaaaaaagggcggccgctctagaggattccaa

SEQ ID NO: 3043 - DNA, 4469 bp, Oryza sativa
  unsure (1)..(4469): unsure at all n locations
  Clone ID: PAT_MRT4530_102208C.1
ccggccgggtatattaaagttgttgtggttaaaaagctcgtagttgaacaattccacacaaggtcttcttctacatctccacccaaattccaaatctctcggtgatcggagcggttagctgcggcgatgtcggggcgcggcaagggaggcaaggggctgggcaagggcggcgcgaagcgccaccgcaaggtgctccgcgacaacatccaggggatcaccaagccggcgatccggaggctggcgaggaggggcggcgtcaagcgcatctccgggctcatctacgaggagacccgcggcgtgctcaagatcttcctcgagaacgtcatccgcgacgccgtcacctacaccgagcacgcccgccgcaagaccgtcaccgccatggacgctcgtctacgcgctcaagcgccagggccgcaccctctacggcttcggaggctacacgagtacagattcgatggtgttgggcgtaacagcgctagcattattatggcgcgtgctccgggtgaggcgttggggctgccactccttgtgatctactcgcaggccggagaaaaaaaaaaaaaaaagccaaaaaagaaatcccaaaaaaaaaaaaaaaaaaaaaaaaaaaaaaaaaaaaaaaaaaaaaaaaaaaaaaaaaatcctccgccgggtggcgacccgccggcccggccgggatcacagaaaccataaacacacaggcatctgattagagaaatctaatggcttcttcttccttttccttcctgcttgttgctgctctgcttggattggcctcatggaaagccattgcctcagaccctagccctctccaagacttttgtgtcgctgatctgaattcgccagtgcgagtaaatggatttgtttgcaagaacccaatgaacgcgagtgccgacgacttcttcaaggcagccatgctcgataagcctagagacacaaacaataaggttgggtccaatgtcactttggtcaatgtcttgcagcttcctggtctcaatacccttggcatctcgatagcacgtcttgactttgcacccttgggtttgaacccaccacacacgcaccctcgtgcaaccgagatcttcacggtgcttgaaggaacactctacgttggctttgttacgtccaacccagataacaggctattgtccaaggtgctcaacaagggtgatgtgtttgtgttccctgaggggctcatccacttccagttcaatcctaacccacacaagccggcagttgccattgctgcactgagtagccaaaatcccggggttattactattgccaatgcggtgtttggatcgaacccacctatctcagatgatattttgatgaaggcgtttcaggtggataagaagatcatagatttgctccaagctcagttctagaagaacaactactgattgtcctgttggttgcaccattaaggacagtatactacatgcacctgatgctatgtaactatcatatatgatacgtagaataagtggggttttatgtgctgaaattgttatcatgcatgatatgctaaagcagtatgttattggacatggaaaaaaaaaaacagtggcgttcttttccctcgtaattaaaatgaaaagcaaacctcttgaagtccaagaaaaaaaaaaaaaaaaaaacagcaaaaaatttgcggccagnanacatnaaaaaatccttatcctcctgccaaatggagcgtgccgctgctgatcggagtggcgcggaggagggggagagcgaatggagggaggagctgcggcagcagcagtcgcaggtcgacgcactgcgggagaggctcgtggaggtcaaggtcgggatgaagtgctccgaggaggactcgaggaaggagctggatcacctctgccgcagggtgaagaccatcgccacgctgctggcctacctcaaatccaaggccaggatcatggcgataccgcacctcgcgcacacgtcctgcgggattaggcaccaggatggcgtggggtacgtcgacaggaacggggtgccactggctgattggtccaagggcggcgagtccgcttcctgcgagggtttagatgatgaaacgtcggcggatagtagtcgtgttgccgaacatggcgatgccaatgagggggatgtagatgtcgaagacattctgaagtcgatacatgtggtgaccgatgtcatggagacccttgtgaagagagtgattgttgctgaatcggaagccgctaacgagaaagagaaggtgaggatgggtctggaagagattaggaggaagaccatacaggttgagtccatgtcggccaaagttgaggaaatggagaaatttgcagtgggtacgaatggtatgctgaatgagatgaggcagagggttgaagacatggtgttggagaccactcgacaaaggcaacgtgcggctgaaaatgagcaggagcttagtcgtgtgaagcatgacttcgagtctctcagaacctatgtcggcactctcgttaatgtcagagaaactcttctttcatcagagaagcagtttgaaacaatggagaaactcttcgacaggctagttgcaagaaccaaccaacttgagagtgagaaagcacaaaaagaagccgaagtccagaaggtggtggaggagaatgtgaggctgcgtgcgatgattgataagaaggaagcgcagcttcaggcgatgagtgagcagtgcaagttcatggcgctgagccaagaagagctccagatagatgtggcgaaacaacggatggtgccaactgctggcgacctacgcgggcacgcggcgcagcgccccacccaagtcgtggacctcgtggtggtgaagggtagtaggcgacggcttcactactacccggccgggacttgtactgcgagccacacgccgcgcccgggcaaaacccacgcgaccccttcctcctccgcctcgacccgatccgatctgagccagagccaaccatggcggcgactagggtttggctctccgccctcctcctcgccttcctcctcgccgccgcccccgtcgtccaagttgccagagctcagtccgaggaagaagctgctacagctgaagttgttgatggggctgatctaggaatcgtcagtgatgatacacaagtttccagcgatgggcctctaagtccggctcctggtgtggagacagtatgtgtttttcccaaaaacgctggcaaaattgtgctagcaggtgaagaaactgaactactggttggcctgcaaaacgagggtgaatcaactttgaatgttgttgctatccattcaactctccatcttccttttgaccataagatgtatggacaaaaccttactgttcagaacttcttcaatgcatcagttcctgtctctgtacaagcaacctttccgtatacattcgccgtgagcaagttcttgcagcctggagcatatgatctagttggttacatagtgtatgagattgatcagaacccataccagaatgtcttttacaatggcactgtagaggttgttgaggctggaggtttactcagcgttgagtctgtgttccttattacccttggagttgcccttcttggtctcttcggattgtgggcatatggtcaagtacaacagctctcaaagaaaacaaagaaggcccccaaggtggaactgggaactggaactactgatgccaacatggatgagtggctggagggcactgcatttgcacagggaagcaaatccaagaagaagaaatagattggaggcccttgaactctagttaatcattttcaggatctagaatgagacagttgagggtagcccttcacaagtaacttttgcagacgatagatgagaaaatggaggtgttttaaaccgtagtttcgtggctgctgcacatgtttgttgacaccaaatttcgaccttgttgtgtacttttacatgaaagttttttcttgaaaaacacagttttgttcaaggtatatgctatggatgtgatctctgatcttatttgatctgtgacatgccgaataacataagttcgatctgagagatgctgaatcacataaatttttattagttgcaaaaaaaaaaaaaaaaaaacgtcccaactagctggatacttcctccgtcccaaaaaaaaaggcaaaccctgggttttcgtgtccaactttaacgatggacggtcaaacgttggacacggaaaccagggtttgtctttttttggacggagggagtacatatgacaagctgttacgcttgttcaatgatgccacttacgaattaccgtcactgcattgttgcaacaagaagagcagctccagatagatgtggcgaaacaacggatggtgccaactgctggcgagtccgttccaggtactctgtgctctgcaaacaaattgtttaccttaatgtaggtgtgatgtgttgggactgtaaacctgacatctttgtattcttgtaacttggaatttgtgtaaaaaaaaaaaccagggcacatttgtccg

SEQ ID NO: 3044 - DNA, 1467 bp, Oryza sativa
  Clone ID: PAT_MRT4530_102369C.1
atgggggagaacgtggttggcacgtactactacccgccttcggcggccgccatggacggcgtggagctcggccacgccgccgccggctccaagctcttcgacgacgacggccgccccaggcgcaacgggacgatgtggacggcgagcgcgcacatcatcacggcggtgatcggctccggcgtgctgtcgctggggtgggccatcgcgcagctcggctgggtggccgggccggcggtcatggtgctcttctccctcgtcacctactacacctcatccctcctctccgattgctaccgctccggcgaccccgtcaccggcaagcggaactacacctacatggacgccgtgaacgccaacctgagcgggttcaaggtgaagatctgcgggttcttgcagtacgccaacatcgtcggcgtcgccatcggctacaccatcgcggcgtccatcagcatgctggcgatcgggagggccaactgcttccacaggaaggggcacggcgacccgtgcaacgtctccagcgtgccctacatgatcgtcttcggcgtcgccgaggtcttcttctcgcagatccccgacttcgatcagatctcctggctctccatgctcgccgccgtcatgtccttcacctactccgtcatcggcctcagcctcggcatcgtccaagtcgtcgcgaacggagggttgaagggaagcctgaccgggatcagcatcggcgtggtgacgccgatggacaaggtgtggaggagcctgcaggcgttcggcgacatcgcgttcgcctactcctactcgctgatcctcatcgagatccaggacaccatccgggcgccgccgccgtcggagtcggcggtgatgaagcgcgccacggtggtgagcgtggcggtgaccacggtgttctacatgctctgcggcagcatggggtacgcggcgttcggcgacgacgcgccggggaacctcctcaccgggttcggcttctacgagcccttctggctcctcgacatcgccaacgccgccatcgtcgtccacctcgtcggcgcctaccaggtgttctgccagccgctcttcgccttcgtcgagaagtgggcggcgcagcggtggccggagtcgccgtacatcaccggggaggtggagctccgcctctcgccgtcgtcgaggcggtgcagggtgaacctgttccggtcgacgtggcgcacggcgttcgtcgtcgccaccacggtggtgtccatgctgctgcccttcttcaacgacgtggtcggcttcctcggcgcgctcggattctggccgctcaccgtctacttccccgtggagatgtacgtggtgcagaagaaggtgccacggtggagcacacggtgggtgtgcctgcagatgctcagcgtcggctgcctcgtcatctccatcgccgccgccgcgggctccatcgccggcgtcatgtcggatctcaaggtttaccgcccgttcaagggttactga

SEQ ID NO: 3045 - DNA, 1531 bp, Oryza sativa
  unsure (1)..(1531): unsure at all n locations
  Clone ID: PAT_MRT4530_102377C.1
acagcactcctatctgctcaaccacttgcttggcttcctctgctccggcgaccgggcggccggcgggccggctgcnagaggtagcgccaggggcacagggctgcaattggaacctgaacttgaaagcaagttgtgcaagaggacagaaaagaatcagtctgaatatggctgccaagcatacgctcctccgctgctgtctcgcgcgagcgtcgtcgtcatcgcctccccgccccgactattcaggtgtaaacctcattcatttgctatgcaccagtacccgctcgcgaatcccgattcccaattccctactcccaaatcccaacctcccattcatcgggtcgtgtcgccgccgacgaacaacacggcgagcggcgccggtagcgagctacctaccctccatctctccagatcccttccagggacagtacaagacaagtcgcacaaaacagaaaatcttgtgatagtttaaatggcttcaaagcttcaagccttttggaaccatcctgctggccccaaaaccattcatttctgggctccgacatttaaatggggtattagtattgccaatgttgcagactttgctaagccacctgaaaagatatcctatccacagcaagttgctgttgcttgcactggagtcatttggtcacgctacagtatggttataacaccaaaaaactggaatctattcagtgttaacgttgcaatggccggcacaggcttgtatcagctttcccgtaaaataaggaaagattacttttctgatcagaaggatgatgttgcatcattggaaggataatgatgactgacatgatgaaaacccggcccacaacctttgagcgatactcaactcactctgaattgcagagacgcgtcgttttctccaagacaggaacctgtcgtttgtttctatgtttctcttgcaccaatttatggatcgatctggaatgttacatcccaaaaaaaaaatcaaataatctttttgacaatctctgcgaataaatgtgcaaatacatcaagtagtctctcctttatgtttctccgttgtttattcacatgttttgctaagaagctgttacagcgaacaatctttctgtttgctatctgaagttactacattgtaacctggctttcagctttcagattaccgtaccctgtctggtaatcgaatgattaaagtttgctgtgattttctgatgtgttgctctgcctggcgcccgccgggggcggcggcgtggagggggcgcgacccccggtcccgccaccgctcgccgccgcgcccctcggtgtccgcccacgagcacgtttccgcgagctcgccgccggcccacccggggaggagctccttcaccgccgtcgccgcctccttcgtcaggaaaccctcggcgatcttgcacaccatgtagtggccctccttgccccacgcgtgggccgtgggggctctcgccatggccgcggcgacgacgacgacgaggaggagggggagcacgcgcgcggccatggttgctctgcggcacgaggcctcgggccg

SEQ ID NO: 3046 - DNA, 1047 bp, Oryza sativa
  Clone ID: PAT_MRT4530_102380C.1
cccaaatcccaacctcccattcatcgggtcgtgtcgccgccgacgaacaacacggcgagcggcgccggtagcgagctacctaccctccatctctccagatcccttccaggtgagagcccgccgcccccaccctcccctcccctcccctccctttcgccgcggacgcctcgctcttcgcctcttcgccgccaccgctttacccccgccgcgcttgatacattcagaatctggcctgctcgcgtgaaccgatccgaggccccctgaatcatgttgttgtttgaacgaatctgattgatgtcctgggacagtacaagacaagtcgcacaaaacagaaaatcttgtgatagtttaaatggcttcaaagcttcaagccttttggaaccatcctgctggccccaaaaccattcatttctgggctccgacatttaaatggggtattagtattgccaatgttgcagactttgctaagccacctgaaaagatatcctatccacagcaagttgctgttgcttgcactggagtcatttggtcacgctacagtatggttataacaccaaaaaactggaatctattcagtgttaacgttgcaatggccggcacaggcttgtatcagctttcccgtaaaataaggaaagattacttttctgatcagaaagatgatgttgcatcattagaaggataatgatgactgactagattaaaccgatctacatcctttgagcgagtctcagcttactctggagtcttggactgcagatatctctggctttacccaagacaagaacctgttgtttctttctgaatttcttctgcacccactgctggagcagttgaaaatactgtccccaaaaatccaaaataatcctttttttgcattttgtgaaaataatatgcatatactcaaaacatccctttctgttatgctggtggtgcccattaaaatttgtatcggggatacttcgctaacagtagtcaaggatctctctgtttgcaatctaaagccacttctgttatcatcagaaagaagctatatactacaatttcccc

SEQ ID NO: 3047 - DNA, 3490 bp, Oryza sativa
  Clone ID: PAT_MRT4530_102471C.1
cctttttttttttttttttttttttttttttttttttttttaaacagccacaacaaggaacatgcatgtctggatgcaacatttgcgtttttttatgtgttcgtttgtgatcatcaaagatggtcgattaatcaacaagttctctgcaaaaatgaatttatatggcagttgccggcggcggcgcgtcgagctccctgagcatggcgaccacctgcagcatgtttgggcgctttgaggggaagtcgtcgacgcactgcagcgccatgtccatgaacctggccatctcgtcggcgtcggcgccctcgacgacgagctccgggtcgagcacctccttcccggcgccgtccccgaccttcatcttgacccagcccacgaggttggtgtccccgaagtcgtccttgtcggtggggcggcggccggtgagcagctcgaggaggacgacgccgaaggagtagacgtcccccttcaccgtgcaccggaagctctggtagtactccggcggcacgtagcccggcgtcccggcgagcgtgctgacgctcaggtgcgtgtccagcgcgctgatgaggcgggccatgccgaagtcggcgacgcgcgcctccatgtcgccgtcgaggagcacgttgctggacttcatgtcgcggtggatgatgtgggggatgcagttgtagtggaggaagcacaggcccctcgccgcgccgcgcgccaccttcttccgctgctcccacgacatcgccggtgatgccgatctgccgccgtcgccgtgcagcgtgtcctccaggctgccgtggctcatgaactcgtacaccagcagccgctcctcgccgatcttgcagtagccgaggagggggacgaggttcttgtgcttgatcttgcccagcgtctccatctccgccatgaactcgcggtcgccctggtagctcaggtggatcagcttcttgatcgccacgcacgacccgtccttgagcgtcgccttgaacacctcgccgaacccgccggagccgatcaggctggcggtggagaagccattggtggcctcgatcagctgcgtgaaggtcagcttccggagctgccgctggaacgtcgccacgttgatgctcagcgcctccttctccgccttcccgagcttccatgtcgtcgccgtccgcgtcccgtcctggaggctgctcagcatcatcgccgagcgcacctcacgccgccgcgcccgcgccgccaccgcccatatcgccgccgcgcacgccagcccggccgacaccagcacggcgaggatcacgccgttggcccacgtcgccacggcgcgccgtgggggcggatccgtcgacgccgcggcggcgagcccggacatggtcgccgtcgggaggcggtcgccgcagggctccagcggcatgccgcacagccccgggttgccggcgtactggctcgccggcagcgtgctgagctggccccgctgcgggatctcgccggagaggttgttgtcggagatgtcgatctggacgaggaaggagaggttggagaaggagtccgggatgccgccttgcagccggttgcgcgacacgtcgaacacgccgaggttgcggaggcggccgagcgacgccgggatctcgccggtgaggttgttccgcgccaggtcgagcacctggagcacgaccatgtcgcccaactcctcggggatctcgccgtcgaggctgttgtacgagaggtcgaggtactccagcgtctggtaccgcgtccacccgctcacggcggcgccggagtagagccgcgtgaagtcgcagctcttgagggtgggcacctgcagcagccgctccggccggattccggcgaactccagcaatcccccaactcccttgcacgagttgccgacgttgcggacgaacgccagcgtgttcccggacaggatgccgctgagcggcgtggagccgagctggcggccgaggcggcgagggatctcgccggtgaggcggttgctgttgaggtccaaccacatgaggctgctgcagttgccgagctccctggggatctcgccggcgaggctgttgttcgccagctgcagcacggcgaggcgggacagccgcccgaactccggccggatggtgccggtgatctggttgctcgtcagcgacacccactcgaggccggtgcagttgaagagctcgacggggatgtcgccgccgatgaagttgttgttcaggatcagcgtccggagattccggcattgcccgagatccgccggaatccggccgtcgaggccattgaaccacatcaccagcttctccagggcgcggagccggccgagctccggcgggatcgggccgcgcaggtagttgatgctgaagtcgatcacccgcagccgcgagcagttggacaagcccggcgggatcgtgccggcgacgaggttgtccggcagccggagctcctccagcgccgcgccgggcgagcagagctcggccgggagcgcgccggagatcttgttgctgctcaggtcggcgacgcggaggttcttgcagtgggcgatggtatccgggagagagccggagatgaagttgttgctgaggaggaggctctcgaccgccgtgaggttgccgagcacggcggcagggatcccgccggagacgttgttgttggcgacgtcgagcagccggagcgcgtggcacgacgacagcgactccgggatggagccggagatgttgttactcgagacgcggaggacacgcagcgacgcgcacgcgttcctcccgaggccgggcgggatggcgccggtgaggtggttccacgacacgtcgagcacttcgagcccggcgatggcgccgattccctccggtatcgcgccggcgaggccgttgtacgacaggttgagcgtcgtgaggcccgcgcagccggacagcgacggcgggatggcgccggtgaagcggttgccggacaggtcgaggacggccagcgtcgcggggagcgacacgccggagatgtcgccggacatgttgttgccggacacgtcgaacgaccggatattgctcgccaggagcatcccgggaagctcgccggtgaggttgttcctcgcgaggctgacatcggtgaggttggggtaacacgccagaaagccgtcgggaagccggccggcgaggccgccatcggagaggtcgagctgcagcagcgcgcgcgggagcttaaccaggtcaccggcatcaacgtgcagctcgccattgccggagaggttcaacctgcacaacgtgtcgagaccagagagggcggcaagctcggcgcgcccggcgaggccgccggcggcgaggtcgagctccgtcaccctgccgtcgccgttgcacgtcacgccacgccagcgacatggaccaggatccacccacgacgagaggactcctctaggatccttgtggacgaacgccttgaagcggaggagcgccgccgcatcggtttccgccgccgccgccgacgacgacacgtagatcgaggagaggagaagtgggatgagaatgtccat

SEQ ID NO: 3048 - DNA, 817 bp, Oryza sativa
  Clone ID: PAT_MRT4530_102501C.1
ccccgcgtccggaagaaggggagaaaataaaaagctcaccggcggcttctctcctctcgccggtcgacggcgcgatgctgcgcggattccctcaggcccggaggctcctcaggaggatggggttggagaaggaagacgcctacttctggaagcagatgggcaagggcatgctctgcacctacgcgctcttcggcgccgcctggctctggaacgagacctctcccctcggctggtggacgctcaagccgcgccccaaggaagaaagagaaatggcccacctttacgagcgcaggatgtttccatacccaggtgatgaagaggcagttgaggagttcataaaaagtggaggtgctctaggcaccacaattggacccaaaggttttgctgattccaacatggactctgataacatgcagaaacaattgcagtcaaaaaagtttgaccaagaagcacagaagctctggtttcggatgaggaatgaggtcgtacaagaactccaagagaagggattcgatgttgaatgaaattttacttctacataaacagaaatggagtaaagctgaagtatgtgcaaattgtttcagcttgttagccgtctaggaaattaggagcttagaatgcacgcaaaatgttaaaacacctactttgcaatctggagatttttttttttaatttgagaaagcaatctggagaatctagagagtttactattcaacttcaatttggtcttgttgggtcattgcattccatcagttacagattttgtaccttaaagatatggtatcagttaccagtatctccacgcgtttcagttttg

SEQ ID NO: 3049 - DNA, 1280 bp, Oryza sativa
  Clone ID: PAT_MRT4530_102600C.1
ttttgttgtgttgtttttgctccgtactccttttgaaataaaaccacaaccgtagtatagttttaaatcacaatcttacaagctgcaattacccatagctgaagtccaaattttgtggttctagtatattttttttttttttttttttttttttttaagcaaagggaaccaagtttgcattaaggtttagtactcaatcaaagttaacaaccgaccacaaatacagtgttccaatgactgaagcagtacgaggaaaccattacacagatggattgctgatatatgaaaagcttgactaaaacctacacggtaactaggactcatcacacaaaagtccagtttaaactaaggatgctcctgtcctaatcttcactctttggaggacttgttgatcagggacttgtggatgtgaggaatgacacctccaccagcgatggtacccttgatgagagtgtcgagctcctcatctccacggatggcaagctgcagatggcgaggggtgatacgcttgaccttcagatccttgctagcgttcccagccagttccagaacctcagctgttaagtactccagaatagcagcagagtaaactgcggcagtagcaccaacacgtccatttgcctgagtcctttgcttcaactggcgatggatacggccaacagggaactggagaccagcgcgggacgagcgggagacgggggccttcttccccttgtccttctccgccgacttggcggccgtcgtcttcgcggcgagcaagcccttacctccttttcccgccatcgctctctctccctctccctctccctctcctgtctcctccccttccgctccgctcgaacgcccgcgcgaccccggcggcggaaaccctttcgcgagctcgcggagcctcggcttcctcctctcctaccccctgacgcgacgcggacgaaagcgagatttttttttcccggcggcgaaatccgcgcgggaagcggaggaatttgggggcggattcggggcggcgaggaggcggaaacccccggtcccctgcagcccggggatgctcctgtcctaatcttcactctttggaggacttgttgatcagggacttgtggatgtgaggaatgacacctccaccagcgatggtacccttgatgagagtgtcgagctcctcgtctccacggatggcaagctgcagatggcgaggggtgatacgcttgaccttcagatccttgctagcgttcccagccagttccagaacctctgctgctattctggagtactacagcctcgtgccg

SEQ ID NO: 3050 - DNA, 887 bp, Oryza sativa
  Clone ID: PAT_MRT4530_102751C.1
cccacgcgtccgcccacgcgtccgagcttctagctgtgatcaagcaaagaagaattgaaaaaaaacatatatatattatatatatggcaggggtgtgggtgtttgaggatgggatggtgaggagggcagatagcgaggcgccgtcgagagggcgcggtgtcggtggtggaggtgggggagggaaggtgcttgtgcacgtgccgagcagcgaggtggtgacgagctacgaggttctggagaggcggctgcgggagctcgggtgggagaggtacctcaacgacccgtgcctcctccagttccaccagcgctccaccgtccacctcatctccgtgccccgcgacttctcccgcctcaagctcgtccacatgtacgacgtcgtcgtcaagacccgcaacgtcttcgaggtccgtgacgccgccaccactgcttccccgccatgatcgcatcgatgtctatgctttgatcatcatcgatatgaccttcctcgactccgggctcaggccagacacgccgccatggcgcctacaatcgtatgtgtgtattgtatgaatctcaattcaggtaatgaatgattgtatatcatatgatttgtaattctgtacaggtataacgtatgcgtatatacgtacgtgtgcgatcgatcgggtgtgtgtgatatatattaaaataagcgtggctggtttaattgcaagtgagtgtttagttatttaattatacgagagccatgagcacgtgtgtagctagctttggagtcttgtactttgtggtttggagccattgcttgactgattccgtggcacgaatcaatcatccatgcgttatgcagtgacaataaataattagttttgtcacaattaattaatagtatgttgtttgctgtattgatt

SEQ ID NO: 3051 - DNA, 1259 bp, Oryza sativa
  Clone ID: PAT_MRT4530_102917C.1
ccgccggccggggggtcccctccccttcccccctcccctccggcgaactccgagctcttcccggtgagcgccgccgattcggccggagaggctcgccggagtcgcctccgccctgcccacgatggccgccaacttctggacgtcgtcgcactgcaagcagctgctggaccaggaggacgtggacaaggtcccccaggcggacagcgaccggggcatcacgctggaggagttccgcctcgtcaagatccacatgtccttccatatctggcgattggcacaacaggtgaaagttagacaaagggtgatagctactgctgttacttatttcaggcgtgtatacacaagaaagagcatgactgaatatgatcctcgtctggtagcaccaacctgtttgtatttggcatcaaaggtggaagagagcacagtgcaagcaagacttcttgtcttttacataaaaaagatgtgtgcttctgatgagaagtaccggtttgaaatcaaggatatccttgaaatggaaatgaagctcctggaggcacttgactattatttagttgtttaccacccatatcgtcctcttttacagttattgcaggatgctggcataacagatctgacacaatttgcctggggaattgtcaatgatacttacaagatggatcttattctcatacacccaccatatatgatagcattagcctgcatctacattgcaagcgttcttaaagacaaggacataactctgtggtttgaagagctccgtgttgacatgaacattgtcaagaatatctcgatggaaattttggacttctatgacacctacaagattgatcctcaaagagggctcccagaggacaaaatagcccctgtgatgaacaaactgccttcaaaggcctaaagcagactgagccctagttcagttgttatcagtctgagcgtcaaatcaccttatgctcgtacaacaggaaatatgtgtcaccttccttggagaactttatatttcaaagccatatatatatatagtatcagaattcagaattgcccctaacgaacgatttaattcagaattccgaactatatacagctgttcctgttgcagcagcttgcgaggcaaatcatttacaatgaagatcccaacgggttgggaatggtctgtatctgtatgtgtttttgatgtgtaaaaaaaaacatggctttggtactatttagtttctatagcaaatgaaatcctgaaaaattcttgcggtgaaaaacaccaaaac

SEQ ID NO: 3052 - DNA, 834 bp, Oryza sativa
  Clone ID: PAT_MRT4530_102919C.1
atggccgccaacttctggacgtcgtcgcactgcgagggcagcaagcagctgctggaccaggaggacgtggacaaggtcccccaggcggacagcgaccggggcatcacgctggaggagttccgcctcgtcaagatccacatgtccttcctcctacaaattaaggcaaatcatttgatgatttcagatatctggcgattggcacaacaggtgaaagttagacaaagggtgatagctactgctgttacttatttcaggcgtgtatacacaagaaagagcatgactgaatatgatcctcgtctggtagcaccaacctgtttgtatttggcatcaaaggtggaagagagcacagtgcaagcaagacttcttgtcttttacataaaaaagatgtgtgcttctgatgagaagtaccggtttgaaatcaaggatatccttgaaatggaaatgaagctcctggaggcacttgactattatttagttgtttaccacccatatcgtcctcttttacaatgctttgattttaggttattgcaggatgctggcataacagatctgacacaatttgcctggggaattgtcaatgatacttacaagatggatcttattctcatacacccaccatatatgatagcattagcctgcatctacattgcaagcgttcttaaagacaaggacataactctgtggtttgaagagctccgtgttgacatgaacattgtcaagaatatctcgatggaaattttggacttctatgacacctacaagattgatcctcaaagagggctcccagaggacaaaatagcccctgtgatgaacaaactgccttcaaaggcctaa

SEQ ID NO: 3053 - DNA, 200 bp, Oryza sativa
  Clone ID: PAT_MRT4530_102927C.1
atcggacgctacctaaagaagggccgctacgcccagcgcatcgggaccggcgccccagactacctcgccgacgagctagagtacctcgctgccgaggtgctggagctcgccgggaacgcggtcagcgacaacaagaagaacaggatcataccgcgccacgtgctgctggcgatcaggaacgacgaggagctctgcaagct

SEQ ID NO: 3054 - DNA, 2388 bp, Oryza sativa
  Clone ID: PAT_MRT4530_102993C.1
atgggtaagttcctgtgcccactcttcatttccttcatctccgttcttttgtgctgcgccgcatctgcatccccatggcaaaccacaggcacaggtacatctctccaggtagatcatggagaaaccttccttgtttcaccagacacaaccttctcctgcggcttctacccatctggagatgacacaaacgccttctacttctccatctggttcacccatgccaccgacaggacggtggtctggaccgcagactctggccttccggtgaacggccatggctccaagatatccctgagccatgagggcaacctggcttttaccgatgtcaatggcaccacggtctgggagagcaagactggctggggcaagcacaccacggtggctctgctcaacagtggcaatatggtaatgaaggcatccgactccgaggataagatcgtgtggcagagcttcgactggcctactgacaccctgctaccatcgcagcgtctcacaagagagaagaggttagtctcccaatctggtaaccatttcctgtatttcgacaacgataatgtcctccggctccagtacaatggaccagaaatcacaagcatatactggccaagtccagactacaccgcagtgcagaacggccggactagattcaacagcagcaagatagcggtcctggacgacgagggcaggttcttgtcaagcgacgggttcaaaatggtagccctggattcaggtttagggatacagagaaggatcacaattgattatgatggcaacctcagaatgtacagcttgaatgcatcagatggcaactggactatcacaggggaaggtgtattgcagatgtgctatgtgcatggattgtgtggaagaaatggaatttgtgagtactcaccaggtctcagatgtacttgtcctccaggatacgagatgactgatcccgagaactggagtagaggctgcaggccaacattcagcgtcagctgtggccagcaacgcgaggattttacgttcgtcaagattcctcatggtgactattatggctttgatctgacttcaaacaagtcaatctcgcttgaagaatgcatgaggatttgtatggacagctgcgtgtgcttatcttttacctacaaaggtggagatggtctatgttacactaaaggcctgctctacaatggccaggtttatccatattttcctggagacaactacatcaaacttcctaagaacgttgcttcaacatccttgatctccaaacatcatggtcttacctgcaagccaaatgcttcaaaagttatgttagtatccatagatgcatacagaaaaaattctgacaacataatgtgggcatacttatatgtttttgctactataataggagcagttgagttggtctttatcatgacagggtggtactttctttttaaaatgcataacatacccaagtccatggagaaaggttacaaaatgataacaagccagttcaggaggtttacataccgcgaattggtggaagcaacgggaaaatttaaagaagagcttggaaaaggtggcagtggtacagtttacagaggaatacttggggataagaaggtggttgcagtaaagaaacttacagatgttagacagggtgaagaggaattttgggcagaagtgacgttaattgggaggatcaatcacataaatttggtcagaatgtggggattctgctcagagggtcgtcagaggttattagtctacgagtatgtggaaaatgagtcattggataggtacctttttgatgacagtggcaccagaaatttgctctcatggagccaacggttcaagattgccttaggaacaactagaggccttgcctacctccatcatgaatgccttgaatgggttgttcattgtgatgttaagccagaaaacatactgctgaaccgagattttgaagccaagatagcagactttgggctatccaaactttcaaagagagacagttctacctttaacttcactcatatgagaggcacaatgggctacatggcaccagaatgggcactgaatttgccaatcaatgcaaaggtcgatgtttacagctatggggttgtgcttctggagattgtgactgggactagagtttcaagtgggataacaatagaagaagaaaacatagacttgatgcaattcgtgcaggtggtaaaacagatgctcactagtggtgaggtcctggacactatagtagacagtaggctgaaaggccatttcaattgtgatcaagcaaaagcgatggtgaaagcagctatttcatgtcttgaggaaagaagcaagaggccaacaatggatcaaatcgtaaaagatctcatggtatacgacgatgaagattatcacccagcatacttttga

SEQ ID NO: 3055 - DNA, 305 bp, Oryza sativa
  unsure (1)..(305): unsure at all n locations
  Clone ID: PAT_MRT4530_10588C.1
accccagcaaaaaaaccaacnagcnaggccggccanggagacggnggccgcggccagcaacacccgcggggcggcgacgcgcccgccagcgngcagcgccgccaagnccnncncgcagnccaacaggcccaaggccgcnagaccgccgagcacgnncaacggcgagncgcngcgggnaaacacggcgaggncgcngccgncagggaggcagnccaaggcggcgagccgggcggcgcgcagcacccggngcgagaacggggacagccnggaggagnnccagaccaaggcgacgccggaaaagaacc

SEQ ID NO: 3056 - DNA, 752 bp, Oryza sativa
  Clone ID: PAT_MRT4530_1065C.1
ccggccggggctgtcgcggatccatcccatcccatctcttcctcgtctcccactcctccggattctttctgttcttggttgattgccggagatgtcggattcggaggagcatcacttcgagtccaaggccgacgccggcgcctccaagacctacccacagcaggccggcaccatccggaagaacggatatattgtcattaagaaccgcccctgcaaggtggttgaggtctctacttccaagactgggaagcatggtcacgccaaatgccactttgttggtattgacattttcaatggaaagaagcttgaagatattgtcccctcatcccacaactgtgacgttcctcatgttgatcgtactgattaccagctgattgacatttcggaagatggatttgtgagccttttgactgagagcggcaacactaaggatgacttgaggcttcccactgatgatactctgactaaccagatcaagaacgggtttggtgaagaaggcaaggatatgatcttgactgtgatgtccgccatgggtgaagaacagatctgtgccgtcaaggagattggggccaaaaactaagcggctttgctcgattgcctgcctgcctacgatactttgctatcttagtgttgagagctgagacacataaatagaagttttttttatgctacctgtggatgaaatgacgatcaaaaccttcatcgattttatgttacactggatggtcatgagatacttgttaatgcttttt

SEQ ID NO: 3057 - DNA, 1732 bp, Oryza sativa
  Clone ID: PAT_MRT4530_10807C.1
atggcggtgcaccactccctcgaggtggccgccgcaggaggcgacggcggcggcggccgatgctacgacgacgacggccacccggcacgcaccgggacggagtggacgtgcggcggcgcacgtgatcacggcggtgatcgggtccggggtgctgtcgctggcgtggagcgtggcgcagctggggtggctggcggggccggggatgatgctcgtgttcgcggccgtgacggcgctgcagtcggcgctgttcgccgactgctaccgctcgccggacccggaggtcggcccgcaccgcaaccgcacctacgccaacgccgtcgagcgcaacctaggtagctcgagcgcgtgggtctgcttgttgctgcagcaaacggccttgttcggctacggcatcgcctacaccatcaccgcctccatcagttgcagggcgatcctgaggtccaactgctaccacacgcacggccacgacgcgccctgcaaatacgggggtagctactacatgctcatgttcggcgcggcgcagctgttcctctccttcataccggacttccacgacatggcgtggctgtcggtcctcgccgcggtcatgtcgttctcctactcgttcatcggcctcggcctcggcctcgccaacacaattgctaatggaacgatcaaaggaagcataacaggtgctccaacgagaacccctgtgcagaaggtctggcacgtctcgcaggccatcggcgacatcgcattcgcgtacccgtactcattaatcctcttggaaattcaggacacactgaaggctccaccggccgagaacaagacgatgaagaaggcgtccatcatctcgatcgtcgtcaccaccttcttctacctctgctgcggctgcttcggctacgccgccttcgggagcgacgcccctggcaacctcctcaccggcttcggcttctacgagccctactggctcatcgacttcgccaacgcctgcatcatcctccacctgctcggcggctaccaggtgtacagccagccgatataccagttcgcggacaggttcttcgcggagaggtacccggcgagccggttcgtgaacgacttccacacggtgaagctgccgctgctgccgccgtgtcgggtgaacctcctgcgggtgtgcttccggacggtgtacgtggcgagcaccacggcggtggcgctcgccttcccctacttcaacgaggtgctcgcgctgctcggcgccctcaacttctggccgctcgccatctacttccccgtggagatgtacttcatccagcgccatgtcccgcggtggtcgccccggtgggtcgtgctgcagtcgttcagcgtcctctgcctcctcgtcagcgccttcgcgctcgtcggctccatccagggcctcatcagccagaagctaggctaaagatttagcctagcatcctgaatttcggatttgctttttctttgtgtaaccgtaatgggatgagaatgcatttggtggtcgtgtgttgtttgtaacaactggggagcggagctttgtccctggtgaatggcgcgatgaactcatgaacaatagcatagtggtggtggtacattgtgtctgcaggggtcagagggtggtggcactctgtttttcagtgcctttcctcctgtgctgcagagaaactgctcctatatatgtacagaatgtcgtcatattattgccatgatacttggaacggtgaaaggaacctgctcttgaatgatgtat

SEQ ID NO: 3058 - DNA, 246 bp, Oryza sativa
  Clone ID: PAT_MRT4530_10972C.1
gttcgagccaggggagctcaagtcgtggtctttctaccgggccgggatcgccgagttcgtcgccaccttcctcttcctctacatcaccatcctcaccgtcatgggggtcttcaagttcttcttcaagtgcgccaccgtcggcattcagggcatctgctggtccttcggaggcatgatcttcgcgctcgtgtactggaccggcggcattttcggaggacacaataacccaacagttacttttgggct

SEQ ID NO: 3059 - DNA, 1152 bp, Oryza sativa
  Clone ID: PAT_MRT4530_11027C.1
cacgagggagacactgtgtcagtcactgagtcacactcacagtgccactgatccgccatgagctagctcaagcgctgcggcaggcggcgcgcgggtcgccgccgccgccgccccgccccccccccccccaggcgcgtcggttccatcgccaccggccgggccggcctcccctcctcccccctcgccgtcgccgccgccgccgccgccgacgccgccgcgaccacctctcgcaaggggattttgtaggggtttctgatccgaggagcgggcgatgtcggactccgaggagcaccacttcgagtcgaaggccgacgccggcgcctccaagacctacccgcagcaggctgggaccatccgcaaaaatggctacatagtcatcaagaaccgcccctgcaaggttgttgaggtttcaacctctaaaactgggaagcacggtcacgccaagtgccactttgttgcaattgacatctttactgccaagaagctcgaagatattgtgccatcttctcacaactgtgatgtcccgcatgtgaaccgtacggagtaccagctcattgatatatctgaggatggatttgtgagtctgttaactgaaaatggcaacaccaaggatgacctcaggctccctactgatgataacctgcttagtcagatcaaggatggatttggagaagggaaggacctggtggtgactgttatgtctgccatgggagaggagcagatctgcgcgctgaaggacatcggcccgaagtaaacctcacctgttccatgtgattactactgaactttcagttatgatcggtttgggtatgtaggaacaaggattctcttaaaacatacagagtcacaaccattaaggaattgtatcacaaaactcgtccccgccagtcaggctcttatttatctgggtctcgtcgtcgattcactgtcctaaatttcctgagttcctgtacccctaaaccaccatccctagacgttttgttaaccctttgggtatttggtagcaactttcattgtggagttggattgtgtgcttaaggtgaaaatatcatttgtgataaaccaaaaaaaaataaaaagctgtcaccatgaccactgctattagcatctgcagatgcaacttttgacagttaaaaaaaaaaaaaaaaaaaa

SEQ ID NO: 3060 - DNA, 1432 bp, Oryza sativa
  Clone ID: PAT_MRT4530_11056C.1
ccccgggcgccaggggcgcggcccgagggaggcacttttcaggctggcaccttggggtagcgggcgccgcagtcccgtcggggggcggaccagcgagcaaccagccccccgcccccaatggcggcagcagcagcagctttgcccaccgctgccgcttttgcccacctctcctccgattaatcccctcccctcctcttcctcccacttctccgcctcctcttcctcccctcgccgaccctacctactcgcgccgccgccgtcgcattgggcggcaaacggagggggggttaaccctgatggagcagtacgagaaggaggagaagattggggagggcacgtacggggtggtgtacagggcgcgggacaaggtcaccaacgagacgatcgcgctcaagaagatccggcttgagcaggaggatgagggcgtcccctccaccgcaatccgcgagatctcgctcctcaaggagatgcatcacggcaacatcgtcaggttacacgatgttatccacagtgagaagcgcatatatcttgtctttgagtatctggatctggacctaaagaagttcatggactcttgtccagagtttgcgaaaaaccccactttaattaagtcatatctctatcagatactccgcggcgttgcttactgtcattctcatagagttcttcatcgagatttgaaacctcagaatttattgatagatcggcgtactaatgcactgaagcttgcagactttggtttagccagggcatttggaattcctgtccgcacgtttactcacgaggttgtaaccttgtggtatagagctccagagatccttcttggatcaaggcagtattctacaccagttgatatgtggtcagttggttgtatctttgcagaaatggtgaaccagaaaccactgttccctggtgattctgagattgatgaattatttaagatattcagggtactaggaactccaaatgaacaaagttggccaggagttagctcattacctgactacaagtctgctttccccaagtggcaagcacaggatcttgcaactattgtccctactcttgaccctgctggtttggaccttctctctaaaatgcttcggtacgagccaaacaaaaggatcacagctagacaggctcttgagcatgaatacttcaaggaccttgagatggtacaatgaccctgctatggctttacattggattggcatatgtatgggctgggctcctcatttcattccttctgtgaacgctgtgcccttcgtttgggcatttttgtcattcagctggatatttcaaatcttgtgtgtttgatatgtattcaggaacgctaaatagatcaccgtcttggtctctatttgttcagagtaaatatcttccaatgctgcctttcagtttccaaaaaaaaaaaaaaaaaaactcccgaattcct

SEQ ID NO: 3061 - DNA, 280 bp, Oryza sativa
  Clone ID: PAT_MRT4530_11109C.1
aaaacttgggtaaatatagctcaacttgtacaaagttcacataaaaaggcattgattcatgacacttagagagccatgcacaccacttattaggacacacaaagggcaaggctgcagagaaattcaaccaacacaagctgaactaacggccccacctgtcaacctttaactggtcgaggccggatactcttgtgaaaaacagcaacaccacccatgcagaaaaagacaaatttttacacacacaaatcgacgacactgcagcctacgacatacggggagg

SEQ ID NO: 3062 - DNA, 904 bp, Oryza sativa
  Clone ID: PAT_MRT4530_11190C.1
ccatcatcgatcgatcgatcacaactactagaaatccagccaagaagatcgagaccggatacagctagcaatccatccaagaagatcgagagagcggatacagctagcctagctacgcgaaggatcagatcatcggcatggagctggagcttgggctggcgccaccgaattccggtcatctcgtcgtcgacgagctcagcagcagcagcagcagcggcggcggcagcggcagcgcgccggtgtctgcctcgtcggccgggaagaggggattcagggaggcgttccaggagacgctgctgctcttcgacgacggcagctgctgcaacaccagcgacgacgattgcaggaggaggaagaagacggtggtggggtggccaccggtgagctcggcgcggcgggcgtgcggcggcgccaactacgtgaaggtgaagaaggaaggcgacgccatcgggaggaaggttgatttggccctccattcctcctacgacgagctcgctgccacgctcgcccgcatgttccccaccaacgaccaccaaggcgagaagaaaatggccaatgatgatcatggcgatgccgctggacctgtggtcacctacgaggatggtgatggggattggatgctggttggggacgtgccatgggatgattttgcacgatctgtgaaacgcctgaagatactgggttaactgaactgaaggagatgcatgcgtgagttgatggagcacagctcggttttggttgcctggcatctgcgtgtgggtgtgcactgatgtatgtacatgttttcgttttcagtcaggatgttaggacgagagaaagagctttctgtcaaagactatatactgctagcttatatatactgtagttgggcacatctcatgtgtgcccagggctaggttttgag

SEQ ID NO: 3063 - DNA, 1517 bp, Oryza sativa
  Clone ID: PAT_MRT4530_11246C.1
ctagtggatccccgggctgcaggctgtgaaggttgtccacttccttttcatgaagtggaagaggactaacaaaatagggcatcatcatcagcagtgcagcagattctagggattcagaactctaagcagttcagatgtaacaccaactaatgttagaaagcctgcactaccctattatgattcaattaaattttttggtgtgaggaataatgggcatttaacatgttcagtttggagaggatacaagcaaaaggcaaacactatatagatggactacctgccccagcacaagagggccgccgccgccaccgaagtaatcccttaattggtcaaaatgtctcgggaggagaatgtctacatggccaagctggccgagcaggctgaaaggtatgaggagatggttgagtacatggagaaggttgcaaagactgtagatgtggaagagctcactgttgaggagcgcaacctcttgtctgttgcttacaagaatgtgattggtgcccgccgtgcctcctggcgtattgtctcatccattgaacagaaggaggagggtcgtggcaatgaggaacatgttactctgatcaaggagtaccgtggcaagattgaagctgagctgagcaagatttgcgatggtatcctgaagttgcttgactcacaccttgtgccctcatctactgctgcagaatctaaggtgttttacctcaagatgaagggtgattaccacaggtaccttgcggaatttaagactggtgccgagagaaaggaagctgctgagagcacaatggtggcttacaaggctgctcaggatattgctctggcggatcttgctcccacccatcccataaggcttggactggcacttaacttctctgtgttctactacgagattctaaactctccagacaaggcttgcaaccttgctaagcaggcgtttgacgaagccatctccgagttggataccctcggggaggagtcttacaaggacagcactttgatcatgcagctcctgagggacaacttgaccctctggacctctgacctcacggaggacggtggtgatgaggtgaaagaagcctccaagggcgacgcctgcgagggccagtaaaatgggaagatcgatcgatcgatggctccgcatgttattggagaccatcgatttagatgccctcatgctgctgtcaccatgatggatggattcttctcctgttctactagaatgtttttcttcctgtccccccttcctctctcttctctggtttttactagggtggtagcggtcgaattagttcttcccattgctttgcatttggtgctagtggtccgtctgggctgattgttttcctctggatatgactctcgtgtgtgttgtctccagatagtgttttattgagcaatatttaaagttgtcgtccacctaaaaaaaaaaaaaaatcaacaaaaatacaatgtagaaaaaaaaaaaaaaaaaaaaacaatcggtgaggccggccccccgagggccggcagcccggggatcc

SEQ ID NO: 3064 - DNA, 1816 bp, Oryza sativa
  unsure (1)..(1816): unsure at all n locations
  Clone ID: PAT_MRT4530_11349C.1
cccgggctgcaggaattcggcacaaataataatgtcttgcatgttgctcccctctgctgcttcttcttcttctggagcatcgagagagagagagagagggggggagagaggtggcagggcagcaatcttcttcctcctctctcgtcttctagatcgttagaacgtcagcaatggagaacatgagatctgagaactttaaccaaggtgtttcaatggagggcgtcaagcatgcgcccgagatggcaaacaccaacaggagggctctgcgggacatcaagaacatcatcggagcacctcaccagcacatggctgtgagcaagaggggtttgctagataaacctgccgctaagaaccaatctggacaccgtcctatgacgaggaaatttgctgcaacactggcaaaccaaccctccagtgctcccctggcacccattggaagtgagaggcaaaaaaggacagcagattctgcatttcatggtccagcagatatggagtgcaccaagatcacatctgatgatttgccattgccaatgatgtctgagatggacgaagtgatgggttctgaactgaaagaaattgagatggaagacattgaggaggcagcacctgatattgacagctgtgatgcaaataactcccttgcagtagttgaatatgttgatgaaatttacagcttctacaggaggagtgagggtttgagctgtgtctctcctaattacatgttgagccaaaatgacataaatgagaagatgcgcggcattctcatcgattggctgatagaggtgcattacaagttagagctattggatgagaccctcttccttactgtgaatatcatagaccgattcttggctcgcgaaaatgtggtgcgaaagaagcttcagttggttggcgtgactgccatgctgctcgcctgcaagtatgaagaagtgagcgttcctgtagtggaggatcttatcctaatctgcgaccgcgcctacacaagaacagatattctcgaaatggagaggatgattgtaaacactcttcagtttgatatgtcagttccaactccatactgtttcatgagaaggttcctcaaggctgcacaatctgacaagaagcttgagctcatgtctttcttcataattgagctgagccttgtcgagtatgagatgctcaaattccagccgtcaatgctggcggctgctgccatctacactgctcagtgcaccattaatgggttcaagtcctggaacaaatgctgtgagctgcatacaaaatactctgaagaacagctgatggagtgctccaagatgatggttgagctccaccaaaaagcaggacatgggaagcttactggagttcatagaaagtacagcacatttaggtatggttgccccgcaaaatcggagcccgccgtcttcttgctcaagagcgtggcactgtaactgattggctcactatacacactctaactacttccatggaaagagggaatgaggggtgtatatatagaggccggctgctttgatgaaattacagagaagagatctgcatatatgcaacagctgttgcaaaggattatttgatgggtgggttgggttggtgcaatgtgtgcctttacttccaataacttaacatcgtcgagacattgatctgcgtttggatgttttaggttgcttccaattaaatctgttggaacttgatttcatgttgtatttaagagaattattcttcatttgttctgtggcacatgcaatttgccaataaacattaattgaattgcctgttnaaaaaaaaaaaaaaaaaaaaaaaaaaaacaaaaaaaaaaaaa

SEQ ID NO: 3065 - DNA, 1157 bp, Oryza sativa
  Clone ID: PAT_MRT4530_1149C.1
atgggctcatcctgtagcagatctcattctttaagtgaggctgaaacaaccaaaaatgcaaaatctgcagacattgacaggcgaattttgcaagagacaaaagcagagcaacacatccacaagctcttacttcttggtgcgggagaatcagggaagtctacgatatttaaacagattaagctccttttccaaactggctttgatgaggcagaacttaggagctacacatcagttatccatgcaaacgtctatcagacaattaaaatactatatgaaggagcaaaagaactctcacaagtggaatcagattcctcaaagtatgttatatccccagataaccaggaaattggagaaaaactatcagatattgatggcaggttggattatccactgctgaacaaagaacttgtactcgatgtaaaaaggttatggcaagacccagccattcaggaaacttacttacgtggaagtattctgcaacttcctgattgtgcacaatacttcatggaaaatttggatcgattagctgaagcaggttatgtgccaacaaaggaggatgtgctttatgcaagagtacggacaaatggtgttgtacaaatacaatttagtcctgttggagaaaacaaaagaggtggagaggtatataggttgtatgatgtaggaggccagaggaatgagaggagaaagtggattcatctttttgaaggtgttaatgcggtaatcttttgtgctgccattagcgaatatgatcagatgctatttgaagatgagacaaaaaacagaatgatggagaccaaggaactctttgactgggttttaaagcaaagatgttttgagaaaatacaaaaggttcctttaagtgtgtgcgagtggtttaaagactaccagcctattgcacctgggaaacaggaggttgaacatgcatatgagtttgtcaagaagaagtttgaagagctctacttccagagcagcaagcctgaccgtgtggaccgcgtcttcaaaatctacagaactacggccctagaccagaaacttgtaaagaagacattcaagttgattgatgagagcatgagacgctccagggaaggaacttgattcagagctaagactaggttgtaagtcacacagggaaggtaattaggacggcgagaggaaca

SEQ ID NO: 3066 - DNA, 813 bp, Oryza sativa
  Clone ID: PAT_MRT4530_11646C.1
atggggaggcctccttgttgtgatgagaatggcctcaagaagggcccctggactcctgaagaagatgagaagctcatgagctacattcagaaacatggccatgcaagctggagagtcttacctgaacttgctggcttgaacagatgtggtaagagctgcaggctaagatggaccaactatctgaaaccagacatcaagagagggaacttctcgcgtgaggaagagcaaactatcctccagctgcattccatccttggcaacaagtggtcagctattgcaaagcatctccctggacggacagataacgagatcaagaacttctggaacacccacctcaggaagaaactgatcaagatgggcattgatccaatgacccactgcccaagaacagacttctttcagtccctcccgcagctcattgcacttgccaacctccgccagattatcgagcgacaaccgtgggatggccacattgagggcctgcagactgtggcagttcaggctgccaagctcgaatacatgcaatcactgctacattctgcagtgtgccattgtgaccagccccaccaccaccaccaccaccagcagcttaaacaccttcaccaccgaactggagcagaccaaccacctatgccctccacaggtgccttcttcaacaacattgccctagtttcgggatggatcacattgaaacttgaggacggcgttatacctaccggcaactcaccggtgctcgaccacctcgccggcgaagcgctcgagggggctctcggcattcgggatttcgggtccaccacagcttcctccgcctga

SEQ ID NO: 3067 - DNA, 783 bp, Oryza sativa
  Clone ID: PAT_MRT4530_11916C.1
agctgtgtctgttggaacagctacataaaaaattacttggcatcaacagactacgatggcactgttcagttgtgggatgcaagctcgggtcaaggattcacgcagtttacggagcaccgaaaaagagcttggtctgtaagtttctcagaggtggatccaactaaattggcaagtggaagtgatgattgctgcgtgaaagtttggagtattaaccagaaaaattgcactgataccatcagaaacgtggccaacgtgtgctgtgtacagttctccccatactcctctcgtatgttagcttttggctcggctgattataagatatactgttatgatctgaggaatacaagaatcccatggtgtactatttctgggcatggaaaagctgtcagctatgtacgattcttggatccagaaacacttatctctgcatcaactgataacaccttgaaaatatgggatctcaaccagactaattccagtggattatctactgatgcctgcagtatgacgttgagtggccataccaatgagaagaattttgtggggttatctgttcacgatggatacataacttgtggttctgaaaataatgaagtattttcttattacaaaacctttcccatgccaataacttctcacaagttcggttcaatcgacccaataactggacaagagacaaatgatgataaccaacaatttgtgtccagtgtttgctggcgagggaggtcgaacatggtagtggctgccaattctactggcagcattaaagtgcttgagcttgtg

SEQ ID NO: 3068 - DNA, 2786 bp, Oryza sativa
  Clone ID: PAT_MRT4530_12732C.1
ttatactcgaaccggcaagacgagaaggccgtggagaactcccccttcttggagaagctgaagaagaagggttacgaggtcctctacatggttgatgccatgcacgagtatgctgttggccagctcaaggagtttgagggcaagaagctcgtctctgccaccaaggagggactcaagcttgatgagagcgaggacgagaagaagcggaaggaggagctcaaggagaaattcgagggtctctgcaaggtcatcaaggaggtgctcggagacaaggtcgagaaggtggtggtctcggaccgtgtggtggactccccgtgctgcctcgtcaccggcgagtatggctggacggccaacatggagaggatcatggcctcggagacggagacgttcgccttccaggcggagatcaaccagctgctgtcgctcatcatcaacacgttctactccaacaaggagatcttcctccgcgagctcatctccaactcctccgatgcgttggacaagatcaggttcgagagcttgacggacaagagcaagctggatgctcagccagagctgttcatccatattgttcctgacaaggcctccaacacactgtcgatcattgacagtggtattggtatgaccaagtcagatcttgtgaacaacctgggtaccattgccaggtcagggactaaggagtttatggaggcactggctgctggtgctgatgtgtccatgattggtcagttcggtgttggattctactctgcctaccttgttgccgagagagtagttgtgaccaccaagcacaacgatgacgagcagtatgtgtgggagtctcaggctggtgggtccttcactgtcacacgtgacacatctggggagcagcttgggaggggtactaagatcaccctctacctcaaggatgatcagttggaataccttgaagagcgccgcctcaaggacctgatcaagaagcactctgagtttatcagctaccctatctctctatggactgagaagaccactgagaaggaaatttctgatgatgaagatgaggaagagaagaaggatgctgaggagggcaaggttgaggatgttgatgaagagaaggaagaaaaggagaagaaaaagaagaagatcaaggaggtttctcatgagtggtccctggtcaacaaacagaagcctatctggatgaggaagcctgaggagatcactaaggaggagtatgctgctttctacaagtccctgacaaacgactgggaggagcatcttgctgtcaagcacttctctgtggagggtcagctggaattcaaagctgttctctttgttcccaagagggcaccattcgacctctttgatacgaggaagaagctcaacaacatcaagctctacgtccgccgagtcttcatcatggacaactgtgaggagctgatccctgagtggctgagctttgtcaagggcattgttgactccgaggatcttcccctcaacatctcccgtgagatgctgcagcagaacaagattctcaaggtcatcaggaagaaccttgtcaagaagtgcgttgagctcttcttcgagattgctgagaacaaggaagactacaacaagttctatgaagccttctccaagaacctcaagctcggtatccacgaggactccaccaacagaaacaagattgccgagctcctgaggtaccactccaccaagagcggcgatgagctgaccagcctcaaggattacgtgacgaggatgaaggaaggccagaacgacatatactacatcaccggcgagagcaagaaggccgtggagaactcccccttcttggagaagctgaagaagaagggttacgaggtcctctacatggttgatgccatcgacgagtatgctgttggccagctcaaggagtttgagggcaagaagctcgtctctgccaccaaggagggactcaagcttgatgagagcgaggacgagaagaagcggaaggaggagctcaaggagaaattcgagggtctctgcaaggtcatcaaggaggtgctcggagacaaggtcgagaaggtggtggtctcggaccgtgtggtggactccccgtgctgcctcgtcaccggcgagtatggctggacggccaacatggagaggatcatgaaggcccaggcgctgagggactcgagcatggccgggtacatgtcgagcaagaagacgatggagatcaacccggagaacgccatcatggaggagctccgcaagcgcgccgacgccgacaagaacgacaagtccgtcaaggacctcgtcttgctcctcttcgagacggccctcctcacctccggcttcagcctcgacgaccccaacaccttcggcagcaggatccaccgcatgctcaagctcggcctgagcatcgacgaggacgagacggcggaggccgacaccgacatgccgccgctcgaggacgacgccggcgagagcaagatggaggaggtcgactaagcgggtttccttttttttcccctcgtcaaatccttcgcagcgaaagtacaccatggagcattggagctagcttatctgttttaccttttgaacatcgcgttgttgggtcggttcggtttattttgtgcgatttgctttacctttacctagcctgcaatgcatggggctagattgtgctatgggttctcgaactgcgtacgttaattatattgctaaatatgagtattatattagtgtcctcatgagttgtctattttttcctctgcaagttagatgtatcaattaattttgcgaatattcttctgcctcaattcccagat

SEQ ID NO: 3069 - DNA, 1467 bp, Oryza sativa
  Clone ID: PAT_MRT4530_12828C.1
atgaagaagctcttcttcttcctcttcctgctgatactggccgcctcggttgttcacggcgaggacggggcgtacatcggcgtcaacattggcacggccatgacgtcggtaccggcgccgacacagatcacgacgctgctccgctcgcagaacatccgccacgtgcggctgtacgacgccgacccggcgatgctcgcggcgctcgccaacaccggcatccgcgtcatcgtctccgtgccgaacgagcagctcctcgccatcggcaactccaacgccacggcggccaactgggtggcgcgcaacgtggccgcgcactacccttccgtgaacatcacggccatcgcggtcggctccgaggtgctctccacgctgcccaacgcggcgccgctcctcatgccggccatccgctacctccagaacgcgctggtggccgcggcgctcgaccggtacatcaagatctcgacgccgcactcctcgtccatcatcctcgactcgttcccgccgtcgcaggccttcttcaaccgctccctggacccggtgctggtgccgctgctcaagttcttgcagtccacgggctcgccgctgatgctcaacgtgtacccgtactacgactacatgcgctccaacggcgaagccgtggacgccaacaccctgctgcactacaccaacgtgttcgacgcggtcgtggacgctgcctacttcgccatggcgtacctcaacgtcaccaacgtgccggtgatggtgacggagaccgggtggccgcacaagggcgacccgtccaacgagcccgacgccacctccgacaacgccgacacctacaacagtaacctcatccggcacgtgatgaacaccaccggcacgccgaagcaccccggcgtcgccgtgccgacgtacatctacgagctctacgacgaggacacccgccccggctcgacgtcggagaagtactggggcctgttcgacatgaacggcatcccggcgtacaccctgcacctgacaggctccggcgtgctgctcgccaacgacacgacgaaccagacctactgcgtggcgcgggagggcgctgacgagaagatgctgcaggcggcgctcgactgggcttgcggcccgggcaaggtggactgctccgcgctgatgcaggggcagccgtgctacgacccggacaacgtcgaggcgcacgccacctacgccttcaacgcctactaccatggcatgggcatgggctccgggacgtgctacttcagcggtgtcgccgtgatcaccaccaccgatcccagccacgggtcttgcgtttacgctggaagtggtgggaagaacgggacgtcgttgctgaacggcacatcgctggcgccgtcgtcgaactccacggcgggggactccggcgcgcaccgggcgatcggggacgtctcgtcgttcgtccgcgccgtcgtcgcggcgctgctgttgagcgtcgtcctcctgttgtag

SEQ ID NO: 3070 - DNA, 2219 bp, Oryza sativa
  Clone ID: PAT_MRT4530_12829C.1
cttgcaactcttcattccagttcgcttcctccctcccacctcttctccacttcttcttcctcctcccctttcacactccacttctttggtctgctcttcttggtatccttctcctacgcatagttaagctccgagctcaggaggtaggttggtaggtttctattgcttcttctcagctgggagagtgaaaataccgaggagaaaaggcacatcaagattgtttctttcggtttcttgggcttctcttgcggcaacatgaagaagctcttcttcttcctcttcctgctgatactggccgcctcggttgttcacggcgaggacggggcgtacatcggcgtcaacattggcacggccatgacgtcggtaccggcgccgacacagatcacgacgctgctccgctcgcagaacatccgccacgtgcggctgtacgacgccgacccggcgatgctcgcggcgctcgccaacaccggcatccgcgtcatcgtctccgtgccgaacgagcagctcctcgccatcggcaactccaacgccacggcggccaactgggtggcgcgcaacgtggccgcgcactacccttccgtgaacatcacggccatcgcggtcggctccgaggtgctctccacgctgcccaacgcggcgccgctcctcatgccggccatccgctacctccagaacgcgctggtggccgcggcgctcgaccggtacatcaagatctcgacgccgcactcctcgtccatcatcctcgactcgttcccgccgtcgcaggccttcttcaaccgctccctggacccggtgctggtgccgctgctcaagttcttgcagtccacgggctcgccgctgatgctcaacgtgtacccgtactacgactacatgcgctccaacggcgtcatcccgctggactacgcgctgttccggccgctgccgccgaacaaggaggcggtggacgccaacaccctgctgcactacaccaacgtgttcgacgcggtcgtggacgctgcctacttcgccatggcgtacctcaacgtcaccaacgtgccggtgatggtgacggagaccgggtggccgcacaagggcgacccgtccaacgagcccgacgccacctccgacaacgccgacacctacaacagtaacctcatccggcacgtgatgaacaccaccggcacgccgaagcaccccggcgtcgccgtgccgacgtacatctacgagctctacgacgaggacacccgccccggctcgacgtcggagaagtactggggcctgttcgacatgaacggcatcccggcgtacaccctgcacctgacaggctccggcgtgctgctcgccaacgacacgacgaaccagacctactgcgtggcgcgggagggcgctgacgagaagatgctgcaggcggcgctcgactgggcttgcggcccgggcaaggtggactgctccgcgctgatgcaggggcagccgtgctacgacccggacaacgtcgaggcgcacgccacctacgccttcaacgcctactaccatggcatgggcatgggctccgggacgtgctacttcagcggtgtcgccgtgatcaccaccaccgatcccagccacgggtcttgcgtttacgctggaagtggtgggaagaacgggacgtcgttgctgaacggcacatcgctggcgccgtcgtcgaactccacggcgggggactccggcgcgcaccgggcgatcggggacgtctcgtcgttcgtccgcgccgtcgtcgcggcgctgctgttgagcgtcgtcctcctgttgtaggcagaacagtggttattttattagccaaggcaccaaagtccgtaggaattcatggggggattttttttttggtggtgggattggccccggtgttatgggtgggtggtgatcattgagaacgaacaaaattgccttgttcatctgttgccctgagctacgtggatggaactcttccgagagacttcgggttcgacccactggcgctatcagacccggaggggaccgggggtttcatctagccacggtggctggcctacggcgaggtgttcaacgggcggacgtcgatgatgggtgtcgtcggcatggtcgccccggagctcctcggcaagctgggcctcggccccagcgagacagagatcccgtggatccagaccggagtgattccccccgcgagaacctacacgtactgggacgagccttaccatctcttcatcttcgaactcgcccct

SEQ ID NO: 3071 - DNA, 328 bp, Oryza sativa
  Clone ID: PAT_MRT4530_13180C.1
ttgggttaagaaccaaaccggacatatattattattgcaaagggggggcaccagtcaaagggcctctaagcgaaaccaggcgaataattcaatttccaagggtggtagaaccggattaccatttggcgtgacataactcaaaagcccaggccaaagcagatgaaccatcatcgggtcatttatcagttgcccgaacacaccgcaggcaggcaccttcatgcagcaggtcaaacgccttggtgatgtcagtcaggttcatgccgggaggaacgtacccgtccaccttgatttccttggtcaaggacttctcaacgagccatggaacttg

SEQ ID NO: 3072 - DNA, 1677 bp, Oryza sativa
  Clone ID: PAT_MRT4530_1353C.1
gcacgagggagattccgggcttccgcgttcaccggcgacggcgtcctggccatgacgctcgatctatcgagaatttccgggacgccatggggcacctccgtccgcttgtaccaccttcgtttccgaatccctcgcactaggtcaaccgccctgcctctggcccccacctgtccacccgccgcttctcaaccccacagccaaagctccgccgcctcgccggccaccgcggccgtccgtccactacggcatcctgagggcgccgagccgccgaggcgctccgccgcgagtgcgctgtttgttgagcacaggggcattatgggatgggatggtgaccaccggccattccaggcagtcaggcaccactggttcttggatgcgtcagccatggcgcaagatctttcttcctcggcagtgtggccggagcggaatggaagaatatttgagcacaagtttaaggtcgctgagcagctcgttggggatatcaaggagattctcaaggtcaaggtggttgaccctcgatacgtcctcattaacatcgacggcaaccattttggggcttctttgttgccctcactatcgttgttatcttcattcatcgagcctgctatcatggaaaacacctgcaagaggatctccaacacccccaactccatgccagtgctccaaggatgggcagacctcccagatgacctactgcagtgtgtccttgctctgttgagttcacccagtgaccttgctgccttcattgccacctgccccaattggcatgctgccttcaggtctgcaaaatctaccttacgcaccaccctcttccgtcctcttgccatccgcagctgcgcttcctctggcgatgatccagtagtatgggagctctttgatccagccaagccaaccatctgcatacaccgcgtgactccgccagattttctggcggggatggattatgaatgctgttcttatggccatgccatcttctctggcaatgccccctcgctgaaggacacaaccttcgccatcgtcgacgtgttcaccggcactagtgtttcacctccaccctgcccattctttacttttgtcaactcttgtgccctcacagctccccttgattatcacaactcgcatttccttgtcgaggccaagcactccctgttcgcatggcgagttggaagcgaccattggtcgcagtgcagttgcccgcccaattctaaagctcttgagcagtttgtgcccttcaaaggccagctctatgccctcgagtatcagcagctttacaccgtcaagctggaaccccagctcagcctggaagaagtacaagttgtctggagcgtcgagatgtcggagcctgacctctgcgagccatcgctggtggtgtgtgatgacatgctcatcctgctcgccgcctccatcggcgaggccttctgccttgacctgtcatcccagcctgcaatgtgggtgaagatggaagaggaagagttgaaggaatgggccttcttcttcgatgagaagagggaggctttcaggccacggccaccattgtcttgcaagaacccacagagatggggagggatcggctatgattcatactgtgtgtcatccttggcgccaaatcaaggcaatcgcagagggttgctgcccaactgggtgaagcccaggatgctactctcttgcgatcattag

SEQ ID NO: 3073 - DNA, 379 bp, Oryza sativa
  Clone ID: PAT_MRT4530_13758C.1
ggaccgaaattagacggccattaatttgaactagggtttcacaaacttcgtccattgacaaaatccccggataatggggcctaaccattttcgcagggaaaaagggacccccctcgaaaccatcacatttttaaacaacctaacccaagagctagataaaaaaacaacgggggggggggacacatcactacaggtgggccttataaaacaacgacgggtccgcctcctccttgaggggggaggattcctttttttaaacctggggctcctcgacctcctttttcttttccacgggcgggtcggggctcagggaaaggtttttttgcccccacctgtaaatgctggaggcaaaacccttgggaacaggaaggttgaagcc

SEQ ID NO: 3074 - DNA, 1558 bp, Oryza sativa
  Clone ID: PAT_MRT4530_13914C.1
ccacgcgtccggtggccccatcccccatctcctctccaatactcgccactaatttcttctctctttctctctctctccgcgccctcgcatcgcacgtgaggcagtcgagggatagcggcgcaatggcggcggcggtggtggcgaacggcgcgagcggcgactcctccaaggccgcgttcgcggagatatacagcaggctcaaggaggagatgctcgaggacccggccttcgagttcaccgacgagtcgctccagtggatcgaccgcatgctggattacaatgtgctcggaggaaagtgcaaccgcgggatctctgtcattgatagtttcaagatgttgaagggcactgatgttctgaataaggaggagacatttcttgcctgcacccttggttggtgcattgaatggcttcaagcttattttcttgtgcttgatgatattatggacaactctcaaacacgacgtggccagccttgctggtttagggtgcctcaggttgggctcattgctgtaaatgatggtattatccttcgcaaccatatttcacgaattcttcaacgccattttaaaggaaagctgtattatgttgatctcattgatttgttcaatgaggttgagtttaagactgcttcaggtcaattgttggatcttattactactcatgagggagaaaaggatctcacaaagtacaacttgacagttcaccgccgcattgttcagtacaagacagcttactactcattctatcttccggttgcatgtgctttgctgctatctggtgagaatttggataacttcggtgatgttaagaacattcttgtggaaatggggacatacttccaagttcaggatgattatctagattgttatggtgatcctgagtttattggcaagattggaacggacattgaagactacaagtgctcatggttagttgtgcaagctctcgagcgtgctgacgagaaccaaaagcacattctatttgaaaattatgggaagccagatcctgaatgtgttgcaaaagtgaaggatctgtataaagaacttaatctggaggccgtatttcatgaatacgagagggagagttacaataagctgattgccgacatcgaagcacatccgaacaaagcagttcagaatgtattgaaatccttcctgcacaagatctacaagaggcagaagtagagctaagctcatggagaagctgtttcatgtttgcttggtaactagagtcgtggggacaaataactggtaactagaatcatggggactgttccctgatgttgtgtgtattatggttatgttcgtaccgtgtagtacagcgtgctactccgtaaaataatgaagcatggtgctatttatgcgtgcgtgaactgcttgagtcattaattttagtttttggcttttgctagcttcatttttaccaatttcatacttatctgcattcgaaggctcaaatagcagggcgcatttcaaagtaagccctgtttgagcatgcgaattttaagtaagggcagatctagaaagagatattatcgtatgaaaagaagcttcctgtc

SEQ ID NO: 3075 - DNA, 1128 bp, Oryza sativa
  Clone ID: PAT_MRT4530_13916C.1
atggcggcggcggtggtggcgaacggcgcgagcggcgactcctccaaggccgcgttcgcggagatatacagcaggctcaaggaggagatgctcgaggacccggccttcgagttcaccgacgagtcgctccagtggatcgaccgcatcatttctttgacatatgaatgcagatggataaaggagttgagggtggcccaaagtgccacaaagatgctggattacaatgtgctcggaggaaagtgcaaccgcgggatctctgtcattgatagtttcaagatgttgaagggcactgatgttctgaataaggaggagacatttcttgcctgcacccttggttggtgcattgaatggcttcaagcttattttcttgtgcttgatgatattatggacaactctcaaacacgacgtggccagccttgctggtttagggtgcctcaggttgggctcattgctgtaaatgatggtattatccttcgcaaccatatttcacgaattcttcaacgccattttaaaggaaagctgtattatgttgatctcattgatttgttcaatgaggttgagtttaagactgcttcaggtcaattgttggatcttattactactcatgagggagaaaaggatctcacaaagtacaacttgacagttcaccgccgcattgttcagtacaagacagcttactactcattctatcttccggttgcatgtgctttgctgctatctggtgagaatttggataacttcggtgatgttaagaacattcttgtggaaatggggacatacttccaagttcaggatgattatctagattgttatggtgatcctgagtttattggcaagattggaacggacattgaagactacaagtgctcatggttagttgtgcaagctctcgagcgtgctgacgagaaccaaaagcacattctatttgaaaattatgggaagccagatcctgaatgtgttgcaaaagtgaaggatctgtataaagaacttaatctggaggccgtatttcatgaatacgagagggagagttacaataagctgattgccgacatcgaagcacatccgaacaaagcagttcagaatgtattgaaatccttcctgcacaagatctacaagaggcagaagtag

SEQ ID NO: 3076 - DNA, 3168 bp, Oryza sativa
  Clone ID: PAT_MRT4530_1407C.1
atgaggttcttgttaaattctaggttatccagctcttgtttggttggctggtctggaactctgaattccctctgtagctttttactagatgtccggaattctcttctaagggagcctaaacacggcagttcagttcagattaattatgggtctgggtttgaagaaaagaataaagggagtgaaataaagaaacaaacaggtaacctggataagacggtggaggagctatcaaatgtttatagaggagctcaagaaaccaatagaaagctctatcaggaactgttcccaattcagattatgcaaatgtgtggatggttactgaaggttgttcgttgggaaaacttaaattgtgtgcacatggaagctcatggcaatcgtcgcagcagtccaacataccttgttatgctgtggatgatttcggtagctagcctattgataacatgtcgtggcagtatccagaagcaagttctctttccagggttcactgccgcgcaaatggattacattgataacgatgggatatttctgctttctaatggctctgtctttggctttggttttgtcacgagcaatgtctcagacaacacgttctacattcttgcagtggttcacatggccactactaccacagtctggtctgccaatcctaactctcctgtcacccattcagatgacttttttttcgacaaggatggcaatgccttcctgcagtcaggaggaggctccaatgtatgggctgccaatatctccgggaaagggactgccacctctatgcaactactggactctggcaatcttgtagtgcttgggaaagatgcctcttctcctctctggcaaagtttcagccatccgacagacactcttctgtctggtcagaatttcatcgaagggatgacgctgatgagcaagtccaacacagtacagaacatgacctatacacttcagatcaaatctgggaacatgatgttatacgccggcttcgagacacctcaaccatactggtctgcacagcaggatagcaggataattgtcaacaagaacggtgacagcatctaccctgcaaacctcagttcagcttcttggtccttctatgatcaatcagggtcccttctatcacaacttgtcatcgcgcaagaaaatgccaatgccacattgtctgctgtccttggtagtgatggattgatagctttctatatgctgcagggtggaaatggcaagagtaaattctcgatcacagttccggcagactcttgtgacatgccagcctactgcagtccttacaccatttgcagtagtgggacaggttgccaatgcccttcggccctcggctcgtttgcaaactgcaatcctggtgttacatcagcatgcaaatcgaacgaggagtttccgctggttcaactggatagtggagttggatatgtaggcactaacttcttccctcctgcggctaagacgaaccttacgggttgtaagagtgcctgtacaggcaactgctcttgtgttgctgtgttctttgatcaatcttcaggcaattgtttccttttcaaccagatcggaagcttgcagcacaaaggtgggaatacaactcgtttcgcatcttttatcaaggtatcaagcagaggaaaaggtgggagtgatagtggcagtgggaagcacaataccattattattgtcattatgctcggaactttggctatcataggcgtccttatttatattggtttctggatctacaagaggaagaggcatcctccaccatcacaagacgacgctggttcatcggaagatgatggatttctgcaaacaatatccggagcaccagtgcggttcacttacagggagctccaggatgcgacaagcaacttctgtaacaagcttggtcagggagggtttggatctgtgtatcttggtacactcccagacggcagtcgtattgctgtgaagaagctggagggcataggccaaggaaagaaagagttccgctctgaggtaacgatcattggtagtatccaccacatccatcttgtcaaactccgaggcttttgtactgagggaccacacaggcttcttgcctacgagtacatggcgaatgggtcgctggataagtggattttccattctaaagaagatgatcacctgctcgactgggatacaaggtttaacattgcgcttggaacggcaaagggattggcatacctccatcaggactgcgattcgaagattgtacactgtgacattaagcctgagaatgttctacttgacgacaacttcatcgcaaaggtatctgattttggccttgccaagttgatgaccagggagcagagccatgttttcactacgctcagaggcacgcgcgggtaccttgcacctgagtggctcaccaactatgccatctcagagaagagtgatgtgtacagctacggcatggttttgcttgagataatcggtgggaggaagagctacgatccctcggagatctccgagaaggctcacttcccttcctttgcattcaagaagctggaggaaggcgatcttcaggacatcttcgacgccaagctgaagtacaatgacaaggatgggcgggtcgagaccgcgatcaaggtcgcgctctggtgcatccaggatgatttctaccagagaccatccatgtcaaaggttgtgcagatgctcgaaggcgtctgcgaggtgctccagccaccggtgtcgtcgcagatcgggtacaggctctacgcaaacgccttcaaatcgagcagcgaggaggggacttcatcagggatgtcggactacaacagtgatgctctgctttcagctgtgaggctttctggtcccagatgatgtgaagaatcccatgtacagtgccttgtctagttaggttgcaaagtgtgcaaattttgctgtagtttccagtgttttggtgatcatttgcttcacactattgtacatatcttcttggtcatttctggtggtagtttatacatatcttgctgattatttatggtggtagtttatcggtgccattctttttttgttgcccttttggttatacataaggtctccaaaacctttgacaattaccttttgtagttatgtcttggtaaaaataataggaaatgcaatgatacaaaaggctttttcatgaaaaaaaaaaaaaaaaaaaaaaaaaaaaaa

SEQ ID NO: 3077 - DNA, 2101 bp, Oryza sativa
  Clone ID: PAT_MRT4530_14135C.1
cgggctgcaggaattcggcacgaggctccactccactccactctccgttgctcgcgcggttggcgttgcgttttttcccctcgaatcgcgggggggaatccgccggttgatgcagcagaggggcctcgcgcacaaccgccgctcccgcggcttctcccgatcccgccgcgccgtcgagggcgcctaaaccacacgcctttttttttcccttaaaaacgaatagatctctctcaatttcctgaaacttataataatttcaaaaacgccctagacgaggacgaggagacgatcgagatggacgccgtcgcggcgaatgggatcggggaggtggagaggaaggcgcagcggagctactgggaggagcactccaaggacctcaccgtcgaggccatgatgctcgactcccgcgccgccgacctcgacaaggaggagcgccccgaggtcctgtctgtactcccttcttacaaagggaaatcagtactggagcttggtgctggaataggacgctttactggggaactggcaaaagaagctggccatgttttagccctagacttcattgaaagtgtgattaagaagaatgagaacataaatgggcatcacaagaacataacctttatgtgcgctgatgtcacgtctccggacctgacgatcgaagataactctattgatctcatattctcaaactggctactaatgtacctttcagatgaggaggtcgagaagctagtaggaagaatggtgaaatggctgaaggtaggtggccatatattctttagggagtcatgctttcaccaatctggagattccaaaaggaaggtgaatccaacacattaccgggagccaaggttctatacaaagatatttaaagaatgccattcctatgataaagatgggggttcttatgaactttctctagaaacatgcaagtgcattggggcttatgtgaaaagcaagaaaaatcaaaatcagttatgttggctatgggaaaaggttaagtcaacagaagacagaggattccaaagattcctggacaatgtgcagtacaaaaccactggaatcttacgctatgagcgtgtcttcggagagggttatgtcagcactggtggaattgaaaccacaaaggaatttgtggataagctggatcttaaacctggacagaaagtgcttgatgttgggtgcggaattggaggcggcgacttctatatggctgaaaactacgatgcccatgttcttggtattgatctttcaatcaacatggtttcatttgcaatcgaacgtgccattggacgcaagtgttcggttgagtttgaagtagctgattgcaccacaaagacctacgcaccaaatacatttgatgtgatctacagccgtgacaccattcttcacatacatgataaacctgctttgttcagaagtttcttcaagtggctgaaacctgggggcaaagtcctcatcagtgattactgtaggaatcctgggaaaccatcagaagaatttgctgcttacattaagcagagaggctatgacctccacgatgtgaagacttacggaaagatgcttgaggatgctggtttccatcatgtcattgctgaagaccgcacggaccagttcctgcgtgttcttcaaagggagcttgctgaagttgagaagaacaaagaagccttcatggcagacttcacccaggaggactacgatgacattgtgaacggctggaacgcgaagctgaagcggagctctgccggtgagcagaggtgggggctgttcattgcaaccaaatgattcagaagcagagagggttcagaataaaacgggtgctgctgttgttggctgtgttaactagtactcctactagatctgttgttgcagatttatttgtgcgccccaattggtagtttgtttgtgtgtgatgtagtattccagttttagaggacggccaatgttccatgtgacgtgatgtacgttaaactcagtctgtttaaagtatgtattatcgtgcgtatttggtatggaactgtgttattgtttgcagataaataaacacagatgtgttcctcttttgcaccaaaaaaaaaaaaaaaaaactcgagactagttctcc

SEQ ID NO: 3078 - DNA, 2269 bp, Oryza sativa
  unsure (1)..(2269): unsure at all n locations
  Clone ID: PAT_MRT4530_14370C.1
gcgccccgaccttatctcctttccccccaccacctccaagatatttccccacctccgccgccgccgccgccatggagtccggcctcgtcgcaagccaccgcctccgcgtccccttcgccgccgcccaccaccgccaccacccggccgcgccgccgcacctcctccgccagcggcggggcagcgtcgccgccaccccactccggctcgggctccacctccccacgccgaccccgctccgcctccccgccgcgctcccgctccgcccttccctcccgcctctccgcgccgccgccgcgtcggcggcggcaccggagccggtggggtcggcctcgcccaagttcctgggcgtggagacgaagacgctgaagaagatcgtgccgctggggctcatgttcttctgcatcctcttcaactacaccatcctgcgggacaccaaggacgtgctcgtcgtcaccgccaagggcagcagcgcggagatcatcccgttcctcaagacgtgggtcaacctccccatggccatcgggttcatgctgctctacaccaagctcgccgacgtgctctccaaggaggccctcttctacaccgtcatcttccccttcatcgccttcttcggcgccttcggctacctgctctaccccatgcgcgacgccatccaccccaccgcgctcgccgaccgcctcctcgccgcgctcgggcccagctttctgggccccgtcgccatcctccgcgtctggagcttctgcctgttctatgtcatggccgagctctggggcagcgtcgtcatctccgtgctcttctggggattcgccaatcagattactacggttgaagaggccaaagagttttacccactgttcgggcttggggccaatattgcactcatcttctcgggtcgcacagtgaaatacttctcaaacatgaggcagaatttgggtccaggggtggacggatgggcgatttcattgaggggcatgatgagcatagtggttttgctgggccttgtgattgccggcatctactggggagtaaacaagtttgtaattgataaatcagctgcgccagtcgtcgagcggaagaagaaggataagccaaagctgagtatgggagagagtttgaaggtgcttgtgtcatctcggtatgtgagggatcttgccaccctggtcgttgcttatggtataagcattaaccttgtggaggtgacatggaagtcaaaactgaaggcacaatacccaagccctaatgaatattcttcattcatgggggatttctcgactgctactggcatagccacatttacaatgatgttgttagggagagtaattcttaggaagtttgggtggggagtcgcagctacaatcacccctgcagtgttgcttctcactggagttggattcttctcactgattttattcggtgagccattgactcctcttatggccacacttggaatgacacctttgcttgctgcggtctatgttggggcaatgcagaacattttcagtaagagtgcgaagtacagtttgtttgacccttgtaaggaaatggcatacattcctttggacgaggacatgaaggtcaaaggtaaggcagcaattgatgtggtctgcaacccattggggaagtctggaggcgccttgatccagcagttcatgatcttatcatttggatctctcgcaaattctacaccctacctgggaggaattctattggtaattgttcttgcctggttgggtgctgtaaggtcccttgactcacagttctccccactggcaaagcaagagcttgagaaggagaaaatgctgaaagcaaagacggtcgaaacaactgctcaagttgttgggtcaggaaatggttctctccaagaaactctagccagtgagaactctgcgaatggttcggccatcaaagtgtctcaggaacctgagagtacgacctcggagaagtctggtcaacaatctcaataagttctttgccttgcaaatttagttagtataagtcttccgtggaatcaaaagctgcttagtttggcctgccctgggttgttgctgaggaaagcagcagagtggtaagaaaaataagcaggccattttttttgtgttgttgtagcatgtatattttgacttcaccttgagaattgtctttagttctttgcttgagaatatctgtagctgtctgttgttccatcccatagatatgaaactgcctttttggtaattacaattttgtggaaattccggttcctcaaaaaaaaaaaatcaaaaaagtgccn

SEQ ID NO: 3079 - DNA, 1578 bp, Oryza sativa
  Clone ID: PAT_MRT4530_14451C.1
ttggttttggaaccccacttgatgagaagtttctcttattgcaacgaaggaaagatgttgcatttttttttcttttgggcgaggaaaccgtgtcagctcagttctcagctagttacagaatgtgtcacaaaaagcaaaaataaacagattacagaatgtacaaaatttccttatgatcacacaagttttactcctacacacccttagttgagtacaccttcacccttccttgtcaagcagagcaactatgcggcttttcgttgtcttgaaatgctcgaaccactatctgcggtagagctatcttctacctcatcaacacagtttctacctgcttcctgcaggagatatcttgaaggcccaactaaggaaccaccatgatcttgaatatgcgaatgcacttcagctgaagatgaataagatgggacatgaaatgcagtctcacaaaaggatcttttccttgataccggtgagtttgctacagagctcgttgcttccatctttgaggacctgatcatatcaacacaaatagaacttctatttgaggccttcaatacctttgactttaaattatgatccttgctgctagcatggggcactctttgatcaatgggcaaagcacatggagatgtttccctcaaaacaacttttgggatgtcaaaagtcttgatattgctcaagttgtcctccacaacctcaccatctaattctgcaagtttctcagctgtatccaattgccacatcgtggagatggaatcatctaaacactccctagcaatgtgaaggtctacgattggcttaggatagttaaaccccagctcaactccagcaacttcaagaatacagctcggtgcatcccatggatgatgaatccattctgtcggcattctagctagttcaggtatccaagttcttacatatacaccatctgggtcatacttttgaccttgaacctctggattatcaagacgactgagctcatggccatcaggcaggctcccagatatgtactgccaaccaagaatatcactttccagatcagcatccaatagcacatcccaaaaatacttcataccccaagtccatgggataagtagaaatttcacagcaaaacttgaaatgataactcttatccgattatgtgtccatccggtagcccaaagttccctcatgccagcatctaccaatgggtatcctgtcattccctgcctccaggacttgaaccgctcctcatctactttccaagggtagtgtttcaagttccccagcaatgacttttcatgtgtgaatgggaagttaaaacacaagtaccgtgaatattctcgaagaccaattgaccgcatgaagaagtgaatgctctcctcagcttcagatgttccctcattttcccacttgatttgttgcatccttacaagttgatatacttttcttacactcacctcaccaaaatgaagatatggtgatagcaatgatgtagtagctccctcaaccttcattccatgttttgagtattctaggagaccatgggagacaaattcttcaagcatcttttctgcattgcgccaaccaggagaccaggcc

SEQ ID NO: 3080 - DNA, 537 bp, Oryza sativa
  Clone ID: PAT_MRT4530_14488C.1
tatcgaatttgaccgtgatgatgagctatttgctactgctggagtctcaaagcgcatcaaagtctcgagttttctacaatctaaactcagctgccttagctggaacaagtactcaaaaaatgttatagcaagcagcgactatgagggtatagtaactgtttgggatgtccaaacccgccagagtgtgatggagtatgaagaacatgaaaagagagcatggagtgttgatttttctcgaacagaaccctcgatgctagtatctgggagtgatgattgcaaggtcaaagtgtggtgcacaaagcaagaagcaagtgccatcaatattgatatgaaggccaatatttgctctgtcaaatataatcctgggtcgagccactatgttgcagtgggttctgctgatcaccatattcattattttgatttgcgaaatccaagtgcgcctgtccatgtttttggtgggcacaagaaagctgtttcttatgtgaagttcctgtccaccaatgagcttgcgtctgcatcaactgatagcacattacg

SEQ ID NO: 3081 - DNA, 2628 bp, Oryza sativa
  unsure (1)..(2628): unsure at all n locations
  Clone ID: PAT_MRT4530_14490C.1
tacagaacccaattcccctccctcctcctccacccgcccctccctcccacacacaccacaccaccaccaccaccaccctccgctcgtatgcaattattcacgcccagtcgccgcctccaccgccgccgcctgctcgactcaccaccgcagggcggcctcctcctgccgcatgggtgactcgacggtggccggcgcgctggtgccatcggtgccgaagcaggagcaggcgccgtcgggggacgcgtccacggcggcgttggcggtggcgggggagggggaggaggatgcgggggcgcgcgcctccgcggggggcaacggggaggccgcggccgacagggacctcctctgcccgatctgcatggcggtcatcaaggacgccttcctcaccgcctgcggccacagcttctgctacatgtgcatcgtcacgcatctcagccacaagagcgactgcccctgctgcggcaactacctcaccaaggcgcagctctaccccaacttcctcctcgacaaggtcttgaagaaaatgtcagctcgccaaattgcgaagacagcatcaccgatagaccaatttcgatatgcactgcaacagggaaacgatatggcggttaaagaactagatagtcttatgactttgatcgcggagaagaagcggcatatggaacagcaagagtcagaaacaaatatgcaaatattgctggtcttcttgcattgcctcagaaagcaaaagttggaagagctgaatgagattcaaactgacctacagtacatcaaagaagatataagtgctgtggagagacataggttagaattatatcgaacaaaagaaaggtactcaatgaagctccgcatgcttttggatgaacctgctgcatcaaagatgtggccctcacctatggataaacctagtggtctctttcctcccaactctcggggaccacttagtacatcaaatccagggggtttacagaataagaagcttgacttgaaaggtcaaattagtcatcaaggatttcaaaggagagatgttctcacttgctcggatcctcctagtgcccctattcaatcaggcaacgttattgctcggaagaggcgagttcaagctcagtttaacgagcttcaagaatactatcttcaaagacggcgtaccggagcacaatcacgtaggctggaggaaagagacatagtaacaataaataaagaaggttatcatgcaggacttgaggatttccagtctgtgctaacaacattcacacgatatagtcgcttgcgtgtaattgcggagctaagacatggagatctgtttcactctgcaaatatcgtatcaagtatcgaatttgaccgtgatgatgagctatttgctactgctggagtctcaaagcgcatcaaagtcttcgagttttctacagttgttaatgaaccatcagatgtgcattgtccagttgttgaaatggctactagatctaaactcagctgccttagctggaacaagtactcaaaaaatgttatagcaagcagcgactatgagggtatagtaactgtttgggatgtccaaacccgccagagtgtgatggagtatgaagaacatgaaaagagagcatggagtgttgatttttctcgaacagaaccctcgatgctagtatctgggagtgatgattgcaaggtcaaagtgtggtgcacaaagcaagaagcaagtgccatcaatattgatatgaaggccaatatttgctctgtcaaatataatcctgggtcgagccactatgttgcagtgggttctgctgatcaccatattcattattttgatttgcgaaatccaagtgcgcctgtccatgtttttggtgggcacaagaaagctgtttcttatgtgaagttcctgtccaccaatgagcttgcgtctgcatcaactgatagcacattacggttatgggatgtcaaagaaaattgccctgtaaggacattcagagggcacaagaatgaaaagaactttgttgggctgtctgtaaataacgagtacattgcctgcgggagtgaaacgaatgaggtttttgtttaccacaaggctatctcaaaacctgctgccaaccacagatttgtatcatctgatctcgatgatgcagatgatgatcctggctcttattttattagcgcagtctgctggaagagcgatagccctaccatgttaactgctaacagtcagggcaccattaaagttcttgtacttgctccttgatgaaatcagtggttttcatgagatccctagatagcttgtatatttgatgtatacagttgtttccttttcgtgccattataccccaaatgggagtggaggtattactgatctccaacatagggcgcaaagttttgaaggtaatcagctgacatagggtttcgagggctcgaaatgtgcatagtccagaattctcatgtataggtttaaagcagtcaagtaattgattatacatatgtaacgtgagaattgagaaatgaacatcaaataagcttgtttggttgcatataaaaaaaaaaaaaaaaaaaaaagggaagacaagctgtactgggctgatttcagcaacacaagccagtttgtcacacatctgctacctaacagaaatagttaaaaaaaaaanaaaa

SEQ ID NO: 3082 - DNA, 2974 bp, Oryza sativa
  Clone ID: PAT_MRT4530_14565C.1
catctttcccccctccgccgccgccgccgccttcttcccgggggcggggcggggagaggaggctcgggggagcagggatatagtatctttttttttttttttttttttttttttttttttttttttttttttgcacataaactgcagatgaaaaccatctggtcactttatacaagccgtacatcagctaaatgaagatttttactacctgtaactaacatgcaacaatcatcatctcattgttcaagagttcaaacattatcgtcgtcatcatgggacgaggaaaatttgccagacacgcaccagagatgggagaacatctggactctggtctcttctaagtgaagctaacagtaaggctaaggtaacaactcccaagaggccaaagataagacaacagcaatcctgaaacaacatgagacccaaaaagaaacggtgcgggcgattcccaagcacaacgtacactggcagtcgttattcgtgatgtccgtcgaagatttcagcgctgctgccaatggtattatgttcttagaaccacttgaacagcagaccaccgtgtgtggcgaagaaaggcgcaaacacaagggactcgacggccatgagcttgatgaggatgttgagcgacgggcctgatgtgtccttgagggggtctccaatggtgtcaccgatcacggcggccttgtggcagtctgatcccttgggccccagcgtccgagcatgctcactggcaccagcctcaatgtatttctttgcgttgtcccatgcgccaccagtgttggaggccgagatggcgatctgaactccggaaacgagggcgccagcgagaacgccagacagggtctccacaccaaagagggttccgacgatgaggggggtgagcatcaccaaagcaccagggggaatcatctccttgatggaagcatcagtggagatcttgacgcaggtggcatagtcaggcttgccagttccctccatcagcccaggaatggagttgaattgcctccgaacctcctcaaccatcttgagggcggcacttccaacactcttcatggtcatggcagagaaccagtacgggagcatggctccaacaatcaaaccgatgaagacctttggagacaggacatcaacaaccttcactccagctctgctgacgaaggcaccaaaaagtgcaagggacaccagagcagctgatccaatggcaaaaccctttccaatagcagcagttgtgttgccagcagcatcaagggcatcagttctctcacggattctgtggctcataccagccatctcggcaataccaccagcattgtcactgataggaccataagcatcaatggcaaggcctgttgcaatggtgcttagcatgccaagagcggcaacggctatgccgtacattgcagcaatagagaaactaacatatatgctgacagcaatagcaaaaattgggatgataactgatttgtatcccagagcaagaccaaatatgacattagtggcagcaccagttctgcaggaatctgcaacatcttgcacagggctgtatgcattgctagtgtagtactctgtcacaaaaccaatgatcagaccagcccacagaccaattgcaacgcagaagaacaagccccagttggtaacttccttctgagcaccaaaattgaagatggtgaactttgctggaagggccaaccagctgattattgcaataccaacagtcatcaaagcagtggagatgatgagctgcttcttcagagcaggttcaatttctttcactgccttgatctcaaagaagtcagttgcaaagagtgtggtgatcaaacaaacaatgatgcccacagagctgacaagcagtgggtagcacatcccagtgaaatcatggttgattccaaaagatgagatagatgcaacaacaagagcagcacaggatgattcggcgtatgacccaaagagatctgatcccattccagcaatatcaccaacattgtcaccgacattgtcagcaatcacagctgggttcctgggatcatcttcagggatgttcctctcaaccttgccaacaagatcagcacccacatcagcagccttagtgtaaatacctccaccaacccttccgaagagagccatggaagatccaccaagaccataaccagtgatagactcaaaaagaccttcccagtcatcaccataatacaacttaaatacattaatggcgatgtaaagaaccacaagaccacttgatgccagcaagaagcccataacagcaccagagcggaaagcaatgataaatgccttcccaacacccttccttgcttccagggtagttctggcattggcaaatgtggcgatcttcattccaaggtaaccagagaccaaagaggtgatcgctcccagcaagaaagatgcagtgctaaagagcgcgttgaaaagggcaggcttgcagtacttgtccttgctgtatgtgcaaggctggctctttgtactgaatccctcgactgaaccaaggaagaggaagatcacgacagcgaagattgacatgaagataccaacatattggtactccgtgaagagaaatgatgttgctccttcggagatggcggtctggatctcgtggcacttgacgacgacgtcgtggtcgttgagcccctcctcctcctcgatgaggtagtccccgtacccgtcgttcttgctcccccccacccactgcgcgatcgagaacccgatcgcgatgatcgccgcgagcgggaccagcagctaggtcgccacatccgacaggatcgccatggccgcaaaccctcctcgacctgctacctgctgcaggctctctctctctctctctctgtgtctctctctctataccgctgtactctatcacggttgcaacggaggcgaggcggcggcggcggcggcggggaggaggtgacgcgtctctaacgcacgtaactcgacacgtaacaagatgtgaattcggaactacagc

SEQ ID NO: 3083 - DNA, 2889 bp, Oryza sativa
  Clone ID: PAT_MRT4530_14624C.1
caagaaactccatcaaattccccagccaaaaacactcagataattttttttattagaaaaaaagaaaggagattagccagccagtctgctgctccatcctcagtgctcacgcactcactctgaggagtgaaatccaatccagcccactccggagttcctggaaaatcctcgcgaagtccgaagaaaaaaaatattaccactgccatttcttggtttcttgatagcttctcctagctgctgccgcccaatcatccgagagagcgagcaagtaagaaagattgattgattgcttgattgggagtgtcctttgggcgagctgtggtgggatttagcggcatgtcagcgtcgccgtcgtcgatgaagcggcgccggcgccggcgaggcgggggtgcggacggtggtgtggttcaggcgggacctgcgcgtggaggacaacccggcgctggcggcggcggcgcgggcggccggggaggttggtgccggtgtacgtgtgggcgccggaggaggacgggccgtactacccggggcgggtgtcccggtggtggctcagccagagcctcaagcacctggacgcctcgctccggcggctcggcgccagcaggctcgtcacccgccgctccgccgacgccgtcgtcgcgctcatcgagctcgtccgcagcatcggcgccacgcatctcttcttcaaccacctctacggatccattgatccagaattccagatagacccgctgtcgctggtgagggaccaccgggtgaaggcgctgctgacggccgagggcatcgccgtgcagtcgttcaacgccgacctgctgtacgagccatgggaggtggtcgacgacgacggctgcccgttcaccatgttcgcgccgttctgggacaggtgcctgtgcatgcccgacccggcggcgccgctgctgccgcccaagaggatcgcgcccggcgagctgccggcgaggaggtgcccctccgacgagctggtgttcgaggacgagtccgagcgggggagcaacgcgctgctggcgagggcgtggtcgcccgggtggcagaacgccgacaaggcgctggccgcgttcctcaacgggccactcatggactactcggtgaaccggaagaaggccgacagcgccagcacgtcactgctgtcgccgtacctgcacttcggcgagctcagcgtacgcaaggtgttccaccaggtgaggatgaagcagctcatgtggagcaacgaggggaaccacgccggcgacgagagctgcgtcctcttcctccggtccatcggcctcagggagtactcgaggtacctcacgttcaaccacccgtgcagcctggagaagccactcctggcgcacctcaggttcttcccctgggtggtcgacgaggtgtacttcaaggtgtggaggcaggggaggacagggtaccctctcgtcgacgccgggatgcgcgagctctgggccaccggctggctgcacgaccggatacgcgtcgtcgtctccagcttcttcgtcaaggtgctccagcttccatggcgctgggggatgaagtacttctgggacaccctgctcgacgccgacctcgagagcgacgcgctcggctggcagtacatctccggctctctccccgatggccgtgagctcgaccgcatcgacaaccctcagcttgaaggatacaagtttgatccgcacggggagtatgtccggcgatggctgccggagctggcaaggctgccgacggagtggatacaccacccatgggacgcaccggagtcggtgctccaggctgcagggattgagctaggctccaactatcctctccccatcgtggagctggacgcggcgaagaccaggctgcaggatgcactgtcagagatgtgggagctcgaggccgcgtcacgcgcagcgatggagaacggaatggaggagggcctcggcgactcctccgacgtgccgccgatcgccttcccaccggagctgcagatggaagttgaccgagcaccggcccagcctactgttcacggaccgacaacggctggccggcgacgagaggatcagatggttcccagcatgacctcctcgctggtcagagctgaaacagaactttcagcggattttgacaacagcatggacagtaggccggaggtgccgtcgcaggtgctcttccagcctcggatggaaagggaagaaacagtggacggcggcggtggcggcggaatggtcggcaggagcaacggcggcggccaccaaggccaacaccagcagcaacagcacaactttcagactacaattcaccgggcacggggcgttgcgccgtctacgtcagaggcatcaagcaactggactgggagagaaggcggcgtggtgcccgtctggtcgcctccggcagcgtcaggcccctcagatcactacgctgccgatgaagctgacattaccagtagaagttatttggacaggcatccacagtcgcatacgttgatgaactggagtcagctctcgcagtcattgtgagttcacacgcacggacaacaggctgggaagtggaaaattaatgctgattgtcagaattaatcattaggaaggtcgacattgagaagaattcatatgtaaattatcaccttttgtttgtctatagccttggtgtgcatgaatcaagtgatgaagcttccttgatgcaataatgattatgtaaagctagttttacagaacatttgtggtataggtttgctagttgtcaaaaggatatgtactatttgttagataagaggttattctagcattatgtcttagacttgtacattctccctttggttattgtaatcttggtggaatagtcatcccagagatctcagttagactcaaaaaaaaaaaaaaaaaaaaaaaaaaaaaaaaaaaaaaaaaa

SEQ ID NO: 3084 - DNA, 1354 bp, Oryza sativa
  Clone ID: PAT_MRT4530_14668C.1
ttttttttttttttttttttttgaaccacgtaaaaagggttggaatcattgaagccttttctgttgcagatgccatggaagtttgatggctgcagccgcgtagtgcaaccatgtgacctcggtactagcgtacaccgctttggcacaaagccatgtgaagcgccgtatcggtgtgcccgtgccgggtgtgggggtggtacacatgtagcgcatgtgatcatggcaatggtgacgcgatgcatgatacagtgaatgttgtaggagtatatgtgagctgctccagaagagctgtgaacctgctgggttttttttttttttgcacctacaaaagacattaattaataatactagtatttagcacaaatattccagcaatgtgaaaaatctaatggtacaaaacttagtcttacggactacatggggtctcaaagtcatacagtcgaccaaaacgctaggctcctgcttcaacaattgtatcagcagcggcggggtttttcccgaagggtacacaaatgcttccgaagaacatactcaatccctatagcttttcaagactccataacacaagcgcttacaaaaacacaccgagcccccctaacatttccagcaaattggaactaggcgggttacgcgttatttgcgtagggggactcctcgcggttggctggctgtgctggtgatctgctgtagcttcgctcacgaggaggtggaggtgatcggctgtagcttcgtgcacgagctggtggtggcgacctgctgtagctgcgcctctttggagaacgatcccgtgggccttctaccatagcttgggctcctccggtatcttgggctgcggctgcgactacgaccgcggtaccttggactccggctacggctgcggctgcggcgtcttccactgccaaggcctccagaaccaatccgtaagcggcattcacgtgcaaaatgaccaggttcgccacattcatagcacttcatgtcagaaccaccggaacgatctcggccacgaccactaccagctttggttgacagctcaaccctccatccattcttgccatctaaatcacgaattgcatcttctgcatccctgcggtcatcaaagtcaataaaggcaaaacctggtggttttctagcaacccatacactcctcagaaccccaaacacgcggaactcgtcctcgatctcccgcgccgtcacgcgcggatccaggttccccacgtacacgcgagccatgagcgcgctcgaccctttgcgggcgcgtccgccttgggggggatttgggtttcggggtaggcgaggaggaggaggaggagcggctctagggttttaagctcgagccgtcgagcccacgtgtccg

SEQ ID NO: 3085 - DNA, 1577 bp, Oryza sativa
  Clone ID: PAT_MRT4530_14815C.1
cccacgcgtccgctctccaccgcggcgtctctctctctctctcctcccccacccccaaccaccacttcctccatcaccaaagcgccgctccctcgccgtcgccgccacctccgccgccgccgccggtgccggtcgtcgaggcgggaggactcctccccgcgcgccgcgctcgatccgtccgctccccagtacgcccgagggcagtgatactctgctgcttagttgggtgcagtgtgcactacaagtctacaacaatggagcttgacagtctaagagaggcgtttgatcgagttattgaaaaacgtgcttcctcttctgctaaagctcaggaagttattgatcagatagtgagtgaagttgagcaggcaatcacgaagatgcagatgatgaatacagattccatgggtactgctgaccattcatccatcctggcagaattgaaagccaagttgaatgaattggcgccactaaatcaactagaaggttgtcaaaaggaattgaatgttgcacttagcaaatatctcaagctgctcgagaagtctttcagtccagacatatcgaaagcatatcgaaatgtggattttgaggccagtactataaacagcataatagcaaatcatttctaccgccagggcctttttgatcttggagactcatttgtccgtgagtgtggtgaatcagatggggcacacttgaaactacaattccaagagatgtattcaattcttgaagcaatgcaagttagaaacctccaacctgctctcagttgggctgccaagaaccatgatcagcttttgcagaatggttcaatgcttgagttgaaacttcatcagcttcagtttgttgagatactaacaaaaggaagtagagatgaggctttaaagtatgcaagaactcacttagtgccctttgcatccttgcacaaggcagagatccaaaagctaatggcctgccttctctgggctgataggcttgatcagtccccttatgccgaattcatgtcatcgactcattgggagaagctagcagaggagcttacccatcaattctgcagtcttttggggcaatctagtgagagcccacttggtgtggcagtatcagctggctttcaaggacttccaaccttgctgaagctaacgacagtgatggctgccaaaaaacaggagtggcaggcgatgaaacaactgccagtacccatagatatcggaccagaattccagtaccactctgtctttgtatgtccggtgctcagagagcagtcgagtgatgaaaaccctccaatgctgatgccctgcggacacgttgtgtcgaaacaatcgataatgaagctatcaaagagcagctccagacccttcaaatgcccatactgtccctcagaggctgttgcttctcagtgcaagcagctacatttctgaatgttctttccctgctcagatatgtttatacacgtgttaatttatgttcctgtggcacccatccaataactaccttgtaatataatcctgtatgttaatgaacattctagtgctgtctctggatgttaatctgtacagttgcaaattcctgttcgttttatc

SEQ ID NO: 3086 - DNA, 1069 bp, Oryza sativa
  Clone ID: PAT_MRT4530_14868C.1
ggtgtgtgtgtgtttgttttttttttttttttttttttttttttttgaagaaaaatttaacatatcttagatttatcttcttgaacagacacaaggttcgacgacaccactatagattaattcaacagcatcagcagactactaatagacacacatcccgtccaatatactcctgcttttcttgttatgcgttgccctactgtcttggattgttcgaaattaatccaaatcttaacaatattattacagggcagcatttaacaattcacagttcttttttttcttttttctgtgaagaaaaatttaacatctcttaaatttatcttcttgaacagacacaagcacagatcacaaggttcaacgacaccaccatagattaaatcaacagcattagactactaacagacacacatcccgtccaatctactccagctaaacaagcaaagcgaggcgccgacgcctaggccttcttgggggacttcccggcggccttcttgggcgacttggcctccttgccggcggcggcggccttctccgccgtcttcttgggcagcagcaccgggttgatgttgggcagcacgcctccgtgcgcgatggtcacgccggccagcagcttgccgagctcctcgtcgttcctgatcgccagcagcacgtggcgcgggatgatcctgttcttcttgttgtccctggccgcgttcccggcgagctccagcacctcggcagcgaggtactcgaggacggcggcgaggtagacgggggcgccggtgccgatgcgctgggcgtagcggcccttcttgaggtagcggccgatacggccgacggggaactggagcccggccttgacggagcgcgacaccgccttcttcctcggcccgccggccttcctcccggcggctcccttcttcaacttcccacccgctccggctccggcggcgtccatggctagcctagctaagctggttgctgctgctgtcgaaggcgaggaggatttttttttcccttttctttagtcgaatgcgatatgccgatcccggccgggcctcgaggaacccaatcgcccataggagtc

SEQ ID NO: 3087 - DNA, 1101 bp, Oryza sativa
  Clone ID: PAT_MRT4530_14871C.1
gaatacaatctcataatgtatgtaaagcaatcacattacatgatatcaagctaaaaagtgccactacataacatgagaaacagcatttccccaaccacccaagcaccccaaatggcaatgctattttcaataattacccaaacacaaacgaagaaccaaataacccaccaggaggcatatatgtgcatccactaccaaacacagatcaattgttcgaaattatccaaatcttaacaatattattacaggcagcatctaacaattcacagttcccccatccctctgcccagaccacactcctcgaccctacaccggtgttaacctacacgggtacaaactgattggcttgactgtccatctattcagaaaacaccacaaattacgtacaaacaaccgaaccgattcacgacaaatgatatagcatgcaacgaagacgatgatgatgacgattgacaacagataggagcgtttcagttcagacaagagggagagggaagcgggggacaccaccaccaagccggcattgcgtgtgccctaagcggccgccgccttctttggcgacttggtggtggccttcttgggcgacttgggggtcttaccctccttggcctccttggccgcggcggagccggtcttcttggggagcagcaccgggttgatgttgggcagcaccccgccgtgcgcgatggtgacgccggccagcagcttcccgagctcctcgtcgttgcggatcgccagcagcacgtgccgcgggatgatccggttcttcttgttgtcccgcgccgcgttccccgcaagctcgagcacctcggcggcgaggtactcgaggacggcggcgaggtagacgggggcgccggtgccgatgcgctgggagtagcggccttgcttgaggtagcggccgatacggccgacggggaactggagcccggccttgacggagcgggacaccggcttcttcttcggcccgccgccgccgcggcggccgccggcgccggccttcttgggcaccttcgctcccacctccatcgatcgcgacgagctcctcctccccaagctttctccctcttctgttttgttcgatttttttttcttcctattttt

SEQ ID NO: 3088 - DNA, 1356 bp, Oryza sativa
  Clone ID: PAT_MRT4530_14919C.1
atggagttcgtcgccaacggcaaggtcatcctcttcctcctcttcgtctccacatcggtgctcatcgtctcccccgcctcgccgccgcgcttccactacatcaaccctcacaacttcaccacgccggcgtcatcgtcgtcgtcggcgtcggcgtcggccgttcaccgtagccgcaacaacaacaacccttcgctctccttggtgcaccgcgacgcgatctccggcgccacgtacccgtcgcgccggcaccaagtcgtcggcctcgtcgcgcgcgacaatgcccgcgtcgagcacctggagaagcggctggtggcctcgacgtcgccgtacctccccgaggacctggtgtcggaggtggtgcccggcgtcgacgacggcagcggcgagtacttcgtccgcgtcggcgtcggctcgccgcccacggatcagtacctcgtcgtggactccggcagcgacgtcatctgggtgcagtgccgcccctgcgagcagtgctacgcgcagaccgacccgctgttcgacccggccgcctcgtcgtccttctccggcgtgtcgtgcggctccgccatctgccggacgctgtcgggcaccgggtgcggcggcggcggcgacgcggggaagtgcgactactcggtgacgtatggcgacgggtcgtacaccaagggggagctcgcgctcgagacgctcacgttaggcggcacggcggtgcagggcgtcgccatcggctgcggccaccgcaacagcggcctcttcgtcggggcggccgggctgctcggcctcggctggggcgccatgtcgctcgttggccagctcggcggcgcggcgggcggcgtgttcagctactgcctggcgagccgcggcgccggcggcgccgggtcgctcgcgtcgagcttctactacgtcgggctgacggggatcggcgtcggcggcgagaggctgccgctgcaggacagcctgttccagctcaccgaggacggcgccggcggcgtggtgatggacaccggcacggccgtgacgcgcctcccgcgggaggcgtacgccgcgctgcgcggcgcgttcgacggcgccatgggcgcgctcccgcgctcgccggccgtgtcgctgctcgacacgtgctacgacctgagcgggtacgcgagcgtgcgcgtgccgaccgtgtcgttctacttcgaccagggcgccgtgctgacgctgccggcgaggaacctgctggtggaggtcggcggcgccgtgttctgcctggcgttcgcgccgtcgtcgtcggggatctccatcctggggaacatacagcaggaagggatccagatcaccgtcgactcagccaacggatacgtcggcttcggacccaatacatgctag

SEQ ID NO: 3089 - DNA, 1422 bp, Oryza sativa
  Clone ID: PAT_MRT4530_14922C.1
atggagttcgtcgccaacggcaaggtcatcctcttcctcctcttcgtctccacatcggtgctcatcgtctcccccgcctcgccgccgcgcttccactacatcaaccctcacaacttcaccacgccggcgtcatcgtcgtcgtcggcgtcggcgtcggccgttcaccgtagccgcaacaacaacaacccttcgctctccttggtgcaccgcgacgcgatctccggcgccacgtacccgtcgcgccggcaccaagtcgtcggcctcgtcgcgcgcgacaatgcccgcgtcgagcacctggagaagcggctggtggcctcgacgtcgccgtacctccccgaggacctggtgtcggaggtggtgcccggcgtcgacgacggcagcggcgagtacttcgtccgcgtcggcgtcggctcgccgcccacggatcagtacctcgtcgtggactccggcagcgacgtcatctgggtgcagtgccgcccctgcgagcagtgctacgcgcagaccgacccgctgttcgacccggccgcctcgtcgtccttctccggcgtgtcgtgcggctccgccatctgccggacgctgtcgggcaccgggtgcggcggcggcggcgacgcggggaagtgcgactactcggtgacgtacggcgacgggtcgtacaccaagggggagctcgcgctcgagacgctcacgttaggcggcacggcggtgcagggcgtcgccatcggctgcggccaccgcaacagcggcctcttcgtcggggcggccgggctgctcggcctcggctggggcgccatgtcgctcgtcggccagctcggcggcgcggcgggcggcgtgttcagctactgcctggcgagccgcggcgccggcggcgccgggtcgctcgtcctcggccggaccgaggccgtccccgtgggcgccgtgtgggtgccgctcgtgcgcaacaaccaggcgtcgagcttctactacgtcgggctgacggggatcggcgtcggcggcgagaggctgccgctgcaggacggcctgttccagctcaccgaggacggcgccggcggcgtggtgatggacaccggcacggccgtgacgcgcctcccgcgggaggcgtacgccgcgctgcgcggcgcgttcgacggcgccatgggcgcgctcccgcgctcgccggccgtgtcgctgctcgacacgtgctacgacctgagcgggtacgcgagcgtgcgcgtgccgaccgtgtcgttctacttcgaccagggcgccgtgctgacgctgccggcgaggaacctgctggtggaggtcggcggcgccgtgttctgcctggcgttcgcgccgtcgtcgtcggggatctccatcctggggaacatacagcaggaagggatccagatcaccgtcgactcagccaacggatacgtcggcttcggacccaatacatgctag

SEQ ID NO: 3090 - DNA, 3261 bp, Oryza sativa
  unsure (1)..(3261): unsure at all n locations
  Clone ID: PAT_MRT4530_15007C.1
atggccggagcgggagccgtgggggggagcaactgggaggagatggtgaggaggatgctcccaccggggaccaccatcccggaggcgccggccaacctcgactattcgattgcgctcgagtacgacggccctccggtgtcctacgagctccccaggatcgatcccgtcgacctgccggcgattcccaccgcgcagcccgtctccggcccgctggtgcccgggaggagcaacggcgtggtggctccggtcgtcaggccggtgtttatgccgccggtgcaccggaagcaggatgctcaccgtgccgagccaccgccggttgcggcacagggtaggaggaggagaagctcggaatcggtcgattcggcgccgcagaatgaggggttctctgatgatgatgactcatgctcggtgtcgcaagaatccgcgcacaatttccatgggcagagaggtggtaggacagctgctcaggagggaagaagagctcaggttgtcacatttggggtcactgaggacagcaggtatgagagcaaagagtttgatgatgtgtcggaacagtacgtggcggtgaccaagaaggagaagagagggaggacctgcagccgttgcggtaaaaggaagtgggagagcaaggaatcatgcattgtttgcgacgcgaggttttgcagctactgcgtgctcagggccatgggctcgatgccagaagggcgcaagtgcatcacttgcattggccagccaatcgatgagagcaagcggtcgaagctcgggaagggttcgaggatactatcacgtctgctcagcccgttggaagtaaggcaaatactgaaagctgagaaggaatgccaagcaaaccagctccggcctgagcaactcatcataaatggttttcctcttaatccagatgagatggccagcttgcttagttgccaacggcctcctcaaaagctcaagcctggaagatattggtacgacaaggagtcaggcttgtggggaaaggaaggagaaaagccagacagggttgtcagcactaacctaacctttaatggaaagcttcagcccaatgccagtaatggcaacactcaggtttatatgaatggaagggaaattaccaagattgaactgagagttctgaagattgcacaagttcagtgcccccgtgacactcacttttgggtttaccatgatggtggctatgaggaagaaggccaaaacaatatcaaagggaagatatgggaatcgcctgtgacacgttttgcatgtgccttgttttcactaccggttcctccagcaaactctgacgaaccaaaggacgaagctccttattcagcaagaactgttcctgattacttagatcagaaaagaatccaaaagcttcttattcttggatcgcctggagctggtacaagcaccatattcaagcaggcaaagttattatacgacactaggtttacccaagaagaacttgatagtatcaaacttatgatccaaagtaatatgttcaagtaccttgggatccttcttgagggccgtgagcgttttgaggaagaggctttggctggatcgaataacccaagctcagaggatgagaatacgcagcatgatggaaataaatcgaatggttcagattcttgcatatactcgataaatgcaaagctgaagaagttctcggattggcttttggatataatagcaatgggagacctcgatgcattcttccctgcagctacgcgtgaatatgctccaattgttgaggaaatgtggaaggatcctgccatacaagcaacatataaaagaaaagacgaattgcattttctccctgatgttgccgaatatttcttgagcagggccattgaagtatcaagtaatgagtatgaaccttcagagaaagatataatatatgctgaaggagtaacacaagggaatggattagccttcattgagtttactctggatgaccgtagccctatgtcagaaatgtacactgacaatcatgagcctcactctcagacactaaacaaatatcagctgattagagtaagtgccaagggaatgaatgagggatgcaagtgggtggaaatgtttgaggatgtcagcatggtaatattctcggtagcactcagtgactatgaccagctgggggccccttcaagtggtggcaacagtccccttgtgaataagatgatccaaagcagggacttgtttgaggctacaatcaggcaaccatgtttccgcgacatgccatttgttcttgtgctcaacaagttcgacctcttcgaggagaaaatcgggcgcgtcccgctctccacctgcgagtggttcagcgacttctgccctctccggactcaccacaacaatcagtcgcttgctcagccaggcgttctactatgtcgcgatgaaagttcaaggcgttgtacgccgcctgcacggatcgcaacctgttcgtgtgccaggcgcgagcccgcgacagactgaccgtcgacgaggccttcaagttcatcagggaggtgctcaaatgggaggatgagaaggatgggggtgggtactacccagatgagtccttctacagcaccacagagctcagctcctcacgtctgatcagacaagaatgatgcacattttgcccagaaagaaactggagattgttgctcttcttttttcagtagtattttttcccctgggtgatttgcaaccgatttcgttctgtgcaggcagagatctcgttactgattgtattgtatagtagtattgctgtattagtttgtcagatggagatgatgattattgtgtgttctttatagatcattaattaatacactttcatactaatttgccagtcaaatatatgcaaccccgcgaaatggttagcttgtcctttcgccgaattggtacagaaaacattggatatggttgtatattgattttacaggttatcctgatcgaaattgttgctgttcatcacctgaagagaataggatccgttggtcctgttgttgcgctagcctgtactaatttttttcgaaacaaatgtacaaagaaagaaagaaaaagttgtgtgatatgtttgtgatttgtaccaataaaaaggtaaaaagcaaaagtgtggatgatagtggccatattgtttggtgaactaaccttagctacactagctgtaaaatcatgtagcagttcagctgttctgtcgggttgagaaaaataaattgacatccacattcaagnctaaaaaaaaaaaaaaaaaaaaaaaaaaaaaaaaaaaaaaaaaaa

SEQ ID NO: 3091 - DNA, 2256 bp, Oryza sativa
  Clone ID: PAT_MRT4530_15014C.1
atgggcggagagaggccgccgccgatcagcggcggcggcgccttcgcgttcatctccaaggggtggcgcgaggtgcgggactcggcgagtgccgacctgaggcagatgcgggcgcgcgccgaccgggagctggagcacctcctcgcgtcggcgtcggcgctcgcgggcccgccgctgccgccggtcgcggcgggggcgcccatcgcggaggtggagttcgtgcggaagcggatccagcccaagatcatggagctgcggaggcagtactcgtcgacggtgcgcgacgcggggtgggcccccaaggccgccggggccagcctccgcgtcgacctctcggggattacggcgatccgcaacgccattgtggccgaggggggcggcggcggcggcggcggcgggaggtgggggctcgtgcggtggaagggccacgcggacgacgaggggaggaaggagtgggaggtggtgaggatgatacgcagcgggctgaaggagttcgagcgccggagcttgtcgagtgaggtgtttggtggatttcgtggccgcggcgagttcgtggagaaattcaagttgagcttgaaatctctgaacaaagagtcacaagaatccaaggaggttctcccactggatcttactgaaattctggcatatcttgtgcggcaatctggaccatttctggaccaacttggtattagaagagatttatgtgacaaaattgtggagacattgtacagtaaacacaatggccggctcatttatcattctctttcagctgatagatctttaattggaaatgagaacatgactgatgagcttgatctgagaatagcaagggtgctagaaagtactgggcatcacacagaggaaagtttttggaaggatcatgcaaagtacaagctctcggacaaccggcggcatgttgcaattgtcacaacagcaagtcttccatggatgactgggacagcaatcaatccattattccgtgctgcgtatctagcaagaagtacaaaacagaagttcaccagaagaacagaaaattacataaggaactggctacaggaaagacttggctttgaagcaaattttaagatatcattttatcctggcaagttttcgaaggagcgacgtagtattattcctgctggagatacttcacaattcatttcctcgagtgaagctgatatagcaattttggaagaaccagagcatctcaactggtatcatcatggaaagcgttggaccgacaagtttaaacatgtcattggtgtagttcacacaaattacctagagtatatcaagagagagaagaatggagctcttcaagctttccttgttaagcatatcaacaactgggtgactagagcatactgtcataaggttttacgtctttctgcagcaactcaagatctacctaggtctgttgtctgcaacgttcatggtgtaaatccaaagttcctcaaggttggtgaaaaaatagcagctgataaggagcatgggcagcagagctttacaaagggagcatatttccttgggaagatggtttgggctaaaggatatagagaacttatagatttgttatccaaacacaaaagtgacttggagggctttaatgtagatgtatatgggaatggtgaggactcacaagcagtgcagatggctgctaggaaattgaatttgagcctcaattttttcaaaggaagggaccatgcagattcttcgcttcatgggtataaggttttcattaatccaagtgtcagtgatgttctatgcacagcgacagctgaggctcttgcaatggggaaatttgttatctgtgcagatcatccatcaaacgaatttttcaagtcattccccaactgcttaacatacaaaacttccgaagaatttgttgcccgagtgaaagaggccatggctagtgaaccttcacctttgacccctgagcaaaggtacagtttgtcatgggaggcagcaactgaaagattcatggagtactcagagcttgacaaagttctgaataacaaaattggttattctggacaagatgggaagagaagtaaagtgagaaagatacctttacttcctagactttcagaagttgtggatgggggactggcctttgctcatcactgcttaactggcaatgagatcctcagattggcgacaggagcaattcccggtacacgtgactatgataaacagcaatgcatggatttgaatttattgcctccccaagttcaacaccctgtatatggctggtga

SEQ ID NO: 3092 - DNA, 3840 bp, Oryza sativa
  Clone ID: PAT_MRT4530_15016C.1
atgggcggagagaggccgccgccgatcagcggcggcggcgccttcgcgttcatctccaaggggtggcgcgaggtgcgggactcggcgagtgccgacctgaggcagatgcgggcgcgcgccgaccgggagctggagcacctcctcgcgtcggcgtcggcgctcgcgggcccgccgctgccgccggtcgcggcgggggcgcccatcgcggaggtggagttcgtgcggaagcggatccagcccaagatcatggagctgcggaggcagtactcgtcgacggtgcgcgacgcggggtgggcccccaaggccgccggggccagcctccgcgtcgacctctcggggattacggcgatccgcaacgccattgtggccgaggggggcggcggcggcggcggcggcgggaggtgggggctcgtgcggtggaagggccacgcggacgacgaggggaggaaggagtgggaggtggtgaggatgatacgcagcgggctgaaggagttcgagcgccggagcttgtcgagtgaggtgtttggtggatttcgtggccgcggcgagttcgtggagaaattcaagttgagcttgaaatctctgaacaaagagtcacaagaatccaaggaggttctcccactggatcttactgaaattctggcatatcttgtgcggcaatctggaccatttctggaccaacttggtattagaagagatttatgtgacaaaattgtggagacattgtacagtaaacacaatggccggctcatttatcattctctttcagctgatagatctttaattggaaatgagaacatgactgatgagcttgatctgagaatagcaagggtgctagaaagtactgggcatcacacagaggaaagtttttggaaggatcatgcaaagtacaagctctcggacaaccggcggcatgttgcaattgtcacaacagcaagtcttccatggatgactgggacagcaatcaatccattattccgtgctgcgtatctagcaagaagtacaaaacagaaggtgacactggtggttccttggctctgtaagtcagatcaagagctagtttaccccaataatatcaccttcagttcaccagaagaacaagaaaattacataaggaactggctacaggaaagacttggctttgaagcaaattttaagatatcattttatcctggcaagttttcgaaggagcgacgtagtattattcctgctggagatacttcacaattcatttcctcgagtgaagctgatatagcaattttggaagaaccagagcatctcaactggtatcatcatggaaagcgttggaccgacaagtttaaacatgtcattggtgtagttcacacaaattacctagagtatatcaagagagagaagaatggagctcttcaagctttccttgttaagcatatcaacaactgggtgactagagcatactgtcataaggttttacgtctttctgcagcaactcaagatctacctaggtctgttgtctgcaacgttcatggtgtaaatccaaagttcctcaaggttggtgaaaaaatagcagctgataaggagcatgggcagcagagctttacaaagggagcatatttccttgggaagatggtttgggctaaaggatatagagaacttatagatttgttatccaaacacaaaagtgacttggagggctttaatgtagatgtatatgggaatggtgaggactcacaagcagtgcagatggctgctaggaaattgaatttgagcctcaattttttcaaaggaagggaccatgcagattcttcgcttcatgggtataaggttttcattaatccaagtgtcagtgatgttctatgcacagcgacagctgaggctcttgcaatggggaaatttgttatctgtgcagatcatccatcaaacgaatttttcaagtcattccccaactgcttaacatacaaaacttccgaagaatttgttgcccgagtgaaagaggccatggctagtgaaccttcacctttgacccctgagcaaaggtacagtttgtcatgggaggcagcaactgaaagattcatggagtactcagagcttgacaaagttctgaataacaaaattggttattctggacaagatgggaagagaagtaaagtgagaaagatacctttacttcctagactttcagaagttgtggatgggggactggcctttgctcatcactgcttaactggcaatgagatcctcagattggcgacaggagcaattcccggtacacgtgactatgataaacagcaatgcatggatttgaatttattgcctccccaagttcaacaccctgtatatggctggtgaggagacggcgcgtcaactcatgatgttgatagccacttctttctgagatttttcagggactttgaagcaggcaagtcgtgccaggttatcgacagattctgcaattttctttacttgtgtaaccaagtctgaaagaagtgatgcagtaactgccacatgcatcacttgcagcagagctttatcctctgatagctcgctcctgagtgttttggcagctttgatggctgcagacatggaggttgtagatggtacggtcattgttcgaagtgctgccgagagctctctgagtgcctgagcagagtgtgagctcatctcactgcatgctgttcgtactttgaaggacagctcaggattggcttcaggatactgagattttgtgagtgtgatgacataggaagccatagcctccatggaagaagcgcactggcgagaaagagctccaatcttctggtattggctccatgggtgtttgaaactgaattttccatgaccaggctcccatctggcaaagttgcacagagagtcttcagtggccttcgaattaagtatgctcttgtacgcttggagaaaggctttgccctccaaactctcactcgtagcgctttctccaaagcattcggtttccattccttcaaggaagtcggccagcttgtcgaggttgccggcggcgagcttgtggaggtcctcgccggcccagacgggcatgacgaagatggtggtgcagaggcaggtggcgacgccgacgacgatggtggagaagcgctggtgcgcgagctggatgagctcctctacccggtagctcgacacggccaccaggctgaaggtcaggatgaagatggtcaccccgtagtcgtacctcgcctttatctccggtatgaaccgcgagaacgtcgccgccgacgctagtaggaagacgaagacggcgaggagtatgggctctccctgtgcgccgcaccggttagccacctgatgcgccccgacggcgatgaacccagccaccagcgtcgcgaaggccctgttcaaccctttgctcagcgtgccaccgacggtgtactccatgacgacgacgacggtgagcacggcccagagcgtggagaccccgaaccccttgaaaagcggcgtcacgtagtagagcacggacaccagcgtcagcgccagcccgaccttgagcgagtgcgccaccctcctcgggtcgtccgccgcgatcccgcccaccttcctcgccagcccgcccacccacctcccggccacctccaccgccgctcgcacccgcgcccagcatccatccacccaccccccgccgacgacgacgaccacttggccgccgttctccgccgccgccgccgccgccggcgtcgtctccacggcagcagattgcatgatcgccttgaagtacgatgataagttatcgatcgagctagctatagctagtgatcgatgtagctaattagtatataatagtagcgccgcgtacgtacgtctttgagctgggggcttgatagatggagtaga

SEQ ID NO: 3093 - DNA, 2262 bp, Oryza sativa
  Clone ID: PAT_MRT4530_15145C.1
atggctaccactagtacactgcatcaggcggttgcctacttattagccgtcatgctcgtctgcttggcgccggtgacaccggcatcggctcagccatggccgggctgccccgacaagtgcgggaacatcagcatctcctaccccttcggcattggcgccggctgcgcccgggacaaagacttccagctcgagtgcgacggcaacactccgcacttcaactacctggatgatcgtgagaaaaagctggtgagcctttccatcgccgacggcgaggtccgggtcttcgtcgacgcgggaagcaactgccacgacgaccgcttcaaagcaatcagtgggcactaccgcacgccggactacggccgcagcatcgcctaccggttctccacagcgaggaaccgccttgtcgtgctcgggtgccccgtccttggctacttggttgacgccgacgataactatacgtacgtcactggctgcacatccacgtgccggcggtcgcagtcgcagggtgacttgccgggccagtgcaccggcgagtcggggtgctgccagaacaccatgccccgcgctctcaacgtctacaagccttacatactcacgttgaataagacagaggaaccaacgcgaaacgtccccgaccaacaggagctcccgccgacggaacccgtcttccgccatctcgactcaacaaaatgccagtatgtgttcgtggcggaggacaagtggatcaacaccacctacagctatcgcgccttcatcaaccgaaccagcgacttcaccgtccccgtcgtgctcgactgggccatccggaacgccggcaactgcgacatcgccgtgcgcaacaggacggactacgcgtgccggagcgcgcacagcgagtgcttcaacgccagcgacggccaggggtaccggtgcaggtgctccaagggctacgagggcaacccctacctcgacggtggatgcaaagacatcgatgaatgccaacgcacaaaggaatacccatgcttcggaaaatgcacaaacacaatcggaagctacacctgcgaatgccgaccggggactagtggaaatgcaacccaggagaatggatgcctcccaacggacaagttcacgttagctctgaaagtcgttacaggggtcagcgtgaggaagctcatcagaacgaagcaaagattctttgagcagaacggtggcgtgcttctccagcaacagatgagttcctatggtggcaccagcggcggagcgggtgggttcaagattttctccaaggaagagctcgagaaggccaccaacagctttgccgccgaccgtgttcttggccgcggtggctacggcatcgtctacaaaggcgtcctggaggacaacatggtggtggccatcaagaagtcaaagatgatagaggaggcacagaccaaggaatttgcgaaggagatgtgcatcctctcccagatcaaccacaagaacgtcgtcaagttgctcggttgttgtcttgaagtcgaagttcccatgctagtttatgagtttgtctcaaacggcaccctcgaccactacatccatggcagcactctcaacactgtcatatccttggactctcgtcttcggatagcggcagagtcagcagaggcactctcctacatgcattcttcagcctcaccacccatcctccacggagatgtcaagacggcaaatatcctccttgatgacaaactcaccgcaaaagtttcagattttgggacatcaaaactggtgcctaatgatgagttcgagattgcaactctggtgcaagggacatgtgggtacctagaccctgagtacctcatgacatgtcagctgactaacaagagtgatgtgtacagttttggtgttgtcctcctggagcttctaaccaggaagaaggcactctacttcggcggatcagaggaagacaggagcctcgtgtcttgcttcatgacggctgtgagagatggccgccatgaggaacttattgacagccaggtgaggaatgagatgacagaggaggtgctccaagagattacacacctcgtgatgcgatgtgtgagcatgagtggtgaggaacgaccgatgatgaaggaggtcgctgagaagctggagatgctgaggagataccagctacacccctgggataaaggtgatgccaatccggaggagaagcagagcttgcttgacatggaacagagaaatgtggatcagaagttcagacaccaccatgactatgatcctgaaaatccagcttgcagatcctag

SEQ ID NO: 3094 - DNA, 1878 bp, Oryza sativa
  Clone ID: PAT_MRT4530_1519C.1
ctgctgcagtggggcgcccggaggcttcttcttcctcctctcccctctcgccgtgctggtggtgagtgaggcggcgagcggcgagctcctccggtgatccgaggctcgccggccggcgagagcttgcctgtttcgggaggttttcagggtgatctgagagcacagcgagccgatggcggcggcggcgaacggggcggcgtgctgcggtggcgcgacggggccagggtacgcgacgccgctggaggccatggagaagggcccgagggagaagctcctctacgtcacctgcgtctacaacggtactggaattaacaagccggattacctgggtacggtggacgtggaccccaattcccctacatactcccaagtgatccacaggctcccagtcacccatgtcggcgatgagctgcatcactctggatggaacgcttgcagttcttgccatggtgatccatcggctagccgccgtttcttgattctgccttcgttgctgtctggccgtgtgtatgtcgttgacacgctgaaggacccaagggcgcctgccttgcataaggtggtcgaggctgaggacattgctgagaagacagggcttggatttcctcatacatctcattgcctggcatctggggagataatgatttcttgccttggggataaggagggaaatgctgctggcaatggcttcctcctgctggattctgaattcaatgtcaaaggacgttgggaaaagccaggtcacagccccttgtttggctatgattattggtatcaacctcgtcacaagacaatgatcagttcatcatggggagcacctgcagctttcaggactggttttgatcttcagcatgtgcaggatggtctctatggaagacatctgcacgtgtatgactggcctggtggtgagctcaagcagacactagatttaggcagtacaggtcttcttccacttgaggtgaggtttttacatgatccatcaaaggatactgggtatgtgggctgtgctctgacaagcaacatggtcagatttttcaagactgcagatggatcatggagccatgaggttgctatatctataaaaccattgaaagtgcgcaactggattctgcctgaaatgccaggactgataactgattttgttatctctctggatgatcgctatctctacttggtcaactggcttcatggtgatatcaggcagtacaacatcgaggaccctgcgaagcctgtgttggctggacaagtatgggcaggaggccttcttcaaaagggcagtgaggttgtgtatgtaactgaggatgacaaagaagagcagtacagtgtgccccaggtcaagggtcatcgacttagaggtgggccacagatgattcagctgagcctggatgggaagaggatatatgtgaccaactctcttttcagccgatgggacgagcagttctatggccaagatcttgtcaagaagggctcccacatgttgcagattgacgtcgacactgagaaaggaggactatcgatcaaccctaacttctttgtagattttggtgctgagccagagggtccctccttggcccatgagatgagatatcctggtggagattgcacctctgatatatggatataaagatcttgaaggatttgcatacactcaggtgttgattcatcctgtgtattcactgtaactaagactctatgcttgctgtggtttatatgtaatttcgatggtaacaagtccccataatacctagaacattcactccatggctcatttggtaacattagcttaataaagagatgtatccaatggtgcactttctgctaaaaaaaaaaaaaaaaaaaatctgattaaaaaaaaaaaaaaaaaaaaaaaaacgcccggta

SEQ ID NO: 3095 - DNA, 2060 bp, Oryza sativa
  Clone ID: PAT_MRT4530_15363C.1
ctaccatggttgttgatacaaggaaacaaagggcctgtttggggagcttctagctgctgcagcttctcccataatcagaagctcccccaaacagtccagcttttggtccagattctgagaagctgtagttgtaaaatccaggaaatgaactagaagccagaagctggaaaacccagcttttccagattctgagaagctggctaccaaccagctgcttctcagaatcttaagctcccccaaactctggctatagttaggggatttgtaccatccccacggctcatcggaggcgtactccgtcacttgcttgacgcttaggtagttgtcaatggccccttcttcgagctcgcgtccaaagccgctgtcgcttgtccccgcccccatggagcttgggagaagcagggttgcgcagcagttcacccagataattgccggtatcgatcttctcagttaatctctggcacgctgcgcttgttcccgccccatggagcttggcagaagcagggttgcgagcagttcacccagataattccggcatcgatctcctcagttaatctctggcatcgctcgcggtcaccggaaagcacagcaccagccagaccataatgagtatcgttggccaattcaatggcttcttcttcagtgctaaattctttcacacagagcactggaccaaaaacttcttccctccaaatttgcattgatgtatcgacatcagtaatgattgtgggttcaatatagaaacctttctccagatgcttgggtctaaccccaccagtcagaatggtagcaccttggcttttggcggtagatacaaattgcttaatcttctcatactgtccttcactaacaacgggcccaagcctgcaaccctcttcaagtggatctgacaccttaatatttttggcccatgcaaccatcctttcttgaaattctttagcgatttttttatgaagaataagacgcgatgttgcactgcaaatctggccattggtccaaaagcaaccaaagagagtccactcaacagctttttcaacatcaacatcatcaaacaccactataggactttttccaccaagttccagtgaaacaggcttaaccataggagcagctgaagccataatctttttaccagtttcataactcccagtaaatgcaaccttgtctacaccagggtgtgatgacaaaggagcaccggcttcagaacctaatccagtcactatgtttagcacacctgaaggaagaccaacctctttacacacatcagcaagctccaaacaagtcacggaagccaattcagatggttttagtacagctgtacagccagcagccagggcaggagctaccttccatgttgccatcaggagaggatagttcatgagagccatgcttgggtcataaataaatataagcgcaggatgagagaaaaatgtgaaataccaaggtgtgatcaacccaactacaccgataggctctttccgaagatagcatttaaagttttccattggaagagagacaggtgcattttgccttttgtccaaggattctgcaagatctgcaaagtactcaaagcatccagcaacatcgtccatgtcccatgctgcttcatcaagaggcttcccacaatcaagcgtctctagtctagccagctcagatttcctctcgattatcttggccgcgattgcgcggaggtacttggcccggacggcgcccggcgcgcgcgcccagtcgcggccccggttcctcttcagcgcctcccgcgccgccgccaccgccgcgtccacgtcctccgccgtgcccgccgggatctcgccgatgggggactcggtggcggggttgacgacggggaggcggcggccgagcgcgggggcgcgccactcgccggcgacgaagagctgccgctgcgggatcgccgtggccatctcgccgatcgcgacggggatcgaggaggagctggagctgtgcgatttggggtcggtgagagatacggagatggatcgatgacgatggaggcagcccgcgtggtgtcaggtgtggagtggtggtgggagagaaagtgc

SEQ ID NO: 3096 - DNA, 1740 bp, Oryza sativa
  Clone ID: PAT_MRT4530_15416C.1
cccccggcccgcagcccccccccctgctgctttttttttttttttttttttttgcctgacttggaaagggacaaattcataatcagttgtgaaatacaaatgcaaaagttggtagctttctactacaaaaagaagttatacaacaagaagagaccgatccgaatggatgatgctttctggtaatataaacactacatcaacttaacacggtgagtcagagcacacgtcttgccaagacaacagattgcatttttccactggacattaggatatgatacagctgattgcctgattctatgctacaagaccaacaaactgatttccatagcccatcgagttggtcgtaattcttaacacaaggaacttacaacaacacaggaagaaaactgtccttcaaactattttccggtgtccgctgaaggcccaaatcttcaaattcttgtcccaacttcctgtacacaatgcactcccatcagaagaaagaccaaggcagcttatacgcccctcatgagagttttggaggtttcccaaattaagtaccacctcagcgagaagtgtgtcccacacataacagtcaccattggagtatccagcaaaaagaagccttcctgatatcgaaaatgcaatagatgtaacagttgggagttcattatcatttctatcaggttcccgactgtatacttgaagttggtgccctgttctcacgtcaaataatctacacgttccatcatctgaaccagtaccaaacctctggccatcagggaaaaacttgacactgttaatgtcaccctcatgaccatgatatgttctaactgcccggcttgcaattctgatatcccacagccttacagttgcatcacatgaacccgaaacaaacatattcgaatttgatgagtttatggacaagctcaaaacatctgccgtatgccctgatgggaattcaccgccaaatattgatatcctttggccagtagtaacatcccacaggacacatgtttgatcaccagagctagtaattaggcgggtttcctgatctgggacatactgacaggatgaaacatagcctttgtgtccggtaagtattcttgatactggtatattcccatctctgtctgcttgtgagttaagattgaagatagagcatgcgctgtcaagaccaccacaggcaacagattggccattgggtgcaaatgcacatgtcatcacccatgggcaatgtaactttatggcatgtgttttttgacttgttaatgcattccatacaattagccttccatcttgtgaggcactgactatccaattcttttcaggggtccaatccagagaatatacctttccgctgtggccttgaagcgtgcggcagcacaccagatccgtcgggttgaagctcaccggcgtccgcccctgcgtcctcgagtacctctccacgtcggtgtcgagcagcatctgccgcctctgacggagccgctcccgcagggagttcaccgacgccgtggccgccgcgtgcttctccttgagctccgccacggacgccatgccgccgccgcccgcacgccccccgcgacctcgcgctggttgagggaggggggatctactgggatccgggcatggaggcgaggaacgcaatggcctcggctggagctttccggagctcgcgaggaggaggaggatactaccacggcggcggcggcgagaaacggacgccgaaatggggtggaggaagagagggggggggggggc

SEQ ID NO: 3097 - DNA, 2607 bp, Oryza sativa
  Clone ID: PAT_MRT4530_15551C.1
atggcgtcgaggaggcagtggggagccggtgccggcgccgtcgatgttcctgctcaggaacgcaagggagaggctgccaagattgcgaggaggccaaagaccacgacggttgttgctcagcaaccgccaagaatccgtcgagccctcgccgacgtcagtaatctcgtcaatggccgggctgctctgcctgtcgtaaatcgccagaaggcagcagcagcagcagctgacaagtgcaggaaaccaatcaagcagcgcaacgagaacaacaaggcggccaagccagaagtcatcgtgatcagttcagactccgagaaacataagaaaaatccagcccagagagcagcctcccggagggcgccaatccaaacgctcacctcgattctgaccaagtgcagcagggcttctgacggtgtgatcagcccgaaaaaggagctgatatacgacatcgatgcatctgattctcacaacgagctggcagtggttgattacgtcgaagatatctacagattctacaggaacaccgagaacacctaccggcctctctgcacctacatggtgtcacagaccgagatcaacgagagaatgagagcaatcctgactgattggctcatcgaagtgcactacaggcttatgctgatgccagagacactgtacctcactgtctacataattgatcagtacctgtccctggagaatgtgcccaggaaggagctgcagcttgtcggtgtaagcgccatgttgatagcctgcaagtatgaggagacttgggctccattgcttgcacttgcttcttgtcttacagttgagctgccatttttgcaggttaaggacttccttgtcatatcagacaactccttcagcaggcagcaggtcctgagcacagagaagtccatacttaacaagctccagtggaacctgactgttccgacaatgtacatgttcatccttcgatacctgaaagctgcattgggtgacgaggagctggagcacatgactttcttctacgcagagctcgcactggttcagtactccatgctcttttttgcgccatcggtgatagcagccgctgccgtctacgctgctcggtgtacccttggcctgagcccactatggagcgatcttctggagtaccacaccggcttagctgagccgcaattgctggagtgtgcgaggcggctggtgagcctgcacgcggcggcgccggagagcaggcagaaggtggtgtacaagaagtttgtgttcttcagttcttggtttgttgttgttgttatgggcatatacaaaaggccattctttttggtttctgcatgcaggtttgtgttcttcagttcttggtttgttgttgttatggcatgtacaatgagtagcatggcatgccattcccttccagagagtggaagcaacttgtcagctgctgatgaactctttcagaaccaaaggtcagagcagggaatttactggacactctgggactccaggctatctgatgatctgaacacaacgaccgtatattcagacaatcatggcagcaacggtggcggcacgcaatctttcgacacctctgaacattgcagtacagtgccttcagattcagatgagcaacctggatatccatcacagtttgagcctctgcacatggagcaaacaaacgacatgttcttgagccagttttcagatgaggaggtgaggaggatggatgctccgttccaggcgctggacatgttcccggactccatgcacaggctcatgtcctacgaacacatactgaacggagctctggtgtccgattccaagaatcaggaggtgaacatggatcaagacgacatggacacctgcggtttccctctctacttcagccatggcctgcaagatgatggcggcttgccttcttttgccaaggggatggttgctgcagacacctcctccatggacaagacaaatcgatatatttgggtatttgcgaatgctggagcgagcgcgacggagagaggcgatccggggagttcgccgccgggattcgaagaagctgtgctcgaggagctcgaggaggtgatggtgcagatggcgaggacgacgcggatatgcctccgcgacgccttctaccggctggccgagggctcgaggtcgccgcgctccgccgccgccgccgcagacggcgccaccgtcgccgaggccaccaggtaccacgcgcaagccgccgtcgaccttagtcgatcgcttcttgaaatcctccagctcgtgatcctgatgctttctgtctcctcttctcctctcgccgcggcgaatcctctccagtgcgtcgacgacgcggccgcgccgtcgccgcgacgcgatcgacaggacggtggtgagcctcaccttcaggccgccgccgtgctcgccggaagcagaggcggcgatgatgcggcccacgcgtgcctgaggaggccgagctcgccgtcgccggatcaccggaggacaggaggagattcgcttggtttttctttccagtgcgatcttgctcgccgcattgcaagctcactggcttgcctgacgaaggatacactgtgtatgtgacctgcagctttgccatgagagctttctatgttcaagcatgtggaatttgat

SEQ ID NO: 3098 - DNA, 1056 bp, Oryza sativa
  Clone ID: PAT_MRT4530_1576C.1
atgaaattatcaaactttatgcagttaactggtaactagtgtccctgttgatccaaatagaaaatatttatcatatgttacaacaaacaggaggcagacaatgccaagagttgatactggataggatacatggccatggccttacaggtttacatgaattcctacctttctcctacttcgaaccagaagaaaacagaactgcgagaatagatagcccgcacatgttgcagcgccagtgttccattagtcctgacggccttcgcacccccctcaatgcgggtgcgaacaacagttacaccatgtccttgctccttgagtgatgagaacgaatcatactcaatcgctgtgctaattatagggaaggacaaataatccagaggattttgctcgcactggagcaagcactcctcaatagttaatctaccacttcgatgaagcaaacaacacccaagctctgttctaatagtgagatttgcaatcttgcaggtggaatggaactccaacgcattgtcagagccacgcgaacatgttaacactgtgtcgtcaggaagctcacccccgccaataatgcagagaggcttctttatttggatattacgtgcaacatgtgtgccaccagcagcaattagaatagtatccccaggcctagctgcagaaacagcagactcaagatttggatagactcctggctctattgtatttctgattggcctctcaacacgcaaccacagtcgaggatggcatgcaaggaagcgccatctgtggcaaacgagggcggtgttatacctatctgggattgggctgaggaagctgaagatgtgcatgaggcagccgtcgtccaggctgttgaccggcgcctcccccgacggccccgccgccgaccgctgccgcttcggaggcatctctccgaatccctctcccccccagtacggcgtgcggcgccggcggcgagcggcggcgcggtggcctgcggcgagcgcgaggtcggcaacggcagctgcacgcgcgcccacgcgtccgcccacgcgtccgcccacgcgtccgcccacgcgtccg

SEQ ID NO: 3099 - DNA, 2197 bp, Oryza sativa
  Clone ID: PAT_MRT4530_15828C.1
ttcaccacctcctcctcctcctcccatccagcacgcgcctcctctctcgcgcggctttccatttccatctccccctcctcctcctacgtctccgccgctcctcacttcctccactcgatttcctttcttggcctctcctcctctgacacaggggtgtgcaggtttgtgtttgtgcgtggcgcgtccgccatggctcgcggcagcggggccggaggaggcggcggcggtggtggcggggggctggagctgtcggtcggggtcggcggcggcggcggcgcgcgtggtgggggaggcggtgaggcggcggcggcggtggagacggcggcgccgatcagcctcgggaggctcatcctctccgggatggtcgccggcggcgtgcagtacgggtgggcgctccagctctccctcctcaccccctacgtccagacactcggactgtcgcatgctcttacttcattcatgtggctctgtggtcctattgctggcatggtggttcaaccatgcgtgggtctatacagtgataggtgcacctcaaaatggggaagacgaaggccatatattcttacaggatgtgtgttgatatgcttggctgtcgtagttattggattttcagctgacattggatacgccatgggtgatacaaaggaagactgcagtgtctaccatggatcacggtggcatgctgctattgtatatgtcctgggattctggcttcttgatttttccaacaacactgtgcagggtccagcacgtgctctaatggctgatttatcaggacgtcatggacctggcacagctaactccatcttctgttcttggatggcaatgggaaacatcctaggatactcctctggttccacaaacaattggcacaagtggtttccattccttaaaacaagagcttgctgtgaagcttgtgcaaatttgaaaggtgcatttctggtggctgtgattttcctgtccctgtgcttggttataactctgatatttgccaaggaagttccattcaaaggaaatgcagccctcccaacaaaatcaaacgagccagctgagcctgaaggcactggtccactagcagtgttgaaaggcttcaggaacttacctactgggatgccttctgtgcttattgtgactggccttacctggttgtcttggttcccattcatcctctacgacactgactggatgggccgtgagatctaccacggtgacccaaagggaactgatcctcagatcgaggctttcaaccagggtgtcagggcaggtgcatttggcctgctactgaattcgattgtgctaggattcagctcattcttgattgaaccaatgtgccggaaagtcgggccaagggtggtgtgggtgacgagcaatttcctcgtctgcatcgccatggctgcaactgcactgatcagcttctggtcactcaaggacttccatggaactgttcagaaagccatcactgcagacaagagcatcaaggctgtctgcctcgtcctctttgcgtttcttggagtccctctcgccgttctgtacagtgttcccttcgcagtgacggcgcaattagcggccactagagggggtggccaagggctctgcaccggcgtcctcaacatctccatcgtcatccctcaggtggtcatcgcgctgggagccgggccgtgggacgagctgttcgggaaggggaacatcccggcgttcggcctcgcctcgggattcgcgctcatcggcggcgtcgccggaatattcctgctgcccaagatctccaagcgccagttccggtcggtcagcatgggcggcggtcactgaccgccccgctctcgccgccggctgcggcggcggcggcggccggagcagcgccgccggaagtggtgagctttgtagttctcgtttgcaatggatcaaaggagccccctctttttttttacatagggtaattaattaattaaggctgttaattaggaaggggtgaggtggccctgcagctggggcccacgctttgttgccacctcggtagaagagaataagcagatcatgcagataatatggaactgtaaaactgttttgtgttgtgtgtgtgtgcagtgtgcttggtaattagtgtgtaatgaatggtcaggagaagtgcagtgaactaagtgaaagtgagcttccatcatcatcaaaaaaaaaaaaaaaaaaaaaaaaaaaaaaaaaaaaa

SEQ ID NO: 3100 - DNA, 1583 bp, Oryza sativa
  Clone ID: PAT_MRT4530_15830C.1
ccacggtactttttttttttttttttagaacaaccaaatgaactcattttatatattgaattattaaacatacacgttttgcaacgcaatcacaataacacaaatgatcaaacagccttgacgcattacaaccagctttacttatttaaacaaaacatgccactaccaccaccttgtaaaactcagcacacaagacaacctcagtggtagtagttgttgagcctcctgcagttcttcctgatctccccctgtgatccagtcagaggcgagatgttgcccatattcaccattgactgtgcgaagtgcttgaagaagaggttgacatcatcagcatacgccttcacgagcgccgctgtttcagcgctcttggtaagcaggacctgatcagagctgagaaggcccttgccagacaggatgttcttgaagtagaagttgtcgaactttgcggggctgacaaagtctagcgggaagaggttgttgtcaccaccagaacgggggcatccctgcctcagctgtgccgcgtaggacacatccagtgtgtagtcagccatgccattgccgctctgattgtagagcctctgacggaagctggtgcaccgagacatgccaatggtgtggccacctgagagggctacgacgtcgacgatgttaaggccctggcgcttgaacttggtgatgatggtggggagggtgttgttgggagctgggatgtcgttgttggagccctggatgctggcacccagtgagtccctccggccaagtggcacatcccagtacgggccaccaacgaggacagtggaatcgcgtgcagcgagggcgagtatgtcggcgcaggagacggtgccggggcaagctgcttcgagggcggccttgatctcgtcgacgacctcgaaacccctgagggagttcatgttagggtttgaccccttctcactgatgatggtggtgctgttgtccaggagcacagacgcgtcacaccccttgacaaagcagtcatgaaaatgcagcctgaccaaggatgccgccatcctggtctccctggccaccgcctgtgctacgatggactgcacgatctccttcgccttggggcacgagtggtcgtagaactgcgggaacaagccatacccatacccataccacgggttgccgtggacagaggtggcgaggaggaggggagaaaccaagcagagcatcaacaggcaacccatggaagtcgccaagtaaaccttcgctgcactgcactgcactgcactaggttgctaggtaggagaagagaattgctctctgtttgtttctacctctctggcccacgggtcccgagcggaggcgggcatggggtggcatatatagcacctgtgggggggtgcatgtaggaagggtggtttggagcagaggacagtgagatgagacgcggcagggcagcttgggttgttagggtgatgcgtataaaataagtcagctagctacgcattgtgctcaactgcttcagtaattccatcaattatcagctaaaaaaaaaacaaaaaaaaaaaaaaaaaaaaaaaaaaaaaaaaaaaaaaaaaaaaaaaaactcgagggggggc

SEQ ID NO: 3101 - DNA, 2164 bp, Oryza sativa
  Clone ID: PAT_MRT4530_16044C.1
atggagtcgctcgcgctcctccacgccaagcccggcggcctccctccccgcgcggggctccgcctcccgctcccgcgcgcgcgatccgcgcgcgtctccctcccctcctccccggcggcccccgtatcgctccagtccccgctcctcctcgcttcgagaagcggccctacctcgcgggacgccgtcgtggggttgggattggggtgcgggctcttgagacggaggagcggcgctagtggtggtggtggtggtggggtctcttgcggcgcgcagcctgccgcggcggcggcggcgggggcggtgccggcggcgcagccggaggggaagaagttcctcggcgtggaggtgaagacgctgaagaagatcgtgccgctcgggttgatgttcttctgcatcttgttcaactacacgatcctgcgggacaccaaggacgtgctggtggtgaccgccaaggggagcagcgcggagatcatcccgttcctcaagacgtgggtcaacctgcccatggccatcggcttcatgctcctctacaccaagctctccaatgtgctctccagggaggcgctcttctacaccgtcatcttccccttcatcgccttcttcggcgcctttgccttcgtgctctaccctctcaggaatgtgatccaccccaccgcgctcgccgacaagctccttgcggcgctcggcccgagctttcttggccccgtcgccattctgaggatttggagcttttgcttgttctatgtcatggccgaactgtggggcagcgtcgtcatctcggtcctcttctggggcttcgctaaccagattactacagttgaggaagcaaaagaattctaccctctatttggtcttggggctaatattgcgctcatcttttctgggcgtactgtgaagtatttctcaaatctgcgcaagacattgggtccaggtattgacggatgggaggtgtctttgaaaggaatgatgagcttagtggtgcttcttggacttgtcatcacttccatctattggggggtgaacaagtttgttttgaatgatccttctcttccgaagtctgaccgtaagaagaaaaaggataaacctaagcttggaatgaaagagagtcttaaagttctcctctcctcaagatatgtaagggaccttgctactttagtggttgcatatggcatcagtatcaaccttgtggaggtcacatggaaatcgaagctcaaggcacagttccctagtccaaatgagtattcatctttcatgggtgatttctcaaccgctactggcattgctactttcacaatgatgctgttaggccggatcatactccgaaaattcggctggggagtggctgcaatgatcacccccacagttttgttgctgactggcgtcggtttcttctccctgattctatttgggcagcctctcactcctatgcttgccacaatgggcatgacccctcttcttgcagcagtttatgtgggtgcacttcagaacatattcagcaagagtgcaaagtatagtttatttgatccatgcaaagaaatggcctacattcctttggatgaagatatgaaggtgaagggaaaggcagccattgatgttgtctgcaacccattggggaagtctggtggagctcttattcaacagttcatgatccttacatttggctctttagctaactccaccccctaccttggtggcatactgttggtgattgttctagcatggctaggcgcggcaagttcactagacaagcaattctctagcttggctaaggaagatctcaaaagggatatgtctgcaaaagagaaggtagatccttccctgctcaaggctcctgaggctgatgtattggtggagcacacaaacggcactatagagagcgaagctactgcaactgagagttcaccatcaaactcatctccaagtaattagattcatctttctttgacaaagtcaatcgataggtaggagaatgattgcagtgggtagaaataatggtgatgaaacaattcacggtttctcaagtttgtaacagtgcgcagaatcaagctgcctgtttattttgtttgtaacgtatgcaaattttgacaagtgcactgaacgccattgtggaaattcaaccgttctggcagggagaatgaatgaataggtttcccacgccttgccc

SEQ ID NO: 3102 - DNA, 411 bp, Oryza sativa
  Clone ID: PAT_MRT4530_16153C.1
agcttgacggcgctcgcacgcgacgtaggctcgtatacagcggacgggccgcccttttttttttttgattgaaaccagacggccattaatttgaactagaggatcacaaactccgtacatcgacaaagagcccgtgtcatggctctaagcattttcgcatggaaaaatggacgtccctagaaaccattacacttttaaacaacctaacacatgagctggatataaaacacaccaagcggtggcgacacatcactacagctttgacttatcatacgacgacagctccgacttgttcttgatgttggataatgcctactcttgaacctcggactgctggacctcctgttcctcttccacgggcgtgtaggggctcatgtcaaggctcttctgcaccgacctgtagatgctgga

SEQ ID NO: 3103 - DNA, 1031 bp, Oryza sativa
  unsure (1)..(1031): unsure at all n locations
  Clone ID: PAT_MRT4530_16438C.1
tcactcctatgggcgatagcaccccgcggcgccggccgggactccgcctcgcctccactcctctcctctccgcatcctcctcatcgcctccgcttctgcttttttttttcttttttctcgttgatcggtttgttcgatcagatcggttctttggagagatggagcagtccttcatcatgatcaagcctgacggcgtccagagaggcctgattggagacatcatcagcaggttcgagaagaaaggattctacctgagggggatgaagttcatgaatgtggagaggtcctttgcacagcagcactatgccgacctttccgacaagcccttcttccctgggttggtggagtacatcatctctggccccgtcgttgcgatggtttgggaagggaaggatgttgttgccactggccgcaggatcattggggccaccaggccctgggaggcagcccccggcaccatccgtgctgactatgccgtggaagttggcaggaatgtcatccatgggagcgactccgtggacaacgggaagaaggagatcgctctctggttccctgaaggtttagctgagtggaggagcaaccttcacccttggatctatgagtcttagagcttcgcgcctataatcgatcacctcttggtggctagttctcgttaaatatttgagttttgtttcagagttgtcatctggctgcctcctgagtcaccattataattctgctgtgatacaatcacagttatatgttgcctgaacttatatggctttttaagtttctggattggatgtgatgggaaaataatactagcagtcagtttttgcttaaaaaaaaaaaaaaaaaaaaaaaaaaaaaaaaaaaaaggtacccaaatttccccctataagttgaattccttattaacaaattcactgggcccgtccgtttttacaaccttccttgaactggggaaaaaccccttggccgtttaccccaaactttaaatccccctttgcaaacaacattcccccttttccccccannctttgggcntttta

SEQ ID NO: 3104 - DNA, 1194 bp, Oryza sativa
  Clone ID: PAT_MRT4530_16528C.1
cgcctcgcatcccacgccttccccccccccattcgtcgcctcctgtcccgggggccgcgagcaaaacccccacccccaaatcgcagcctcgctcagctcgatctctctctcgtctcgccatggcccccagcgacgacctcgtctacatggccaagctcgccgagcaggccgagcgatacgacgagatggtggaggcaatgaatagtgtggcaaagttagacgaggggctgacaaaggaggagaggaacctcctctcagttggctacaagaatttgattggtgcaaagcgtgcggcaatgcgtatcattggatccattgagctaaaggaggagacaaagggcaaggagagtcatgtaaggcagactgctgagtatcgtcgcaaggtggaggctgagatggataaaatctgctgtgatgtcataaacattattgacaagtaccttatcccacattcctctggagctgagagctcagtcttctactacaaaatgaagggagattactaccggtaccttgcagagttcaagactgggactgagaagattgaagtgtctgaactgtcactcaatgcttatgagactgcttccaaaactgcgcagacagatctcactccaactgaccctatcagacttggtttagctctgaatatatctgtcttctactgtgagatcatgaactcacctgacaaagcttgccaacttgctaagaacgcctttgatgaagctgttgcggagcttccctccctcagtgaggagaattacaaagatagtacactgatcatgcaacttctgagggataatctagcactgtggaattctgatatggctgatgatgcagacgatattagggaacgaacagatacaactggtgctaaaggtgaccctgcagcgtgatggaggtgctaatagctggtagagtcgaagcataacaacaacaacaacaagggtgtggtggggtgcggaaggactaccatttactcactgttagtgttaggttctgtagtgtaggagttgagctgctgagtaaccctcgcttgtagtctgggcctgattcttcgacttcttgagcaacatcgtgtactaagcactcgctgatcgctcttttgcaagcattgtttttttttgggttactcttgatgatgattaggcaaaagttatctggttcatcaaaaaaaaaaaaaaaaaaaaaaaaaaa

SEQ ID NO: 3105 - DNA, 402 bp, Oryza sativa
  Clone ID: PAT_MRT4530_17049C.1
ggggggaaagtcaagggtcgataaatattgcttcacttggccaaaggccagataaaaatcccttggtccctgacacggggagggccctgcacaccacttttttggacccacagagggcaagggtgcagaaaaaatcaagccccccagggtgaactcacggccccacctgtcagcctttcactgggcggggccggagacttttgggaaaaacaggaaccccccccatgcagaagaagacaaattttttcccacacaaattgaccacccgggggccggggacgtacggggaggtcgtcgccgccgccggggaccttgggatgagggcccccagcccaagagggggggcttcttctcgccggggggctcctcggcgcttttggggcccttctttttctcgggggg

SEQ ID NO: 3106 - DNA, 3462 bp, Oryza sativa
  Clone ID: PAT_MRT4530_17346C.1
atggacgtggactcccgcatgacgacggagtcggactccgactccgacgccgccgccaccgccgccgcctccgcctcggttgctgcgcaaggaggcttagcgagcgagacctcgtcgtcgtcgtcggcctcggccccgtccacgccagggacgcccacggtagctccggctcctgcggccgcgggagccacggggcccaggccggcgccggggtacacggcggtcagcgctgtgatcgagaagaaggaggacgggccgggctgccgctgcgggcacacgctcacggcggtgccggccgtcggggaggaaggcacgccggggtacatcggcccacgcctcatcctcttcgggggcgccacggcgctcgagggcaactccgccacgccaccctcctcggccggcagtgctgggatccgtcttgccggtgccacagcagatgtccactgttatgatgtgttatcaaataagtggagcaggcttactccacaaggtgagcctccttcaccaagagccgcacatgtagcaactgcagttggaaccatggttgtcatccagggtggcattggccctgctggtttatctgccgaggatcttcatgttctagaccttacacaacaacgaccgcgatggcacagagtggtggttcaaggacctggtccaggtccacgatatgggcatgtcatggccttggttggacagaggtttttgttgacaattggtggaaatgatgggaaacggccgctggcagatgtatgggctctagatactgcagctaagccatacgaatggaggaaacttgaaccagaaggtgaaggaccgccaccatgcatgtatgccactgccagtgcacgctctgatggtcttcttttactttgtggtgggagggatgccaacagtgtgccgctggcaagtgcatatggtcttgcaaaacacagagatgggcgatgggagtgggcaatcgcccctggtgtttctccatcacccagatatcaacatgcagctgtttttgtgaatgcacgtctccatgtatcaggaggagctcttggaggtggtcggatggtagaagactcctcaagtgttgcagtgctagacacagctgctggagtctggtgcgacacaaagtcagttgtcacaactcccaggataggaagatatagtgcagatgcagcagggggtgatgctgctgttgaacttacacggcggtgcaggcatgcagctgctgctgttggtgatcaaatattcatttatggaggtctacgaggaggggtactgctagatgatcttcttgtagctgaagatcttgctgctgctgaaacgacaaccgctgctaatcatgcagcggcaagtgcagcagccactaatgtacaaagcggaagaacacccggaagatatgcttataatgatgagcgagcgagacaaacagctccagaatcagctcaggatggatctgtagttcttggaactccagttgcccctcctgtcaacggtgacatgtacactgatatcagccctgagaatgctgtgcttcagggacagaggagattaagcaaaggtgtcgattacttagttgaagcatcagcagcagaggcagaggctattagtgcaactttagctgcagtgaaggctaggcaggttaacggtgagatggagcaattgcctgacaaggagcaatctccagattccgcatcgaccagcaagcattcaagcctcatcaaaccagacagtattctctctaacaacatgacgcctccacctggggttcggttgcatcatagagctgttgtagtggctgcagaaactggaggtgccttaggtggcatggtcaggcagctgtcaattgaccaatttgaaaatgagggaagaagagtcagctatggcacccctgagaatgcaactgctgcaagaaagttgctagatcgacagatgtccattaatagtgttcctaaaaaggtgattgcatctctattgaaacctcgtggttggaagccccctgtgcgaagacagttcttcttggactgcaatgagattgcagatctatgtgatagtgctgagagaatattttcaagtgaaccaagtgttctgcaacttaaagctcctgttaagatatttggtgatttacatggtcaatttggtgacctcatgcgattgtttgatgagtatggtgctccttcaacagcaggagacattgcttacattgattatctcttcttgggtgattatgtggatcgtggccagcatagcttagaaacaatgactcttcttcttgcattgaaggttgagtatcctcagaatgtacatttgattcgtgggaatcatgaagctgcagatattaatgctttgtttggcttccgaatagagtgcatagagcgaatgggtgagagagatggtatttggacatggcaccgcatgaatagattatttaactggcttcctttggctgccctaatagagaagaaaataatatgtatgcatggtggtattggccggtctatcaaccatgttgaacaaattgagaatcttcaaagaccaattaccatggaagcaggctcggttgtccttatggatcttctatggtctgatccaaccgaaaatgacagtgttgaaggattgagaccaaatgctcgaggccctggccttgttacgtttgggcctgatcgtgttatggagttttgcaacaataatgatcttcaactaattgtgcgagcgcatgagtgtgtgatggatggctttgagcgctttgctcaaggtcacctgatcactcttttctctgcaacaaactattgtggtactgcaaataatgccggtgctatcttagttttgggcagagatcttgtggtcgttccaaaactgattcatcctttgcccccggcaatcacatcacctgagacctctccggagcatcatattgaggacacatggatgcagagtaaagtgatttgtgtttgcgagacagtggcccacagccatgccaaaagtgtgcaagctaatgatattggtttggatatcgtagaagctacactattgattcttatgggctatttgacacgtttcattgaaggcgtacacatgattgctccatttctttgtgaaaaagcgcacgatctgaaacaattactctgacacttcacctgtatatactcggctgctggtggataggcagttgtatgtggtttttgcatccaattggaatggcaaaaaggaatagtgttattgtactagctattctttcctctctttttttttttcctttctttttgggatcttgagttctgattttgcaaggtgcttctgaaactgctggagagagaccgatggctggtgttcgtggtccagtcgtgtataatagccttccctcctgctactttcgtcgcagcataccccttgtaatttcagtctgatgatgctgatgtacaattttgtgttccaagttttgggtggcgaatggagtttgatttggtttac

SEQ ID NO: 3107 - DNA, 1170 bp, Oryza sativa
  Clone ID: PAT_MRT4530_17523C.1
atggccgccgcagccacgacatcctcccacctgctcctgctctcccgccagcaggcggcggcctcgctccaatgcggcctctccttccggaggcagcccggcaggctcgccggtgggtcgtcggccccgagcgtgcggtgcatggcggccgtcgacacggcctcggcgcccgccgcgacggaggctagcaagaagagcagctacgagatcaccacgctgacgacgtggctgctgaagcaggagcaggccgggaccatcgacggcgagatgaccatcgtgctggccagcatctccacggcgtgcaagcagatcgcctcgctggtgcagcgcgcgcccatctccaacctcaccggcgtccagggcgccgtgttctccaactgcctcaaatcgagcgggcgcaccggcgtgatcgcgtcggaggaggaggacgtgccggtggccgtggaggagagctactcgggcaactacatcgtggtgttcgacccgctcgacggctcctccaacatcgacgccgccgtctccaccggctccatcttcggcatctacagccccaacgacgagtgcctagccgacatcgccgacgaccaaaatcttgaccaggtggagcagaggtgcatcgtgagcgtgtgccagccggggagcaacctgctcgccgccggctactgcatgtactcgagctcggtcatcttcgtgctcaccatcgggacaggggtgtacgtgttcacgctggacccgatgtacggcgagttcgtgctgacgcaggagaaggtgcagatccccaaggcaggcaagatctatgccttcaacgagggcaactacgcgctctgggacgacaagctcaagagctacatggacagcctcaaggagcccgggccgtccgggaagccatactccgcgcgctacatcggcagcctcgtcggcgacttccaccgcacgctgctctacggcggcatctacggctaccccagggaccagaagagcaagaacggcaagctgcggctgctgtacgagtgcgcgccgatgagcttcatcgtcgagcaggccggcggcaagggctccgatggccaccagaggatacttgacatcatgcctacggagatccatcagagagtgccgctgtacatcgggagcgtggaggaagtggagaaggtcgagaagttcttggcttga

SEQ ID NO: 3108 - DNA, 828 bp, Oryza sativa
  Clone ID: PAT_MRT4530_17623C.1
cgaaaggataaaccggccgccgacattcacaggctcgattccatgtcctggaaagctcagaaaagcaatcaaaagcgagcactggtcttaatatggtaccacagcttaaggcacaatagagagagaaccgctgaatacaataatagcaagttgatatgtgaccctcagaacattaatatgaaggatcttatgccaagcagtaccctctctacaaatcatccaaacacaatccctgtatgggacaagtacgcacgataaacgtccagcgatagatgtaaggcatcaaaagaagctaacgatggagctgttcggcagatgatacggcttgtgtttgtagcgcagccgtggcaacaaacaagcgcagacagcaggtggtgtctagtgcccatacacctgaaatcccacttcactgttatctaacgggcacacttggcgagtcttgagccacctgctgatgcaatggaagtgaaaagcatgattacagacaccccaagcgacagtgcactcctcactggtggcgctggcctggttcgcctggcactcgatgcatagatccatgatgtggttgcggcagatggcgcagttgtcgacgacgatatcccatgcccagagcgcgacggcgttccacttcttgatctcgaagcgcttgttgggcttgcgggaggaggggccggcggcagaggaggatccctcgccggcgccggcgggggcgggggcggggggcggcggcgcgttgatgtcggtctccatggccgacatcgtgagctctcgatcgacccggattcaggaatccaccagaccaggttgggattggaagatcccggccgg

SEQ ID NO: 3109 - DNA, 2795 bp, Oryza sativa
  Clone ID: PAT_MRT4530_18010C.1
cccgacccggaactacagtcccgacccacgcgaccggtttttattttttatgctcgccacctgcacagccaaaagagagtgtcagagggccagagatacgaggaccagcatctagcaagccggcgggcgccatggtgctctcgcacgcgagctccggccggcacgacgccttgcgctgcacccccccgccttcctcctcctcctcgcgcttcgatttggtttggtttgattcggtttgcgagatgaaggatggtggtggaggggagggagggggcagcagcagtggccttgcgactactgcggggaggcggcgtcggacgccttggtgggcggacgcgtggacacacacacccccacgctttcggcacattctcctcgcggaggggggaggaggagggggggcacgagtcgcgcacctccccccaccaggcgtagcacaaccaggccagcgcctatcaaaccccctcccccctgctcgctaaatcccgtgcgacgcgtagacaccggctcagcccctgtctgctccaaagcccaagctaatccccctcctcttcctcgtcgccggcgagagctcttcgtcttctccaactcgaccggaagcaagcgcgcttccgatccgccatggtgctctcccacggcgtgtcgggctccgatgagtccgtccactccacgttcgcctcccgctacgtccgcacctccctccccaggttccggatgccggagcagtcgatccccaaggaggcggcgtaccagatcatcaacgacgagctgatgctggacggcaacccgcggctgaacctcgcgtcgttcgtcaccacgtggatggagcccgagtgcgacaagctcatccaggcctccgtcaacaagaactacgtcgacatggacgagtaccccgtcaccaccgaactccagaaccgatgtgtgaacatgattgcacacctcttcaatgctcctctaggggactctgaaacggccgtcggagtcggcactgtcggctcgtctgaggccatcatgctcgccggtttggccttcaagaggaggtggcagaacaagatgaaggcagccggcaagccatgcgacaagcctaacattgtcaccggcgccaatgtccaagtttgctgggagaagttcgcgcgatacttcgaggttgagctcaaggaagtgaagctgagtgacggctactacgtcatggacccagctaaggccgtggatatggtcgacgagaacaccatctgcgtcgcggcgatcctcgggtcgacgctgaacggggagttcgaggacgtgaagctgctcaacgatctgctcaccaagaagaacgctgaaacaggctgggacacgccgatccacgtggacgcggcgagcggcgggttcatcgcgccgttcctgtacccggagctggagtgggacttccggctgccgctggtgaagagcatcaacgtgagcgggcacaagtacggcctcgtctacgccgggatcgggtggtgcatctggaggagcaaggaggatctgcctgaggagctcatcttccacatcaactacctcggcgccgaccagcccaccttcaccctcaacttctccaagggttccagccaggtcattgcacagtattaccaactaatccgcctaggctttgaggggtacaagaacatcatggagaactgccaggagaacgcgatggtgctgaagcaggggctggagaagacggggcggttcaacatcgtgtccaaggacaacggcgtgccgctggtggccttctccctcaaggacagcgcccggcacaacgagttcgagatctccgacttcctccgccgcttcggctggatcgtgccggcctacaccatgccccccgacgcgcagcacgtcaccgtgctccgcgtcgtcatccgcgaggacttcagccgcacgctcgccgagcgcctcgtgctcgacgtcgagaaggtgctgcacgagctcgacgcgctccccgcccgcgtcgtcgccaacggcggcgacgccgccgccgcgtcggcgagcgagagggagatggagaagcagcgcgaggtgatctccctctggaagagggccgtgctggccaagaagaagaccaacggcgtctgctaaagcaagtcagctgcgcagcggggatcgtatactattattatggtccacttcgtaattgcgacttcttaatttttaccgtgtcgatcggtttaccgtctcaagtctgctctcatccgattttcggattgatgctgcttaattatgtaccaagttaattaattcttagaggacggaatagttccgactcaatacgaagcattgcctgtataagtcgaacacgggatcatgcattttacgttgggtgtgtagcagtgaattgatcagtgatgctccatctctactctgaacgtgctacctccattccaaaaaagaaaaaaaaaacttttatgaacgaatttgtgtatgaaaattaccatctccgtctcgtaatataatgaattttggttttagcgtgcgtgcggggaaaccctgggttacaaattaattcgctgggagaaacccctttcgcgttgggtaaagcaaaagcccaccaaccgcgttcaaattggcacgaagggtatgggcgcctatatgcggtaagcgcggttggggtccccggggcgttcattggggctaagccatttgattttctattttggatggcggtttcgagtaagtgggtttagggtatatgttgtgaccaccaaagcagtggtgtagcagttaattggtcaaaaaaaaaaaaaaaaaaacacaaaaaaaaaaaaaaacaaaaa

SEQ ID NO: 3110 - DNA, 931 bp, Oryza sativa
  Clone ID: PAT_MRT4530_18379C.1
ccggccggggatttgctgaagctgaagagctgaacgcggtgaggcggccgtaggccttcttcccctctccgtctcgtgtcccacgcacgcacacctttccccccctctctccctccctcctccgccatccctagcagccgccccgcacccgcgcccgcaccatgacgagctcctcctccccttcccgcaaggtgctgagcaagatcgcgtgcaaccggctgcagaaggagctcgcggagtggcaggtcaaccctccctccggcttcaagcacaaggtcaccgacaatctccagaggtgggtcatcgaggtcgcgggggctgcgggcacgctctatgccggagagacataccaattgcaggtggacttccctgagcattaccccatggaggctccccaggtcatatttcttcatccagcgccaatgcatccgcacatttacagcaatgggcatatctgtttagatatattgtatgactcgtggtcaccggcgatgaccgttagttctgtttgtatcagtatcttgtccatgttgtcaagctcaccagcaaagcaacgtcctgccgacaatgatcgctatgtcaggaactgccgcaatgggaggtcgccgaaggagaccaggtggtggtttcatgatgacaaagtgtgattggttccaacttccggttggcttctcctcagcaacccttttacccgccaccctacctttacatggcgtcctccatgggagatgatttaggcatatttttaagcgatctatttgaccgcaaattaacatgcctttgtggtttgtaaatgaatgtgaacctgtatcgaatcctagacttattaattactataccttggatatatagaataattacatgtgtatcttgcttattgcccaaaatagaggcatcaaatgcagtcaaaactttggttttctgggtaaaa

SEQ ID NO: 3111 - DNA, 2556 bp, Oryza sativa
  Clone ID: PAT_MRT4530_18548C.1
atggcggacaatcctccattgatcatgctcctcgcgttcttgttctctgctcttcttcttctttctccggctcatggcggcagccgccttcaaagaggtgaatcgctctccgtggaacgcgcctccgacatcctcgtgtcctccaatggcgtcttcgcgttcggcttctacaacctctcctccaccgtcttcaccgtctccatctggttcgccgcctccgccggccggaccgtcgcctggacggccaaccgcgaccggccggtgcacggcgcggggtcgaagctcacgctgcggcgagacggccgcctcgtgctcgccgactacgacggcacgccggtgtggcagaccaactcgagctccggcgccgccgccgccgcggagctgacggactccggcaacctcgtcgtgacaagccatggcggggacgtgttgtggcagagcttcgactacccgaccgacacgctgctgccggggcagccggtgacggcgacggcgaggctgtccacgacggacgtgctccacccgacgagccactacgcgctccggttcgacgaccgctacctcctctcgctggcgtacgacggcccggacatctccaacatctactggccggaccccgacgccagcagctgggccaacggcaggatctcctacaacgccagccgccggggcgtgctcgacgacgccggcaggttcctcgccagcgacaacaccacgttcgtcgcgtccgacacgggcgccgccgccggcggcgtcacgtggcggcggctgacgctggaccacgacggcaacctccggctgtacagcctgcgcgacgccgacggggggtggtcggtttcttggatggccttctcccagccgtgcggcatccatggcctctgcggctggaacggcctctgcgtgtacacgccgcggccggcatgctcgtgccctccaggctacgttcccgccgacgccggcgaccgcggcaagggctgccggccgacgttcaacctcacctgcggcggcggcggtggccggccggagatgggcttcgcgcggctgccgcaaacagacttctggggctccgacctcaacctcttctcctccatctccgtcgacggatgcaaggcggcgtgcctcgagctctgcaactgcgtggcgttcgagtacaaggatgacgtcagcgactgctacctcaagtcggcgctcttcaacggcaagacctaccccggctaccccggcacggtgtacctcaagcttccggcgaacttggtggcggagtcagacacctacaccgccgccccggccgccgccgccgccgttaatctcgcctgcgacgccgcgcgaacagaggaggttctcctctccttctcggccgcctccccggacacgtcgtcgtggcgctactactacgggttcctctcggcgttcttcgccgtggagctctgcttcatcgccttcgggtggtggttcacggcgaggagccggccggcgacgtcggagcaatgggcggcggaggaagggtacagggtggtcaccgaccatttccggcggttcacctacggcgagctcaggaaggcaaccaagaacttcaaggacgtgatcggtcatggccggtacggctccgtgtacaggggcgtcctcgccggcgccggcgacgaccgcgccgtggccgtcaagaagctcaaggccgcgacgccgcagcgtggggacgacgagttcgagaccgaggtgagcgtcatcggccggatcaaccacatgaacctggtgagaatccgcggcgtctgctcggagcgccaccgccggcggcggctgcttgtgtacgagtacgtggacaacgggtcgctcgccacgtggctgtttggcgccaaggagactctcaattggaaccaaaggtacaacattgccgttggtgtggccaaaggtttggcctatctccaccatgagtgcctcgactggatcatccactgcgacgttaagccagagaacatacttctcgacgaggatttcgagcccaagatcagcgatttcgggctcgcgaagatgcaacagaggagggatctcgatgatcccgcctcgtttagcatcagagggaccagagggtacatggctccggaatgggtttcgagtcttccgataaccgaaaaggttgacgtgtacagctacggtgtcgtgcttctggagctggttagaggggccagaatggcggatttggccacggatagcgttggtgatgcggagattgcgatgagacagttggtgtggaagatcagggaagggttgaagattggtgatcggacatgggtaatcagcttggtggatcgtaggttgaatggtagcttcgtttactcacaggtggcgttgatgctggaggtggctacgtcgtgtttggagaaagaaaggaaccaaagaccaagtatgaatgatgtagttaagaagttttacacatcagacaaaaaggttgaattcattggggaaatgtcaagctagcaagcaatctgagggcaatgttgtagttgtaaacctccggtacaaacttcaactatactcgaaaaggaattcttttttgataaa

SEQ ID NO: 3112 - DNA, 2427 bp, Oryza sativa
  Clone ID: PAT_MRT4530_18601C.1
gggcgaagccaatgcgcccgcgggcttacgtggcccggcaccaccggccgagccgtgcggggaaacaagtaaacgctcgctcgctgcgtctccgatgcccccgtccccgcctggccgctgctgctctctcgctcttctccctccaataattcgcttgccctctggtggctcaaagcccagggaaattgatggagaagaattggggtagccccatgccacctggttcgggctagatctccggcgagacggccgctgggagcagccgatccggccccgatccgatgggtggcgaggtgccggagccgcggcggctcaaccgggcgctcagcttcgacgactgggtccccgacgaggcgctgcacctcgtgatgggccacgtcgaggacccgcgggacagggaggcggcgtcgcgggtgtgccgccgctggcaccgcatcgacgcgctcacgcgcaagcacgtcaccgtcgccttctgctacgccgcgcgccccgcgcgcctccgggagcggttcccgcggctcgagtcgctctcgctcaagggcaagccccgcgccgccatgtacgggctcatccccgacgactggggcgcctacgccgcgccatggatcgacgagctcgccgcgccgctcgagtgcctcaaggcgctccacctccgccgcatgaccgtcaccgacgccgacatcgccgcccttgtccgcgcccgcggacacatgctgcaggagctcaagctcgacaagtgcatcggcttctccactgacgccctccgcctcgtcgcccgctcgtgcagatccctgagaactttatttctggaagagtgccatattactgataagggtggtgaatggcttcatgaacttgctgtcaacaattctgttctggtgacactgaacttctacatgactgaactcaaagtggcgccagctgatctagagcttcttgcaaagaattgcaagtcattgatttcattgaagatgagtgagtgtgatctttcagatctgattagtttttttcaaacagccaatgcgctgcaagactttgctggaggagcattctacgaggtaggagagctcaccaagtatgaaaaagttaagttcccacccagattatgcttcttggggcttacctacatgggaacaaatgagatgcctgttatcttccctttttcgatgaaactcaagaaactggacttgcaatacacttttctcacaacagaagatcattgtcagattattgcaaaatgtcccaatctactaattcttgaggtgaggaacgtgataggagatagagggctagaagttgttggtgatacatgcaagaagctacgaagactccgaattgagcggggtgatgatgatccaggtctgcaggaagagcaaggaggagtttctcagctaggcttgacagccgttgctgttggttgccgtgaattggagtacatagctgcctatgtatcggatatcaccaatggggccctggagtctattgggactttctgcaaaaatctatacgactttcggcttgtgctacttgacagagaaagacaggtaacagatctgccacttgacaatggtgtctgtgctctgttaagaaattgcacaaagcttcggaggtttgctctctaccttagaccaggagggctttcagatgatggccttagctacatcggacagtacagtggaaatatccaatacatgctactgggcaatgttggtgaatctgaccatggattgatccgtttcgcagtgggctgcaccaaccttcagaagcttgaattgagaagctgctgcttcagcgagcgagctttgtccctcgctgtactgcagatgccctccctgagatacatatgggtgcaaggatacagagcatctcaaacaggccttgacctcctgctcatggccaggcctttctggaacatcgagtttacacctccgagccctgagagttttaatcatatgacagaagatggagaaccctgtgtggatagccatgctcaggttcttgcctactattcccttgctggaaggaggtctgactgccctcagtgggtgatccccttgcatcctgcgtgattgtaaatatgtcaagctgtgtataccttcctatctatccctggggcataagcatggccttgtatggttattgtaagaaccttagcttgccacctttgtgattgtgcccgaataagctactactagtactttagctggggtctatagtgcaataagttgttgtcacttgttctacgtatctaatcctaggaagatgtatactaagttcctctgtaactgtaagagtgatctgtgctttggttgcgagatgtacattgtaagtatcagaaatcatgtgttactggtttttttgccataatatatgcctatataagccgggggtttggtgcaaaaaaaaaaaaaaaaaaaaaaaaaaaaa

SEQ ID NO: 3113 - DNA, 3393 bp, Oryza sativa
  Clone ID: PAT_MRT4530_18725C.1
atggcgcaagcggcaagctcctcgattccaagtgaactcccttctaggaccaaccatgatgtggagtttagcgttgtggattatcatcagtgcacattggagagcttggaaaaggatcttgcagcaagggtaaaatggggcagcagccaacatgttgtgataagtggctacgacatgagcactggtgaggaaacactgtttaaggataatatggatgtagcccatgcattgtttgttaggaagagtgatagaaagttgattttgtttgttaatgtggaggacaagatctcagaaaagataaaatgtgacttcatcaccaacaatctagcagagtcatggaacaaatgggtcaaggatatgaaggatcgtcctattgcagatcttgcagaaggcatcagagcaaagacaatggatctatttgcgagacggaggaagataggtgagaaactagatggtgtgatgctccctattgtagttcgtcaactgaatgcaatgactagagatttgggtcacttgaaggtagtgcaaggtaatagggaccaagcagaaatggcggagattactcctgaacatgatattagtaggcatgctgtcaatcttacagaacatacatgcacttgtagagagtggcaagtttctggcaaatcatgcccacatgcattagctctcataatatcagctagaaacccaagaatggctgattacctggatccttgttattcagtggaaaagtataagctggcatatgcaggagttattcatccacttccagataagtcccaatggccaaaagtaaatattggtttcaagttgctgccacctctcactatgagggacgtagggaggcaaagaaagaataggatagttgggtgccttgagaaaggaagcaaacctaggaccaaaggaaggtggcagattcaatgtaagaggtgtcttaacatgggccataggcaaacatcctcaaaatgtcctttaaatggtaccaagaaaaaaaggaaaaatcgtgccaaacaaggaagaccactaggttcaactagtgatgcagcgggttctagcacacccaaaagacaaaaggttgcaatcaatgattccagcaatatgagtcctgggcttgtcactagaagcatatcgaacccaactatggactgctactacaagctcccagttgaaaaactagcaatgcgtctgctgctgttcataggcctcgtgatctccctacagttcatggcagacggcgcatcattgccggacgataggtgcctaaagaagtgtggtgatgttgacattctatacccatttgggattggcgaaggctgtgccattgaaggctttgtgcttagctgcagcaagacagaggatggacgtggggatgtggcattatatggcaccacgccggtgctgaatatatcgctgcgctatggtcaggttcggatgaaatcaacgtacatatcctcgatgtgctacaacctctcaaccaagaatatggactacaagaactggctcctgaacctcacaacctctccgttcaccatctcgcagaaggagaacatattcatagtcatcggtgccaacacggccgcaaacatgtttggttacagccgctactctaccatgctaaatatgatcgggtgcttgtctcagtgctcaccgtataatagcttcacagctcaagatgggtcgtgtgtcggcatcggctgctgccaggccgtactcagcaacaacatttcctaccacgaagtgcaattcaaccccttatacaacaccacaacgtcttacaacaacagaagcatcacggacagggcaagctactgtggctacgctgtggtgatggaggctgctgcattcaggttccgaacagcatacctgaactcaacggccttttgggacgagcacaatggcagtgtcccggtggtcttgaactgggttgtgggtaatgagacatgtcaggttgccaagcaaatgggagatagatacgcatgccgtagcaaaaacagcatgtgcatcgattcatccagtggccctacaggttacctctgcaactgcactgaaggctaccgtggcaatccgtaccttcccgatggatgccaagatattaatgaatgtgatgttaacaatccacctccatgccctggccgttgcaagaacatacctggcagttttacttgttcaagcccctcacaatccagaacggtgatactagctgttagcctaagtgttggaattgttgccatggcaatgatcgtcacctgctcatacttggtccgtgaacggaagaaactggccaatatcaagaagaagtatttccaacagcacggtggcatgcttctgctgcaggagataggcttaaagcaagggcagagcactgccttcacaatcttcactgaagcagaactcatagaagcgacgaacaagttcgaggacaagaacgtccttggccgcggtggccatggcactgtctacaggggcatgctcaaggacagccgtctgattgccatcaaacgatgcatgtcgatgattgacgacaggcaaaagaaggagtttggcaaggagatgctcatcctgtcccagatcaaccacaagaacatcgtcaagctcctgggctgctgcctcgaagtggaggtcccaatgctagtctatgagtttatccccaatgggaccttgtttcacttcattcatggcggcaatgactgccgcaacatccccttttctactcgagtgcgaattgcccatgaatcagcccaagcactagattaccttcattcatcagcatcgcctccaatcattcacggtgatgtcaagacctccaacatactactggacgagaactataccgcaaagatatcggactttggagcctcaatactagtgccgactgatgaggcccagtttgtcaccttggtgcaaggaacctgtgggtacctagatcccgagtacatgcagacgtgccaattgacagataagagcgatgtgtacagctttggcgtcgttctactggagctgctcaccggcaaaatggccttcaaccttgaaggtcctgaaaatgagaagagcctttcattgagcttcttgtgtgccatgaaggagggaagactcatggacattatagatcatcacattcagactgatgagaatgctggggtgctcgaggaggttgctgacctcgcgagccagtgcctggagatgatcggcgataaccgaccgtcgatgagagatgtcgccgacaagcttggccggctgaggaaggtcatgcagcacccatgggcgcagcatgacccggaggagatggagagcttactcggggagtcgtcggtggctggtttggagatggttagcaccgggaatttcagcatggagggtggagctgtgcaaggcattctggagtctgggcgttga

SEQ ID NO: 3114 - DNA, 1375 bp, Oryza sativa
  Clone ID: PAT_MRT4530_18794C.1
ttttttttttttttttttttactaccaccgtaccttttttttatttttttttaatacaaaaggatggcagcagttacaataaaacagttattgctgtacaaaagctggccacaactgttcatcatgttctttgacacaaagaagtacagagaaattcaggaatggtacaaacacctggaacctacccaggatatatctctcgattccattgcattccagggatgatgaactcactaaagttcacttttatgttcacctagcatactgaaacagcacattggtacatgaaagataacagatagcatcgagcaggataaatacatagaacccccttcttccgactgctacaaagacgagaggcgaacgtcgcgccgtgcttaacaattcgatcctaatccttcttcaagatatcttctggctctcgaagggtgccgaacatccagtccatccacacggtgtagtggccatagttgtgacggtatgttgtatggtgaatggtgtgatagccagcacccatgaccggccaaaccttgccgtgaatgcagtcatggatgttagttgtccacacggcctctatgaacaagagagcaatgtgtgtcctgaagtgtgttgggataaggtagagcgcaaacacatgcggtatggcttgcaaaatcccatccagtggatggaatgctagtcctgcaaatggtgatagggtattctccttgttgtaaatatggtggtatgtgtgcaggtacttgtacaatggctttatgtcatgcaactctctgtgcatccagtaaattccaaactcaacaaagataagatataaagccagataaaccaggtacattggccaaccaacttcactgatattaacataacactgtgtccatccattctcaaccatgtactcagataaggttggaagggcacaatagagaggcatagcctttgatgcaacaattatttgcttcttcatagcttcgattgtaggtatagaatctttggggatgtaggcgtggcgcttccagtagtagatgacgaagcaccagaggaagccgcaggcgaagtagatgaggtagccgccgaggccgttgcggagccacgactggagcgggtgggggagggcgcgccaccagtcgcccgggaccacatggctgaggaagatctcgttgtaccaggccgtctcctcgacgaactggcgcaggtactcgccgccgccgcccgccattgccggccgcggcgccgccctgggattgtggtggtggactggtggtggtgcgggggttgagttgtaaagcgtggagagagagagtagggacccgcaaccttcgtttgtgggttttaaaggagagacagacagtagtgcgtggggagttgccccggccgg

SEQ ID NO: 3115 - DNA, 2080 bp, Oryza sativa
  Clone ID: PAT_MRT4530_18872C.1
cctcggggcccactaccccgctcttcctcccccccgctcacttcctcaaatcctccaacacctcgatccattcgcagtagctgcgaggtgtctgacatggcgtcggggcagaaggtggtgaagccgatggaggtgtcggtggaggccgggaacgccggggaggcggcgtggctggacgacgacgggcgggcgcggcggacgggcacgttctggacggcgagcgcgcacatcatcaccgccgtcatcggctccggcgtgctgtcgctggcgtgggcgatcgcgcagctgggctgggtggccggccccgccgtgatgctcctcttcgccttcgtcatctactacacctccaccctcctcgccgagtgctaccgcaccggcgaccctgccaccggcaagcgcaactacacctacatggacgccgtgcgcgccaacctcggcggcgccaaggtcaccttctgcggcgtcatccagtacgccaacctcgtcggcgtcgccatcggctacaccatcgcgtcgtccatcagcatgcgcgccatcaggagggccggctgcttccaccacaacggccatggtgacccgtgccgcagctccagcaacccttacatgatcctcttcggcgccgtgcagatcgtcttctcgcagatccctgacttcgaccagatttggtggctgtccatcgtcgccgccgtcatgtccttcacctactccggcatcggcctctccctcggcatcgtccagacaatctccaatggcgggatccagggcagcctcaccggaatcagcatcggcgtcggcgtcagctcaacgcagaaggtgtggcgcagcctgcaggcattcggcgacatcgccttcgcatactccttctccaacatcctcatcgagatccaagacacgatcaaggcgccgccgccgtcggaggcgaaggtgatgaagagcgcgacgaggctgagcgtggcgacgaccacggtgttctacatgctgtgcgggtgcatgggctacgcggcgttcggcgacgcggcgcccgacaacctcctcacgggcttcggcttctacgagcccttctggctgctcgacgtcgccaacgtcgccatcgtcgtgcacctcgtcggcgcctaccaggtgttcgtccagccaatcttcgccttcgtcgagcgctgggcctcccgccggtggccggacagcgcgttcatcgccaaggagctccgcgtggggcccttcgcgctcagcctcttccgcctgacgtggcgctcggcgttcgtctgcctcaccaccgtcgtcgccatgctcctccccttcttcggcaacgtggtgggtctcctcggcgccgtctccttctggccgctcaccgtctacttccccgtcgagatgtacatcgcgcagcgcggcgtgccacgtggcagcgcgaggtgggtctcactcaagacgctcagcgcgtgctgcctcgtcgtctccatcgccgccgccgcgggctccattgctgacgtcatcgacgcgctcaaggtgtacaggccgttcagcggatgattcttctgattctctcttgctgctttgagcagagcatccactggtaaaaagtggacagtaattttctttttttacagtctatggacgtagtacagtaaaaaagtgtgtacaactgtacaagggagcagtagaatccttgcaggggtaaaatactgagatgtaactactgagcattttgtagcgctcaaacaggtacagaggggaaaaaattgaacccagattgtatggaggttggcgtaatataattgagccgcagccaaaaaatgaaattcagaatttactggttactgaagctccacctactaattcatcgagcacctcgcgtgcatgcacataccgtacgttattacgcgtggtcgagatgaagtacagatgattgtatcctaattaatcaattaatcaaccaaaattaattaactaattactatttagttattattgtcacacgtgtggtgaaaaaaaaagtgaaaagaggaatttgagacaggttgcatagagtgttgtttatgctattgttgcttgtatactgcctgtattaattccaaccgatgctact

SEQ ID NO: 3116 - DNA, 1494 bp, Oryza sativa
  Clone ID: PAT_MRT4530_19048C.1
ggccccaaaaaaaaaacttaactacttaatttcccctgtataatcagatagcaaatccatcaactttcatccacgaataatccatttataacactgcctaaggacgcgacctcgcccctttcgctaatcaaaccgtacgcgccaatttgacggatggaaaaaaaatttctttttttaataaaaggtttagcataatcgaaagtccaaagcttgcacttctaaagtaacatttgcagcagtacatccaccataaatggtggtcttttcgatccagtggcatctcatgttggtccatactagtggtacagtttaacaatagactgttgtataaacacagcagtatctgggacgatactcgagtaatacataaattctattctacatatatatctccatgccaagtattttcgaagactggcatagcgggcagaagctcagcttgctttcgcactccttgcaaaggcaaagatgccgacaaggcaacaatagcatgcaagcctcgcttgacttgcagactctacatgcggtcaaatctttggagtgtctgttctccttcggcattagttgcaaattggcggcaccaccattgcaacaggatgccgtgtcatccacctcgctatcaccacaaccttctttgaaatccttgctttgatgggcacatacctgttccaagttgtacttcagtgcgtttatcatgctctcattgtacttggccctttgctgccacgcaccaacttccactgccaactgtttaatctggtcctcaagttcagagttccttttgttaatgttctccacttctgcctctttatcccgtatttttctaagtatcttatcctcaacagaggccagcgcctcaaattgctttgcctgaactttctccaatatggactgcctaagccgctcactctgggccttgatgaagcggtccatatctgcatcgagccgctgaacctcgcgagagatgtcatcatccaacatcgggagcaggagcaacggcgaatcgccggaggagttcccagccccagcgccgctgccaccgccatggcgtctgtcctccagagagagcgccagcccagtggacaccgcggagcccgtctgcaggaaatcgatggacgacatctgggagttctctcctagcagctcctgctccctaggctgcctccaccctagccccgccgcggccgtaagccccatcgcgtccaccagtggtggctgcgcgggctggtcctggaaggccggcggcgggttgaagaagggaagaggcgccgggatctgcccatctaccggcaccggcagcgcgttcctgaaggaagggggcaccggttgctgctgctgctgcggcggcggcggcggcggagcctgaggatgcggctgctggaggtggtgatgggagaagaacgccatggccgaggacggggaggaagtcgggggaaggagggagagaggggaaagggaaggtcgaggccggagaggagagagaagcccggccgg

SEQ ID NO: 3117 - DNA, 483 bp, Oryza sativa
  Clone ID: PAT_MRT4530_19282C.1
ctcactcctctccccctccacgatctcgccgggatctccacggcggcggcggcggcatggcgggcaacgacaactggataaacagctacctcgacgccatcctcgacgccggcaaggcggcaatcggcggcgaccgcccctcgctcctcctccgggagcgcggccacttctccccggcgcgctacttcgtcgaggaggtcatcaccgggtacgacgagaccgacctctacaagacatggctccgcgcaaacgcgatgcggagcccgcaggagaggaacacgcggctggagaacatgacgtggaggatctggaacctcgcgaggaagaagaaggagttcgagaaagaagaagcctgtcgtctgttgaaacgccaaccagaagctgagaaattacgaactgatactaatgcagatatgtctgaagatctatttgaaggagaaaagggagaagatgctggtgatccctcagttgcgtatggtgaca

SEQ ID NO: 3118 - DNA, 545 bp, Oryza sativa
  unsure (1)..(545): unsure at all n locations
  Clone ID: PAT_MRT4530_19435C.1
atttctgtgaaattgtgtgcagcaatcatgtctggtcgcggtaaaggaggtaaaggtctcggcaaaggaggcgctaaacgtcatcgtaaagttctccgagacaacatccaaggaatcaccaagcctgccatccgacgtctggctcgccgaggaggtgtgaaacgtatttcgggtctgatctacgaagagacccgaggcgtgttgaaagacttcctggaaaacgtgatccgtgatgccgtgacgtacaccgagcacgcgaagcgaacgaccgagactgctatggaccgtcttctacgcgctaaaacgactagggtcgcaccctctacgggttcggcgggtgagcgtcgaagacttaaaaccaaagaagcccacgcggaagcggcaattctccgttcgttcttaatctcaacaactcaacaacgcgaaccgtcatcgggacggtattgcccgatccagtgtatagacataatcgtcaatctctctttgtgcgatatgattgactcaatcttncttgtgcaccgatcatttcgaagctcttaatcata

SEQ ID NO: 3119 - DNA, 6074 bp, Oryza sativa
  Clone ID: PAT_MRT4530_19802C.1
tttttttttttttttatctcaaaatatgagcttcaattttttctcatttaatttcatatactttcctaaaatccgggtctactctaaaaatcactatattttgaaacgaatagagtaataaaaaggagctctacactgaaacatctgctggtatatcctatatgattctgtcttttttataactacacatgacacaaatatattttattcagcgctgatgcggctgctaccccaaaattacaaaatttattacacaaaagacattgcggaaagctttgtacagtttcactacatgctctcgatcatctggatagggtaagacttttgctaccaagcgtctaagctaagtaattaagcgatacctttcttccaaaatatggcgactcccaaaaagagatctaccgggacctttagctgacagaagtgcaaattgactgctgggaatagagaccatgtatgggatgcacaaagtgctgcttgcttcttctacgttttgaaactactgtaaatccttctgtatccttctcactcttaggtaccacggtggccttctgctgtttgtcaagctctttgcgacctgacggactcttgtttatgttgttgctgctctgtgcattaccagattcgtctggtccacttggttttctgtccgattcagctccagtggaacctaagctatcatgtactgacttgacgatgaaactgaacaaaatctgccttgccagctctgttttgcatgagtttctcaaggcatctttcgctctgttttcctttcctttgcatgggctggtgctctcaccttgaattgcttgttctgctgcaggcataccagcctttacttcatctgatgtctgtggtgccaacagttgatctgctgaatcagttacagaaacatctgcactaggctctctgttagccacatcaggttgttgcgaagtttttccaggcacaaactcggcagcatgaggattcatggttgggggggagttgctacccctcagaatggtgctctggctgtgtgcgtaaccctgttttctttggaaggtatgcccagtacggtagtacaatgtggaccgaggaccacggggtaccctagtatcaatggcgtgagggagaatctccattggttgacttggtattggctgaagaacgacgctagcatcatatattgccactgtactgtaagggtgcgacatcgataagagtgatccaggattgaatggaggcgctgaagctgaaagcttgcttccaccttttttcttagattcagttgggctttcatcactgttgctgtccggagctttttcatcattgccgatttcctctggttcacttgaaagaacctctttgctgctgtcatgacttggcttttccttttcttcatcttcatctgttaacttcttatcttcctcctcagatgacactattagatcagtattttgtgcattatccttctcctttgcttccttctgctccaaagccggctgctccactgcgccgcggcgggtcaccgcgtcgcctgtggatcatcccaactcgcctgctatgccaatatctttcacctgtattggaagtgtttttacgtctagtatgatacttggattggcatcccaattcatctctagttccatgatgtcagtttttagaaagctgccaaaggagagctggctagaagagtttataacatcttctttatctcctttcatgtgttgttgtacaccagccctataagcagaacctgtacggccatcttccaagcgatcaaccattaatttagtgagagcaggccttctgcgactgcttttcttccgtacatttgcagatcgtccacgcaaattagctgcttgccacccttcatcagaatattcttcaggtgataaaggatcaacttgcttcagctcatcatggatagcataattttcttctgatattgctggagggtgtgccttcaattttacttgttgaaactcctctttgtttgcttcatgaggagatcctatgtcgtgctcaaagctctccttttcttcaactaattcaccttgatgggctctgatattattctttgcacgcctgccctttctttgtgtatccctctcttttctttcctgatccgggcttatgtagtcaagtagatctgatagatgtcctttgcttgcaatagatgagtcaggttttgggatgccccttcgggcggcctcttgttgttctaatgcttttgactcaaaatactcaagccatgcagcagcatcctgagttcgaaggtcatcttgtcctagtttctcctgaagtatctgtaaggtggtctgttcatgctgaacactcaaggagtatgcatccatcattgagagggctatggctatggcatgatagctcgcagcagtctggaaggtgatcagctgcctgaacaggctctgtgttgcacttgcagggcttgcatgcaagtactttagagccatttcgatgtgctggagacggtagtagaagacagataaatccccgtaactcttcatagtttctgggtggtcaagacctagctctctttcattgatatcaagtgccttctgctgatatatagttgcctgattaaaatctccagtatggtaaagaactacagcaagaagactgtacgcattagcagtcagccgatggtatggaccacaaactgctacaattttggacaacgcctttgttccgaagttgacggcatcatcaagttttcctttatccaaagccatctttgatgattctaataagtttcgaccatcaatagaagagtacaccacatgcttgcatacaggaataatgttaactatgtcagatttgtcaaatggatttgggctattcatatcataatctctcgcaaccaactcaagtccaaccagctttggaagcgcagtatcatcatagaatttatgggccatcatagtgagctcttcaagggacttttgatgaagtccagctcccagatccttaaggcgacagaaatcatcctctgacatcagcttgctaatatcagtctccttggtgttttcagattcttccatgccatttatgacagagcagttactgtcagagtcttccttctcagacatagcaccttcaacatggcattctttctttttaattttctttagctgttcaaagtgcttaccaagacctttgatagttgtctctttttcaacatgtcctgcatttttcttgtcctcagatgccggcgaatcctttttcttgttgtgatccagaaaagctttcatcagtgcatcatatgcattggcaaatgcactgctgagctgttgcaacagatccaccaaggagtggctcacggtgtgcggcttccctgccgaatagaagcccttgacggaagcaacgatgtgcaggagcttcccattgcaaactttcacctcgatttcgaagtagtcgccttcctgagaagcgccattgctctccttcctcctgataaagtggacgggcggggtgaggtgggcgaaggagaggaagtcgtagaactcgcccagcctgggcggcggacggatggccgccatgtcgtgcgcctccgatatcggcggcgcctgggcggcgccggcgccatgggcgtcgggggaggcggcgagcgcgggcggtgacggcggcgtcgccgggcgcgcgtgcttggacgacttgtgcttggcgccgtcgcggggcttgttcacgaacgcggtggtgcaggcgacgatgtccagcagccgccggacttgcgccgccgccgccgcctccgtcgcgtactcctcttccacgatggtgagagagcatggtttcagcgacacgatttccacgccgtcctccagccgctgccctcgcgtcacgtgcgagagcgagtagtttgtcaggtggcacgtctccacattcgagcccagcagcttcctcacgtccagaacacggtccgtagatatccccttgagtgtaacctgggattcatagggagtgacaaccgtgacgtctatggcactcggcacaactttctcttccttcttcctcttgtcgcctttgccgccgccgccgccgcccctgcccttgccacggccggcgcccttgggggccattgcgcctgaagctccaaacccaacagccacaaatggagcgtcggcccggagccctgaggggtttaagcagcagcagcagcagtaggagaaggaggaggaggagacggacgcctcgacgacggcttcgctcgttggaaagtgaagcgcgaggttggggttggggaggagagggagaggatataggatgtgcggcgtgcgagggcgctcatctgaaacccacggattttcgtgcgatcccggcctctcgttctcctggatggattgaaaacgtggaccgtggggctcggagcttggttttattgggcgctggatgaagcacacgatgatgctctgttggtatcgtccaaacctgaagcgaatctgcccaaggtaggaaaccccgggatgctcgtgcggctcgtgtcctgacctagaaatctttactcctaaatccccaaaaatccccaaacctaaatgccctctgtccacttcccagggagagagggcgacctcgacgactccgggagaggcggcgcggagctgggctccacgaggggcgtcgacgcggcgggggcggcggggctccgggataggcggcgcgccgcgcgcctccgcgaggggcgtcggcgcggcgggggcggcagggctctggttcgtggcggcgtggcgctgggctccgcgaggcgcgtcgacggggctgtgtttgtcatgtacatcttcgacaacaaaatcaaaagtttggttccaaactggattcaagctttcgctcacaacccttgtcttgtacttggtttttgatttcttgagtgaaagtacaacatatgggtcagactttccattcatatccattgctggcagatcttccccagatatcacagttactgacaaaactccccgcataatgatttcttttttcttcctggaagacaacctgttaaaaccattgctccctgacccattttccatgctcgtcattgtcctctccaaggatgtcatagaaaactgctgtctaaaaggatttggagtctcctccttcatgtcaaatgggcagtagagtagctcaagatgcacctgaccccgatctttccggtccctttgaatctccaagtcttttacaagcttcaaccagacatccttcactttgcctggctgtagatccttcagagtaacttgagcacagccaatcaattcagattcctgaataccatcatcatcataaatcttcactgtcacagtctgagtatctgcatcttcaacaataaactcaaagtgttcattccagatagggttcaagtcgttgttctgtaaatttgaagcacataaacagctgtagtccccaggtattataggaatgactttccttacaggccatgttattgagtcttctatagcattttttattgtgtcctcaagagcatccgaaatcccaggtatagcagaaatttcaccaccaatgaccttcagtctgaaatccagctttttcttctttcgtagagaaaagcaaactgctccaaagcagggcaactgatcaacaagtggcttgaagatcaagcggaaaactcttggattggcatcccaattcatctctagttccatgacaatgcctgattcgtcattctcaatgatcgaaacaccagtaaactgtggtgcaacagtaccaagagtgagttttgagaacttgagagaagctaagattattggtcgatattgttcaagaacaggctccacggaggttttgatcagttctgatgctgccgcgttcacaaatggccatatttttatcagctcttgattgagccattttaacttttgctgtgttgagaaaacaacccaggaagggtacaggtcagctgggagtaacttccgtgaatcttcaatagtcatcttggagaaactagcaattgtggcagccagctgccggcggcgggcggcgcgggagttctcggcgcgggcgaagcccactatgagagccacgcccgccgcgatccccagcaccaaccccaccaggaaccccat

SEQ ID NO: 3120 - DNA, 4399 bp, Oryza sativa
  Clone ID: PAT_MRT4530_19805C.1
cttttttcttagattcagttgggctttcatcactgttgctgtccggagctttttcatcattgccgatttcctctggttcacttgaaagaacctctttgctgctgtcatgacttggcttttccttttcttcatcttcatctgttaacttcttatcttcctcctcagatgacactattagatcagtattttgtgcattatccttctcctttgcttccttctgctccaaaatcggtttcaagactgtgccagggggtgacactgctacatctttgtatgataccaacttggaagctatagtagcaggtctgttaattcctgaaagctttatgcctcgttctggtttagatatagcattgaaaaccttattttcaatattgctggaattcccattcaccttgtcagtttttagaaagctgccaaaggagagctggctagaagagtttataacatcttctttatctcctttcatgtgttgttgtacaccagccctataagcagaacctgtgcggccatcttccaagcgatcaaccattaatttagtgagagcgggccttctgcgactgcttttcttccgtacatttgcagatcgtccacgcaaattagctgcttgccacccttcatcagaatattcttcaggtgataaaggatcaacttgcttcagctcatcatggatagcataattttcttctgatattgctggagggtgtgccttcaattttacttgttgaaactcctctttgtttgcttcatgaggagatcctatgtcgtgctcaaagctctccttttcttcaactaattcaccttgatgggctctgatattattctttgcacgcctgccctttctttgtgtatccctctcttttctttcctgatccgggcttatgtagtcaagtagatctgatacactaagatgtcctttgcttgcaatagatgagtcaggttttgggatgccccttcgggcggcctcttgttgttctaatgcttttgactcaaaatactcaagccatgcagcagcatcctgagttcgaaggtcatcttgtcctagtttctcctgaagtatctgtaaggtggtctgttcatgctgaacactcaaggagtatgcatccatcattgagagggctatggctatggcatgatagctcgcagcagtctgaatgtgatcagctcctagcagtctcttgttgcacttcagtgcttcatgcaagtacctgagagcgacatgaacatttcccataccttcttccatcatagccacatttatgtatgtggcagctgaatttggatgtgaaagcccacaagaaaattggagtagatatagtgcacggttgacatactttagagccatttcgatgtgctggagacggtagtagaagacagataaatccccgtaactcttcatagtttctgggtggtcaagacctagctctctttcattgatatcaagtgccttctgctgatatatagttgcctgattaaaatctccagtatggtaaagaactacagcaagaagactgtacgcattagcagtcagccgatggtatggaccacaaactgctacaattttggacaacgcctttgttccgaagttgacggcatcatcaagttttcctttatccaaagccatctttgatgattctaataagtttcgaccatcaatagaagagtacaccacatgcttgcatacaggaataatgttaactatgtcagatttgtcaaatggatttgggctattcatatcataatctctcgcaaccaactcaagtccaaccttactgcaaagacctctcagaatgataaatttccgcaagtgtgcaaattcatctttcaatttccaattgtaccttttagaaaggaacctctctacccatctaaatctcaaattatgttcactatgtgcatctgtttcagtgtcactttcaagtcttgggcatccaagtaaaatgtttaaagtctcagcaatagcggcagacatattttgcatgtcatcaacagctgcaataacagctcgaacaatgtgcttaaaggacctaatgaccatttcatggatgcaaattgactggatatgtggaagcttctccgcgagctctaccacacggcctaaggagcacatattaagaccccttgtgtgcatgaaatcagtcatggttcttccatccacaggagaaagttcaagggaagcaaaatcagccaccagctttggaagcgcagtatcatcatagaatttatgggccatcatagtgagctcttcaagggacttttgatgaagtccagctcccagatcctttaggcgacagaaatcatcctctgacatcagcttgctaatatcagtctccttggtgttttcagattcttccatgccatttatgacagagcagttactgtcagagtcttccttctcagacatagcaccttcaacatggcattctttctttttaattttctttagctgttcaaagtgcttaccaagacctttgatagttgtctctttttcaacatgtcctgcatttttcttgtcctcagatgccggcgaatcctttttctgcaagttttgcagccaggatgacccaagttcccatctgatggttttaggattattggcaggcatgttctccagcttcatcaagctatcttcaagtattttgcgcactagtttccttgcatgattatcaacatgagactgcggagtaggacactgagtactagcgatgtctgagttgacaatttttggcagtgatattcttagactgttaatgttcaaggcattagaacctccatctggcaaatcatctacatcaacattcgaaattccatcgagatgatcacagatatcactggtttgtttgccaccatttccgtcctttgtgcgccctgaaaccttcactgttgctgtatatccacaatgtttaacaataaccactccgagtgttgaggtgtccttaacaacgacactttcatcagaagttaaaccttttagaagatttctttgtgatatatccatagaaccggtttgatagagtgcaactccatcaactttatcctccagctttaaactagcatcagcctgatccctctttacagttataagcaagtcaccaacacgttcctcgattgctaaagaaccatctgggccagcttgttgactagttgagttcccagacagatcaatgagtctctgtattgttgatgcagctctaaaaattgctgtatctacaaagagattgtgtaaaagaaaagccttccggtctctgatcaccctcccttcctcagttttgcatggcattctagccaaagtagaaaattcttttgcccatcgtcttctgtcatactttccatctcgcccattgccacccccgtttccaccccaattctcatcctcaactggtaatgctgggcactttgtagcagaatccaagtatataggaggaataagccatgtgtttgcacgaaatccgtatggtagattcccaaacttgttgtgatccagaaaagctttcatcagtgcatcatatgcattggcaaatgcactgctgagctgttgcaacagatccaccaaggagtggctcacggtgtgcggcttccctgccgaatagaagcccttgacggaagcaacgatgtgcaggagcttcccattgcaaactttcacctcgatttcgaagtagtcgccttcctgagaagcgccattgctctccttcctcctgataaagtggacgggcggggtgaggtgggcgaaggagaggaagtcgtagaactcgcccagcctgggcggcggacggatggccgccatgtcgtgcgcctccgatatcggcggcgcctgggcggcgccggcgccatgggcgtcgggggaggcggcgagcgcgggcggtgacggcggcgtcgccgggcgcgcgtgcttggacgacttgtgcttggcgccgtcgcggggcttgttcacgaacgcggtggtgcaggcgacgatgtccagcagccgccggacttgcgccgccgccgccgcctccgtcgcgtactccttgtactgaccagtatgagtcagtgaccaccttccacgatggtgagagagcatggtttcagcgacacgatttccacgccgtcctccagccgctgccctcgcgtctgcgtcatacatcacacgcttcacaaattcagacttcaccgaacacagcacgtgcgagagcgagtagtttgtcaggtggcacgtctccacattcgagcccagcagcttcctcacgtccagaacacggtccgtagatatccccttgagtgtaacctgggattcatagggagtgacaaccgtgacgtctatggcactcggcacaactttctcttccttcttcctcttgtcgcctttgccgccgccgccgccgcccctgcccttgccacggccggcgcccttgggggccat

SEQ ID NO: 3121 - DNA, 1938 bp, Oryza sativa
  Clone ID: PAT_MRT4530_2005C.1
tagtggatcccccgggctgcaggctctcccacacaatccccacccggcctagcgagcgagagagagggaagggttgcgacttgcgactcgcgagcggcgagatggcgaaggacgtggagatggcggtgcggaacggagacggcggcggcggcggcggctactacgccacccacccgcacggcggcgccggcggcgaggacgtcgacgacgacggcaagcagcggcgaaccggtaacgtatggacggcgagcgcgcacatcatcacggcggtgatcggctccggcgtgctctctctcgcatgggcaacggcgcagctcggctgggtggtcgggccggtgactctgatgctcttcgccctcatcacgtactacacctctgggctcctcgccgactgctaccgcactggcgatccggtcagcggcaagcgcaactacacctacatggatgccgttgcggcctacttaggtggctggcaagtctggtcctgtggtgttttccaatatgtcaacctggttgggacagcaattgggtacacaatcacagcatccatcagcgcagcggctgtgcacaaggccaactgctaccacaagaacggccacgatgccgattgcggtgtctacgacaccacgtacatgatcgtctttggagtcgtccagatcttcttctccatgctgcccaacttcagtgacctctcatggctttccatcctcgccgcggtcatgtcattctcatactcgaccattgccgttggcctctcgcttgcgcgaacaatatcaggtgctactggtaagactactctgactggcgttgaggttggagttgacgtcacttcagcccagaagatctggctcgcgttccaagcgctcggtgacatcgcgttcgcctactcctactccatgatccttatagaaattcaggacacggtgaagtctccaccggcggagaacaagacgatgaagaaggcaacgctgctgggggtgtcgaccacgacggcgttctacatgctgtgcgggtgcctggggtacgcggcgttcgggaacgcggcgccggggaacatgctcaccgggttcggcttctacgagccctactggctgatcgacttcgccaacgtctgcatcgtggtccacctggtcggcgcctaccaggtgttctgccagcccatcttcgccgccgtcgagacgttcgccgccaggcggtggccgggctcggagttcatcacccgggagcgccccgtcgtggccggcaggtcgttcagcgtcaacatgttcaggctgacgtggcggacggcgttcgtggtcgtcagcacggtgctcgccatcgtgatgcccttcttcaacgacatcctgggcttcctcggcgccgtcgggttctggccgctgacggtgtactacccggtggagatgtacatccggcagcggcggatacagcggtacacgtccaggtgggtggcgctgcagacgctcagcctcctctgcttcctcgtctcgctcgcctccgccgtcgcctccatcgagggcgtcagcgagtcgctcaagcactacgtccccttcaagaccaagtcgtgatcccgatcacgacggccttttttttttgcttttgcatcctgatgaaaaaagatttcagaaacatatgcacaacaaatgccggaagttagccaagagtttggtcaccagctcggtgcgttggtcggtcaggaggaggagggttcaacttgtgtaggttaagaaatgctagagagtatggagaccatcttcgattgctgctcatgtatagaaaaaagaggaagcttcgtattcatgtaatgaatcggaatgtttaacaaacaaggcttgttctgaactcttctcagggacaggcatggataacagattaaagataaatgaatgtgttagacaagggcagattagaagcggctcttaagcttcacacaaaaaaaaa

SEQ ID NO: 3122 - DNA, 2313 bp, Oryza sativa
  Clone ID: PAT_MRT4530_2013C.1
atggcgctcatcggcacggtggcggccgaggtgctcatcccgctcgcggcggtgatcggcatcctcttcgccgtgctccagtggtacatggtgtccagggtggccgtcccgccgcacgacggcgtcggcggcgccgggaaggtggagagggagagcgacggcggcgacggcgacggcgacggcgtcgacgacgaggaggacggcgtggactaccggggcgtggaggcgaggtgcgcggagatccagcacgccatctccgtgggcgcgacgtcgttcctgatgacggagtacaagtacctgggcgcgttcatggcggcgttcgcggcggtcatcttcgtctcgctgggctccgtggggcggttctccacgtcgacggagccgtgcccgtacgacgcggcgaggcggtgccgcccggcgctggcgaacgcggcgttcaccgcggcggcgttcctcctcggcgccaccacctcggtggtctccggctacctcgggatgcgggtggcgacgttcgcgaacgcgaggacggcgctggaggctcgccgcgggatcgggcgggcgttcgcggtggcgttcaggtcgggcgccgccatggggttcctgctggcgtcgagcgcgctgctggtgctgttcgccgccgtgaacgcgttcgggctctactacggcgacgactggggcgggctgtacgaggcgatcaccgggtacgggctcggggggtcgtccatggcgctgttcggccgcgtcggcggcgggatctacaccaaggcggccgacgtcggcgccgacctcgtcggcaaggtggagcgcaacatccccgaggatgacccccgcaaccccgcggtgatcgccgacaacgtgggcgacaacgtgggcgacatcgccgggatggggtccgacctgttcgggtcgtacgcggagtcgtcgtgcgcggcgctgttcgtggcgtccatctcctccttcggcgccgaccacgacttcgcggcgatgatgtacccgctgctggtgagcgccgccggcatcgtggcctgcgccgccaccacgctcgtcgccaccgacgccggcgagctcggcgccgccgacgaggtcgcgcccgcgctcaagcgccagatcctcatctccaccgtgctcatgaccgccgccgtcgccgccgtcaccttcctctccctcccccgctccttcaccctcttcgacttcggcgaacgcaagctcgtcaaaaattggcacctgttcatctgcgtctcagctggtctgtgggcgggattggtgataggctacgtcaccgagtacttcacgagcaatgcttacgggccggtgcagacggtggcgcagtcgtgccggacgggggcggcgacgaacgtgatcttcggcctcgccgtggggtacaagtcggtgatcgtgccgatcttcgccatcgccggcgccatctacgccagcttccggctcgccgccatgtacggcatcgcgctggctgcgctggggatgctgagcaccatcgccacggggctcaccatcgacgcctatggccccatcagcgacaacgccggcggcatcgcggagatggccggcatgccgcggcgcgtgcgcgagcgcacggacgcgctcgacgccgccgggaacacgacggcggcgatcgggaaggggttcgcgatcgggtcggcggcgctggtgtcgctggcgctgttcggcgcgtacgtgagccgggcggggatccggacggtgaacgtggtgagccccagggtgttcgtcgggctcctcgccggcgccatgctcccctactggttctcggcgatgacgatgcggagcgtggggagcgcggcgctgcggatggtggaggaggtgcggcgccagttcgacgagatcccggggctcgccgaggggctcgccgcgccggactacgccacctgcgtgaggatctccaccgacgcgtcgctgcgggagatggtggcgccgggggcgctggtgatggcgagcccgctcgtcgccgggacgctgttcggggtggaggcgctggcggggctgctcgccggcgcgctggtgtccggggtgcaggtggcgatctcggcgtcgaacagcggcggcgcgtgggacaacgccaagaagtacatcgaggccggggcgacggaggaggcgaggtcgctggggcccaagggctccgaggcgcacaaggcggcggtgatcggggacaccatcggcgacccgctcaaggacacctcggggccatcgctcaacatcctcgtcaagctcatggccgtcgaggcgctcgtcttcgcccccttcttcgccgcgcatggcggcatcgtcttcaaccacctctga

SEQ ID NO: 3123 - DNA, 1295 bp, Oryza sativa
  Clone ID: PAT_MRT4530_20264C.1
ctctctcaagcagcttagctcctgcctccttctctgatcattcttgcaaaccaatcgagtcttgaacgaggtcaatgggcaaggaggtggacgtgtccactctcgaggccggcggcgcccgggactacatcgacccgccgccggcgccgctcgtcgacgtcgacgagctgggcaagtggtcgctgtaccgcgcgctgatcgccgagttcgtcgccacgctgctcttcctctacgtcacggtggccacggtgatcgggtacaagcaccagacggacgccgccgtgaacggcgccgacgcggcgtgcggcggtgtgggcgtcctcggcatcgcgtgggcgttcggcggcatgatcttcatcctcgtctactgcaccgccggcgtgtccggcggccacatcaacccggcggtgacgttcgggctcttcctggcgcgcaaggtgtcgctggtgcgcgcggtgctctacatcgtagcgcagagcctcggcgccatctgcggcgtcgggctcgtcaaggggttccagagcgccttctacgtgcgctatggcggcggcgccaacgagctcagcgacggctactccaagggcaccggcctcgccgccgagatcatcggcaccttcgtgctcgtctacaccgtcttctccgccaccgaccccaagcgcaacgcccgcgactcccacgtccccgtgcttgctcctcttccaattgggttcgcggtgttcatggttcacttggccacgatcccgatcaccggcaccggcatcaacccggcaaggagcttgggagctgcggtgatctacaaccagcacaaggcatggcatgaccactggatcttctgggtggggcccctcatcggcgccgccatcgccgccgcctaccaccagtacgtcctgagggccagcgccgccaagctcggctcttcctcctccttccgcggctagacgccgccgccgctggatgcatgaccggaggcattgaagtgtagatatatcgatatcagagagggcctccggtcagctcgctgttaatgatcagctagctgttcgtttgcctgccagagctagtttatcctcggtttctggctttctgcgtcagctagcttcttgatcatcttcagcttctgtaattcctgagctatgctgcataattgtttgctcaatgtttcttccaggtgtgcttttcatgttaactttgtatgtgtctgtatgtatatatgcgagctgtgtgcatatggtaccaaaaaaactgtatgcactctatatgaaaaagtacttcgatgttttcctcctaggttcttc

SEQ ID NO: 3124 - DNA, 183 bp, Oryza sativa
  Clone ID: PAT_MRT4530_20333C.1
ggcccataacaataaaccccaataaaagggctaacagaaaaacaggaagtgcccccaagcatttcaagaggttcccccacccccaaccaggcctggtttcacagacccccacctgttttgttacgagtagcttaaaggggagactgtaaaaccattgttggcaaccttacatacgggggagcc

SEQ ID NO: 3125 - DNA, 1746 bp, Oryza sativa
  unsure (1)..(1746): unsure at all n locations
  Clone ID: PAT_MRT4530_2073C.1
atggccgcggagttggcctcccttccacgtggcctgcacttttttcggctgagtggatgtgtggttagccacgcaactttccctggatcgaaagcgatgggccgttggattgggccccagcgcgaagcggacggcgatcgcggaccgcggaccaaagaggaagccgccccgaagcgcttcgtccacacgcccatcccgccctccatcctctccgacccaaccctcgccgctgccgccaccggcctcctcccggcggcgtacaacttcgagctccccaagacggcgcaccgcatccgctcctccggcgcccgccgcaccgcgctgcagcttccggagggtttgctcctcttctccctcccgctttcccacctcctcgcgcccttcctcgagccggacccctccaacgacgtcctcatcctcgccgatcccacctacggcgcgtgctgcctcgccgaccgccccgccaaggcgctcgccgccgacgtgctcgtccactacggccattcctgcctcgtccccgtcacctcctccctcctccccgtgctctacgtcttcgtcgagatccgtgtcgacgcccaacgcctcgccgacgctgtccgcgccgccttcccggaccccgccgatgcgccccgcctcgccatcgccggcaccgtgcagttcatttcggcagttcacgcagcgcgtgagatcctcagtcacgatggttaccagggcatcgtcgtgccacaggcaaagccgctgtccgccggcgaggttcttgggtgcacagcacctgccctgaaaaggtccgagggggtcggagcggtggtgttcgtcgcagacgggagattccacctcgaggcattcatgattgccaatcccggggtcaaggcctaccgctttgatccattcctgggtgtgcttgtgctggaggagtatgaccatgtcgggatgaagcaagcgaggaaggaggcggtgctggcagcaaggaaggccaagagttggggagttatactaggcacccttgggcggcagggaagcgtaaaagttctcgacagggtggtggagcatttggaggagaaagggctggaacacacagtagtgctcatgtcggagctgtccccggcaaggatggagctgtttggggattcggtggatgcgtgggtgcagattgcatgcccacgtttgtcgattgactggggtgaaggattcaagaagccaatgctgacgacattcgagtttgatgttgcactgggctatgttcctggatggtgggagaaggggagtagggaatgtggcagtggagatgccaccggttgttgttcaggatcaggaacttccacagattgtggttgcagcaatggtggttgtgctgacaaggactttgggggggagtacccaatggattactactctcaggatggaggtgattggaacagctgctacatgaagaagaagccctctactggagagagaaagctgcgagttcggattggtaattactcaaattcataggggtttacacccggcctttttgcctggcctcgtgcccccctctgcccggccgcatggctcgtctgacgcttgcgtcccccacgtgtcgatttgtccggctgatctttgcccttccgctaccgagtgctgtgatatctgtatctgtacccagatgtaaactactcgatccngcgcccccctgtaatcctgtgatgttggtcttcccataaaggtgaaatggattctaagtttatggagccccaaacaaaaaaa

SEQ ID NO: 3126 - DNA, 2109 bp, Oryza sativa
  Clone ID: PAT_MRT4530_20929C.1
cccacgcgtccgcccacgcgtccgcccacgcgtccgctagcagaaacaaacccctctcactcccagatacctgctgctgccactagcccactaccatggatccttgcaagttccggccgtcgagctcgttcgacacgaagacgacgacgacgaacgcgggagctccggtgtggaacgacaacgaggcgctgacagtggggcccagggggccgatcctcctcgaggactaccacctgatcgagaaggtggcgcacttcgcccgggagcgcatcccggagcgcgtggtccacgcccgcggcgcctccgccaagggcttcttcgagtgcacccacgacgtcaccgacatcacctgcgccgacttcctccggtccccgggcgcccagacccccgtcatcgtccgcttctccaccgtcatccacgagcgcggcagcccggagacgatccgcgacccgcgcgggttcgccgtcaagttctacacccgcgagggcaactgggacctcctcggcaacaacttccccgtcttcttcatccgcgacggcatcaagttccccgacgtcatccacgccttcaagcccaacccgcgctcccatgtccaggagtactggagggtcttcgacttcttgtcccaccaccccgagagcctccacaccttcttcttcctcttcgacgacgtcggcatccccaccgattaccgccacatggacggcttcggcgtcaacacctacaccttcgtcacccgcgacgccaaggccaggtacgtcaagttccactggaagcccacctgcggcgtcagctgcttgatggacgacgaggccacgctcgtcggcggcaagaaccacagccacgccacccaggacctctacgactccatcgccgccggcaacttccccgagtggaagctgttcgtccaggtgatcgacccggaggaggaggagaggttcgacttcgacccgctggatgacaccaagacatggccggaggacgaggtgccgctccggcccgtggggcgcctcgttctcaaccgcaacgtcgacaacttcttcaacgagaacgagcagctggcgttcgggccggggctggtggtgccggggatctactactccgacgacaagatgctgcagtgcagggtgttcgcgtacgccgacacgcagcgctacaggctggggccaaactacctgatgctgccggtgaacgcgcccaagtgcgcccaccacaacaaccactacgacggcgccatgaacttcatgcaccgggacgaggaggtggactactacccatcgcgccacgcgccgctccgccacgcgccgccgacgcccatcacgccgcgccccgtggtggggaggaggcagaaggcgacgatacacaagcagaacgacttcaagcagcccggggagaggtacaggtcgtgggcgccggatagacaggagaggttcatccgccgcttcgccggcgagctcgcgcaccccaaggtctcccctgagctccgcgccatctgggtcaactacctctcccagtgtgatgagtcgttgggggtgaagattgcgaataggctcaacgtgaagccaagcatgtgaagaaactaaggcacaagaatgcatcatctcttgttaattaattggagtactaccaaccaaataaggccagacaatgtcagatgcacgcatcttctgttgtcgttgggccatcttttgtatgcatcctattgttaattactagtacatgatatccaagtgatcatcagcaaggctacagaaattctgtaatacgataaattaaaagaaaccaaaatggagcctgcatatgtgtaacttaattaatgtactggcgtattaatgccactgctgcatgttgtaatactccatcaaagagtctattactattaagtatttaaattatcacttcaaaaaaaaaaaaaaaaaactcgagactagttctctctctattttgtgaaggtactgcagcttttacttaattaatcttgaacctcgatgtatacaacagtgaacagttaaattaatcatcattccctaatgcctcttaaaaaaaaaaaaaaaaaaaaaaaaaaaaaaaaaaaaaaaaaaaactcgagactagttctctccctcgtgc

SEQ ID NO: 3127 - DNA, 1807 bp, Oryza sativa
  Clone ID: PAT_MRT4530_20985C.1
ggtaagagcaaccttctacacgacggcggcggcggcggccgcctcggcctccggcgccgccctcttctcgaggaacccgacgtagaggtccgactgctcggtgtcgcagctgggcagcgccgcccgctcgccgccgtcggccatggccctgacgaacgacacgaactggcgccagttgtcgccgtcgaacagcttcttgttcatgcgcaggtacgtgaacgcgcccagcccggcgctcgccgcggtggccaccacctgcgcgaacgccgcctcgtcgtaccgctccagcgcgttctcgccggcgagccccacgcgcgccgcgcgcgccgcggaccgcacctgccgcaccagctgctccggcgagcacccggcgtgctccggctgctgctcgtcccgcatctccatgcacgtgaagttgagcaccgcgccgcgccgcgccagcatcgccgcgacgggcgcgtacccgtcgcggcgccgcgtgttgtagtaccccgccgtgagctccgcggcgtgcgaccgcgtccggtagtgccagtggatgccggcgaccttggccgagagcgcggcgccggtgccgcggaagacggcctcggcggcggccaggacgcggtcgccgtgctccagcagcatcccggagtaccacccgaggaagaagtcgccgtactcggtgcaccacgtgccgtctcgccggaagaaccccgtctcctccgggaactgcttgtactcgccggcgtcgtgcggcccgcccctcccccactcctcgtgccccgccgccgccgccgcctgctgcagcgacgccctcatgtacttgtcatagcattggaactcgccgatgccagggaaacgccatgttccattggcctcaggatacgaaggatacctcagctcaccacaaggccccaatcctacttggatctccacgatggtgttgccgaggtagccgcagaatgtgtcgcggaagctgcgcatgtagtcggagtagacctggatgggcgtcctgcccttgagcaccggcagcgtgtcgcagccgagcgagatgtactccggattccgacgacccgacctgtccgtgtacacgatgtccgggttcgacttcatctcctccaacacccatcccggcaacgggatattgcaggagtcgccgacgttgccgccgcactggtggaaggacatgaccatctggaggcggaggccggcgcgctccaccatgcggacgagctcgccgtagccctcccagtcgtaccgccggggcccctcccgctccaccaccccccaccacacgtccaccatcaccccctccaccccgccgctccgcagcgccgccaggctcgccgccagcgcccgcgcccgcgccaccttcccccccgcccccaccgtctccagcggcagcatcacgtacaccgccgtccccttcccccgccgctgcccctgcccgcccccgcccccgtggtgcagcagcgtcgccgcctccggtgacgccatctcctccatcgtcgcgtgctccaccggcgccgccctggcgagccgcagcctgccgccgctccccggcgccggcatggggacgacgcagcacggcggcgcgtcctcgcgcttggaggacgggtcgagcggcgacaggaacgacgtggatgaacgcagcgtcaacgccatggacttgatctcgagctcgagcttctccggagaggaagataattaagtagataagaggtgcttaacaactaaccaagattgattcgatcggagatgagccactgaattgaattaaattcacccagagaagctttgatttctttcttgcttggaaaga

SEQ ID NO: 3128 - DNA, 267 bp, Oryza sativa
  unsure (1)..(267): unsure at all n locations
  Clone ID: PAT_MRT4530_21046C.1
ccaccnctccggccccttcccttcccttcccctcttctctcctctactagctatagtataggccgcccccgtcgttttgttaattttcacgccgaaatttccacccacaccacgcgccgcctgcctacctgcgcctgcgcgagctgcagatcgatcgacgagaggccgcgtctcggtcgcggggggtggagttgatcgancgatcctggaggggtatgatgaggaggtttctgccggtggggggaggaggaggaggaggggcggagc

SEQ ID NO: 3129 - DNA, 3795 bp, Oryza sativa
  Clone ID: PAT_MRT4530_21231C.1
tttttttttttttttttttgggagggtggtctaccacgtaaactgatcctggaacaaaatgaacaacaattacaagcctcaacccttgacagttacaggcatcgcgccattgtacattctcaaaagctaacttctgtgagcgcccatcaaagctatgtctactacaaatatatttcaattacagggggagaacataattgaagtgggaaaatctactagtacatcatcatcatcaccaagcacacaacctagagttccaagaatggcatgtcatgaatcgaaaacagaaacgctagaaataacctattcagtagccctctgcaattgtcatgtagtgaagaaagaccatagctttttcccaattgattggttccgcctttcggagtcatcgtcctcctcatcatcctgttcagctccaagttcacttcctgatggtgtcataggcatcgcatctggtgctgcatctataccatccacaatatctaccccctctgcactagtgacctctacagggccatgtgtgtcaccagcttcagcctgcgagtactcgggtaattgagatgcatcatcagctgattgggaggcccctttgctcccagtggcaggttcctcagcctttgaggttccttctgtgtcatctgcggtagcctctactgtctgtttacttccctttttcgcagctttctttttgttggtttgggctgcagttgccgcatttgcaactgtggtgcgcctgaggttgtagcgtttttctcctggggcttgcgtaactgctgcagctgtttggcgcctcttgcggcgctgccctccaagtgaaacactttcagaatgagcttcactgtcctcatcttgctcactgattgtggctccagcaaagcgccgcttccgtgtaccacccacagtaactgaatctccctggccatcatccttttttacttctaaattctcaccaagtatttctttagcatcttcaactaccgcaagaacagaccgtgtccgttttacaccaccttttgctctacccttcctgttttgttggcgccgtccttgttttgatgtttcaggctccaaatctacaacgggaagcactgccgagtccttcccgttttggtcaacatccacaatagttgtgtccaccaccatgtccgtgttgccatcaaatgattgagttccatgaatatctacacaattatctgcaactccaagagaagactccatctggacgtcatctgctatatcttgcctttcagattcttcattctcaaatgccccactctcagatgggagatcctcagcatcaaatgagttataggctacctgatagacaggagttggctcataatcatcatcgctctgcgatgcttcctctagtcttgcaccaaagtctgtgttcttcactgcttgctgttcagatgattgctcagccttcttcctaggagaaaacttgaaaatccttgaacacttctgcaacaatgataaacggccacctgaattaacaagtgctccggtctcttgggctaaggtgtcaggattgggggaacgatcatccgcctcaacagcaagactaggatattctatatcagtgctatctttaagagctagggcatccaagccctcaaaaataataaccccgcaatttttgcacaccttgtacttttcaaatatatcgatgaggttattcctgtccctgttatatgcttctctacgctctttcagactcttgctgagagtgttcagactatcaatgtcccttctgatatctgccttgtcagtttccagtttttgcctatcctccacaagaacttccttttccttctgcagctgttttttctccaatagtatcttctgaatctttgattcattcaattcggctgcacgtttgagctcattttctacaaagtccatcttcctatttaactcattttccttctcttcaagttctctctctttgctcgcttgttttttctccatctccatctccaattcatgccgatggagctgcaaatttcgttgaagatcagcacgctctctctttagcaattcctcattttccaaacgctgatggtctatattatcgatcaaggatttttccttaagtgcgagattttccccctgctccttgtattttatgtccaactcatcctctctatcctttagccttttttcttcattgtcatgccacctttctagattcttcttttcattgttcagtttcttggcttcctcttccaagtgagttcttttttcatccagctgctcccactcttcttcaaatttctgacgctgcttcctcaaatcttcagtttcctcagaaagagagttgcttcgcattctgtattcatcaatctctttcttcagttgtgctgtaagcatgatgtgctcttgcctctcttcctctgtaagtttcaaattgttctgctcttgcaatattttctccttttcagcaaccactgtggctttcaaactctcaagctccaatttgtacatctcagcctgctttctttcattttcaatctgcagcttttgttccgataactgtttctcatcattttgtagtgattcctcccacttcttcagagcattcgattttgtatcaagatcattttgccattcttccaattttttcttactttcatttaatacttgttcttttttcgaaagcttctcctccgaagatctgacatctttttccctctgcaccaaatcagcttccttctgtaccaacattgcatcaaatgatttcttctcattctccagttgtaaatcaaaatctcgtcttttggattcaagcttcacattatgatcttcaagaagcttctgaagcccaactttttcccttgcactgactttttcttccctttcagctatttttttctctctttcttctaatttcctgttctttgattcagcttccttttcttgtaaatgtaattcagctagtcgtttgttaatgtcgtcctctttaattttgagtgtagctttagtatgctccagagctttttttgcttcctccaactcttcttgctttatcttgaaaagtttgtcattctcgtttgctctctcctctcgatcatttagggatctctgcaaatcaagaattctattctgactttccttaagctttttgtcccagtcacgtaatgaatcctcctgacgcttgatccggtcctcccctgccttcctctcattttcaaaatatagcttctccttctccagcctacgctgacgagcttctacctcctctaaatccctgtcagcctgtgttggcgtcccgtttgcctccgcaagcttcgcatctgcagcatgaagcttaccctcgatctccaaccttttttcctccaaactagcctcaagggattgagcatcagttatctttttctcagacataaacttaacctcggctatctctccacgaatttcacgcagtgccttttcgagatctgttacgcattgcttctcaacacccaatgctttccgcatgctttcctcccgcctttcgtattctgatatggcattcaaatgggcagcttgttcccgctttaaaatctcttctttctgtgtcagcgcttgattgatttcatcaagtttggctgtccactcttttttctcaatcaaaagcagccccatattgtactgatattcatgtaactcttgttccagttcggcgacccgcagagtagtccctttccccttgccaaggggcgccgacgcggcgggagcgccgccaccgctccgctggttcgccggagccggcgtcgaccacccggtccaccccttcccctgcggagtaaacat

SEQ ID NO: 3130 - DNA, 1644 bp, Oryza sativa
  Clone ID: PAT_MRT4530_21267C.1
aggaatcggggaagctgtcccttctcctcttctcctcctcggctgcggccacggcgacgacgacgacgacgaattcgagcgaggcgatcggcgatggaggcggtggcgatctgatccgctcttcccgtctcggcctcgcgctcctctccctccctcgcggtgtctcgggtaggaaatggcgatcatggtggatcctccaaatgggatgggtaaccaagggaagtattactactcgatgtggcaaactttgtttgagatagacactaagtatgtgccaatcaagcccatcgggcgaggagcttatgggattgtttgttcatccataaatcgtgagaccaacgagaaagtagcaataaagaagatacacaatgtttttgacaaccgtgttgatgcactaaggactttgcgggagctgaaacttctccggcatctccgccatgagaatgttattgctttgaaggatataatgatgccagtacacaggaggagttttaaagatgtgtacttagtttatgaactcatggatactgacctgcatcagataatcaagtcacctcagggtctttccaatgatcactgccaatattttctttttcagttgcttcgaggactgaaatatctccattcagcagagatactccacagagacctgaaacctggaaatctactggttaatgcaaactgtgatctcaagatatgtgattttggtcttgcacgcacaaacagtagtaaaggtcagtttatgactgagtatgttgtcacccgctggtatagagctcctgagttgctcctttgctgtgacaactatggcacttccattgatgtttggtctgttggttgcatcttcgctgagctacttggtcggaaacctattttcccaggaactgagtgcctaaatcagctcaagctcattgtcaatgttcttggcaccatgagcgagtctgacttggagttcattgacaacccaaaagctcgcagatatatcaaatccctcccctacactcccggtgtgcccctcgcgagtatgtatccgcatgcacaccctcttgccattgatcttttacagaagatgctcatatttgatcctaccaaaagaatcagtgtcaccgaggctcttgagcacccttacatgtcccctctgtatgatccaagtgcaaatcctcccgcgcaagtgcctatcgatctggacatagacgagaacatcagtgcagatatgatcagggaaatgatgtggcacgagatgctccactaccaccctgaagttgttgcagcaatgagtgcccgatgatcttcaactgtccccaggaactttgcaggctcacttttttttcttcttctaaaagcctacggcgattatcgcacctattaagtaaccaagacgtgcaagacttatttcatgtatatatgagcgaaataagaacgttgttgtatccatatagttcatgttatggaccattacttggtgtatgcatttcacatttccactggacagttatgttgttgtactagttcatgatgagaagtgctattaaagtgaattcagtaaaaaaaaaaaaaaaaaaaaatggattatgttataattttttgcggttactgcttctttagtggtgatctgctgcaaaaaaaaaaaaaaaaaaaaaaaaa

SEQ ID NO: 3131 - DNA, 423 bp, Oryza sativa
  Clone ID: PAT_MRT4530_21361C.1
atgcaaatgctgatgagtgtcttcgtcattatcattggttgctacactgctattgactggatcaccgacatcgtcatcttcatcataggagttagtacaatgcatcttaaaaggtgtcaaacagtaaagctttatatagctgcctcgctgacttttttatatagtcaaggcactgtttgggtttatcaagcaattgattggatacaatatcgttgctttttgccacccctccacagtcttcatatttggtaaaagtactcgggagaccatggcaaagatgattgaagcacttggctttggagtaatctggttcgagagaagattatcttttcgtctgttaaggtgcatctgtgcggtatttcacaccgcatatggtgcactctcagtacaatctgctctgatgccgcatagttaagccagccc

SEQ ID NO: 3132 - DNA, 2349 bp, Oryza sativa
  Clone ID: PAT_MRT4530_21504C.1
atggcgccgacgctggcgttcctcctcgtcctcctcctgctgctcgccggcggcggcggcggcggcgcgttcttggcggcggccgcgtcgacggacaccgttgtcccggggaaggggatggccgggaaccagacgctcgtctccaagaacgggcggttcgagctcgggttcttcaccccgggctccggcatccactacttcctcggcgtccggctgaggaacatggcggagtacagccccacgttctggatcggggacagggtcggcgtcatcgacctccccggcgtgtcgctcgaggtgttcggcgacaagctgtacatcaaggaggacggggtcagcctctggtggtccagcgtcgctgggaacggctcctcctcctcctcggacggcggcgccgtcgccgtcctcctcgacaccggcgacctggtggtgagggaccaagggaacccctccggcgtcctgtggcggagcttcgactaccccggcgactcgctgctccccggcggcaggctcgggctcgacgcggccaccgggacgaacgtctccctcacattcaaaggcttttcccacaatggcagcctccaggtcgacgcgagcaggaggaacgggttcgtgctcaccaccgatggcatcgacagccgcggcgccttcccggactggatggtgacctcccaagacaacggcagctcgctggtgctcaaccaccctgacgccccgaactccaccgagttcttgcagttcaatcttgggctgatcagcctgatgcggtggtcggattccaccgccggctgggtggctcgctggacgttcccctccgactgcaagtccggcgccttcttctgcggcgacttcggcgcctgcacggccggcggcggcggcggatgcgagtgcgtcgacgggttcacgccgtcgtacccggacgagtggcggctcggctacttcgtcaccggctgctcgaggtctctcccgctgagctgcgaggccaacggtcagaccgagcacgacgactccttcgccattcttgacaatctccgaggcctcccttacaatgctcaggatgaaccagtgaccactgatgaagattgcagagctgcttgcctgaacaaatgctactgtgttgcatactcgaatgaatctggatgcaagctgtggtaccacaacctgtacaatctgagctcagctgataaacctccatacagcaagatctatgtccgtttgggttccaagctcaagagcaacagggggttggccacaagatggattgtgctcttggttgttggatcattagctgtaacttcggtaatgttgggactggtgcttctatgcagatacaggagagacttgtttgcatccagtaagtttgaagtagaaggctctcttattgtctacacttatgcacagatcaggaaggctacggggaatttctctgataaacttggtgagggaggttttggaagtgttttcagggggacattgcctggatcaaccactgttgttgctgtgaagaatctgaaaggtgttgggcaagcagagaagcagttcagaacagaagtacagactgttggaatgattcgacacactaatcttgtccgtctcttgggattttgcgtcaacgggaatagaaggttgctggtttatgagtatatgtcaaatggatccttggatgctcacatcttttcagaaaaatctagtttgctgagttggcatgtccgataccaaattgcacttggtattgcaaggggtctagcctatctgcatgaagaatgtgaggactgcatcatacattgtgatattaaacctgaaaacatactacttgattatgaattttgccccaaaatctgtgattttggtatggcgaagcttcttggacgagaatttaactctgcattgaccaccgtccgagggacaatgggctatcttgcaccagagtggatatatgggcaacctattacaaaaaaggcagatgtttatagctttggcattgtgctttttgaaataatctcagggagaaggtctacggagacagtgaaatttgggagccatcgctattttcctacgtatgcagcggtacaaatgaatgaaggagatgttttgtgcttactagatagcaggctggaaggaaatgctaacgtgaaggagcttgacatcacctgtagagtggcctgttggtgcatccaggatgaagagaatgacagaccgtcgatggggcaagtcgttcgcatgttggaaggcgttgtcgatatggagatgccaccaattccagcttcatttcagaacctcatggagagtgaagacagtggtatatactctgaagaaagctggaatttcaggacccgagatcagttctag

SEQ ID NO: 3133 - DNA, 3194 bp, Oryza sativa
  Clone ID: PAT_MRT4530_21919C.1
cccactcgtccgcccacgcgtccgggcgcaccagaggcagagagacacgagcagcgaggaggagctcccacgtgagccgtggacggtggagaaggacgtccacctcctcaacaacttagccgcgcatggcggcgagttccaacgcgagccgtgggtggagaaggacgacgccgcgtcgtggacggtggagaaagacgacgtcccgctcgtcaacaacatcgtcgcgcacggcgatcccgagggcagttcgaactcgctcgcccgatcaggaggacatttggccaatgtccacgagggagccggcatgttttatcagcccaacttcaagtacattttctgtgatatggatggcacactgctggatagtagcggtctagttccagaaaccaacgctgaggccattagggtggccaggtcaagaggggtacaaacaatcattgcgacaggaaagtcccgccctgctgttattgaagttcttggcaaggttaatttagctggcacaggtggtatcgtttcagaatcgtctccaggagtatttcttcagggtttgttagtttacggcgaggggggccaaaagttatatcaacagaatttagatatagaagtgtgcagagaggcgcttctatactctctgaagcacagagttgccctggtggccttcagccaggacgactgctacacaacgcttgatgatcatcctctggtggactttttccatgttatgtaccacgaaccaaagaaaaatttgttacgatcttttgcgcacgaagcagcggtagcctttgcgctgagcaaagctccttgtggtggcgtgagtcccttgcagcagctccagcctcgagactacgagcacgacggcgcagataccttgtgtggggatcctgaccaccagggtcgagaggctagagcgcagggacagcagatcccgacgcatcaggttgtggagcatggcgtgcaggcccaaggtgacgtgcctcaagctctgtggcttggccccgccgatccgatagcaaagataatatcagatgttgaccattttctgagtaccattgacatacagaagtttgtgttcctagaaactcctgaagtgatctcttctgtgctgaggccacactgggcgaggagggttgatggaaaggcacaggtcgttcaggcacagggtgatgtgcttgaagttgtaccgctcgggacttccaaaggaaatggggtaaaaattctgttggaatcactttgtgctagtccagatgaggtcatggcactaggcgatggaaaaaacgataaagagatgctccaacttgccggccttggtgtcgccctctgcaacggctgtgaggtgacaaaggtggtagccgacgtcatcggcgcgagcaacgacgaaagcggcgtggcacaggccatttacaaatacctctagaaaatgattccacctagctggcttagcatttctactgtggtgtggtagggcctaatatatcttgcttgcagcatccatttgcaagcgtaccatatttaaacttcaataattgtacgtggaagttggaagtactattcgctggtggattaatatcatatttgctgcttacagctaagatatcacattttaaaataatagccaaaaaaatcaaaaaaagcaacaacgaaaacggggtggcccaggcccttttcaaatacctttagaaaatgattccccccagctggcttagcatttttactggggggggggagggcctaatatattttgcttgcagcatccatttgcaaggggcccatatttaaacttcaataattggacgtggaagttggaaggactattcgcggggggcccccgggcggcacgcccgcgcattcctctcgcttttgtctttttttttttttttttttttttttttgtttttttccatttattttttttttttttttttggggggaaaatccatataatataacccgaaaagcatgcggattaacataatttgatacagtgagacaacctaggatcacagaattaacagtacaaaaacagatacagttgctcggcaattacagcgagattcaagctcacatgttctcacatcaacagaccgcaataatttcgggccacaatgttctctccctaaaaactaggtaaaaacaagcagcagcttaccgtacaagtttgtcatgactgcttgtgaagtttgaagccaaaaacttttggaacatactgctgagatggcttttgtggcttcaagtgtggatatgtcatcaggaagagatgtgggaatgttgtcccaaagtacgctccgtcaatgttgccttggtacttggatcttggataatgtaaatcttcacattttggacagtatatcttcactgtgctagacctaggaatatctgattgccctgcaggaagacagggttggccacaacagtatacccgggggcatcttccaaagtcatagttcttgaacttctccaacattgcagccagacccttgctggttaagatatatcttgcatgaattaatccatacagcatctctgcagatgactcaattaattcattttgctcctcagtgaacacatcaccattagaagactcgatgtctaagataagatcaagtgcatagtcataatatggcacctgattgctcagaccacaaaggttgaaatcatcctgtatataatcatcatcgatctcacagaagaactcattgccgcgcaaactgcagaaccatgaaatccaagatgtgtcctctccctcagaaccactgacatctgaatcttcactgtcagtttcaaattcttctgcaccatcggagaccttcccggccttgccgagcggcgcgggcagcttcccccctgcggcggcgaggcggtccctctccttggccaccgccgcccccctggatgtggacggggacgacctgtccaggtgcttctcgagcacgtccttgatgcgcttccggtccatctccgccgccgcgccgccgaacccccgatccctgtacgcgccgctcataccctacctacggcggcgcgcccctgccacagcctccgctctctcgcaaccccctgagggcgagccggcgagggcggcgctcgcgggcggggctagggtttggcgcaggatcgaggtgaagagatcggagtggtgacgaggcggggaagaggaggacagcgagagcgagagagggagcccgtgtgcgtgcgtg

SEQ ID NO: 3134 - DNA, 2542 bp, Oryza sativa
  Clone ID: PAT_MRT4530_21965C.1
tttgcccttccccccccttgctactactagttgcttgcctcttcccacctcacctcgcattgcaatctcgcatcgcctcttccttctcttcttccccttcttctccccttctcatccaacctcgcttcccaaccctggatccaaatcccaacctatcccaaagccgaaaccgaggagaggaaaaaggttacgcgcaattattactagctatagctaggtaggtttgggggaggcgagatcatgaagcgcgagtaccaagaagccggcgggagcagcggcggcgggagcagcgccgatatggggtcgtgcaaggacaaggtgatggcgggggcggcgggggaggaggaggacgtcgacgagctgctggcggcgctcgggtacaaggtgcggtcgtccgacatggccgacgtcgcgcagaagctggagcagctggagatggccatggggatgggcggcgtgagcgcccccggcgccgcggatgacgggttcgtgtcgcacctggccacggacaccgtgcactacaacccctcggacctctcctcctgggtcgagagcatgctttccgagctcaacgcgccgctgccccctatcccgccagcgccgccggctgcccgccatgcttccacctcgtccactgtcaccggcggcggtggtagcggcttctttgaactcccagccgctgccgactcgtcgagtagcacctacgccctcaggccgatctccttaccggtggtggcgacggctgacccgtcggctgctgactcggcgagggacaccaagcggatgcgcactggcggcggcagcacgtcgtcgtcctcatcgtcgtcttcctctctgggcggtggggcctcgcggggctctgtggtggaggctgctccgccggcgacgcaaggggccgcggcggcgaatgcgcccgccgtgccggttgtggtggttgacacgcaggaggctgggatccggctggtgcacgcgttgctggcgtgcgcggaggccgtgcagcaggagaacttcgcggccgcggaggcgctggtcaagcagatccccacgctggccgcgtcccagggcggcgccatgcgcaaggtcgctgcctacttcggcgaggccctcgcccgccgcgtgtaccgcttccgccccgcggacagcaccctcctcgacgccgccttcgccgaccttctgcacgcccacttctacgagtcctgcccctacctcaagttcgcccacttcaccgcaaatcaagccatcctcgaggctttcgccggctgccaccgcgtccacgtcgtcgacttcggcatcaagcaggggatgcaatggccagctctcctccaggccctcgcccttcgtcccggcggccccccatcgttccgcctcaccggcgtcggccccccgcagccggacgagaccgacgccttgcagcaggtgggttggaagcttgcccagttcgcgcacaccattcgcgtcgacttccagtaccggggactcgtcgccgccactctcgcggacttggagccgttcatgctgcagccggagggcgaggcggacgcgaacgaggagcctgaggtgatcgccgtcaactcggtgttcgagctgcaccggctgctcgcgcagcccggcgcgctggagaaggtcctgggcacggtgcacgcggtgcggccaaggatcgtcaccgtggtagagcaggaggccaaccacaactccggctcattcctcgaccggttcaccgagtcgctgcactactactccaccatgttcgattccctcgagggcggcagctccggccaggccgagctctctccgccggctgccgggggcggcggtggcacggaccaggtcatgtccgaggtgtacctcggccggcagatctgcaacgtcgtggcgtgcgagggcgcggagcgcacggagcgccacgagacgctggggcagtggcgcaaccgcctcggccgcgccggcttcgagcccgtgcacctgggctccaatgcctacaaacaggcgagcacgctcctcgcgcttttcgccggcggcgacggctaccgggtggaggagaaggagggctgcctcacgctgggctggcacacgcgcccgctcatcgccacctcggcatggcgcgtcgccgcggcgtgatcgcaaagtttttgggacgctgcaccacgtgtttgccgccgatcacggcgcgacccccccccccccccctctctctctccccggctcaccggcggcacaattgaagcttgacgtcaacgaacgctcaattgcagcgaccgatcgggcttacggttctcgccggcgtgaagagatcgacgactggactccgaccagaccgacggcttgttcgttctcctttcccaattaccccgttccttggtcctcctagcccatctattatgtttaaatgtcaattattatgtgtaatttctccaatcgctcatattaaataaggacgaaccgaactggatttcattagctccaatgagaattttgtatacaaggcaccgatctaaaaattgagctatatgttcatgagtttaaaaaaaaaaaaaccccaccc

SEQ ID NO: 3135 - DNA, 1566 bp, Oryza sativa
  Clone ID: PAT_MRT4530_22107C.1
atggcgacagccgggaaggtgatcaagtgcaaagcggcggtggcatgggaggccgggaagccgctgtcgatcgaggaggtggaggttgcgccgccgcaggccatggaggtccgcgtcaagatcctctacaccgccctctgccacaccgacgtctacttctgggaggccaaggggcaaacacctgttttccctaggatcttgggccatgaagctggaggcattgtggagagtgtgggagagggtgtgaccgaactcgcgccgggcgaccatgtcctcccggtgttcaccggcgagtgcaaggagtgtgatcactgcaaatcggaggagagcaacatgtgtgacctcctcaggatcaacgtcgaccgcggcgtcatgatcggcgacggcaagtcccgattcaccatcaaggggaagcccatcttccactttgttggcacatccaccttcagcgagtacaccgtcatccatgtcggctgcctcgcgaagatcaacccggaggcgcctctcgacaaggtctgcattctcagctgcggtttctctaccggttttggtgcaacagtgaatgtcgcgaaaccgaaaaagggccagaccgtggctattttcggtcttggagctgttggtcttgctgctatggaaggtgccaggctgtctggagcatcgaggatcattggtgtggacctgaaccctgcgaaattcgaacaagctaagaagtttggctgcactgacttcgtaaaccccaaggaccacagcaagccagtgcacgagggatggggcgttgcggtgctggtcggcgtgccgaccaaggatgatgtgttcaagacccacccgatgaacttcctcaacgagaagacgctcaaggggacgttcttcggtaactacaagccgcgcaccgacctgcccaacgtcgtcgagctgtacatgaagaaggagctggagctggagaagttcatcacgcacagcgtgccgttctcggagatcaacacggcgttcgatctcatgctcaagggggagagtctccgctgcgtcatgaggatggactgagtaaaaataatgatgatctatctctctctctctctctcggacagtttcagtgcatccaagaacccaaaaatgaaagcaaaaaatggatgagaagtttgaggttttccatttaagtttaataatggtcgtgagacagggcttgtgtggagtcagctctgtttactcccccctttcatggcttgatcttgtttattgtcagcattgtggcttagcaaattttcaccagttttaccctgtaaattagtaccattctgaaatcgtaataaactactagcagtgtgaggtactattgctggaacaaaaatgattgtgcagtccacccaagccaaaatccctcctccaaagaatctcactcactcactcaaatctcacagatcaaatcaaaaacggtgaggaggctagatgaaccatccccgtctatatatagctcctcctcctcgaaggaagaaaggagaggatggaggatggagggtgaggtttcgccacttccttcttcctgtcctcttgggtaagccaaccccggac

SEQ ID NO: 3136 - DNA, 2331 bp, Oryza sativa
  Clone ID: PAT_MRT4530_2230C.1
cgaccagatcgcgacaccgccaccgccgatccgaaggtcggcgacgacgaccaccaccgccgccgccctcgtcctcgccgccggcggccatggcgttcggcgaccgcatcaccaccttcgaggactccgagaaggagagcgagtacggctacgtccgcaaggtctctggacctgtggttgtggctgatggaatgggaggtgctgccatgtatgaactcgtccgtgttgggcacgataatcttattggagaaattattcgtcttgagggggattcagctacaattcaagtttatgaggaaactgctggactgatggttaacgaccctgttttgagaacacgaaaggttatgcctgcacagcccctgtcggttgagttgggacctggtattcttgggaacatttttgatgggatccagcgccctctgaaaactattgctattaaatctggagatgtgtacattccgcgtggtgtctcagttcctgcccttgacaaagatgctttgtggcattttaagccagaaaaactaggtgttggagatattatcacgggtggagatctatatgctattgtcaatgaaaatactttgatgcaacacaaggttgctcttccacctggcgctatggggaaaataagttacatcgccccagctggtcaatatagcctgcaggatacagtgctagaattggaatttcagggtatcaaaaaggaatttaccatgctccagacatggcctgtgcgttcaccaaggcctgttatggaaaaacttgctgcagatacacctcttcttacaggacagcgtgtacttgatgcattgttcccctcagttcttggaggaacatgtgccattcctggagcttttggttgtggaaagactgtcattagtcaggcactttccaagtattccaactcccaagctgtggtttatgtcggatgtggcgaaagaggaaatgagatggctgaggttctcatggactttccccaattgacaatgacgacagaggatggacgtgaagagtctgtgatgaagagaacaacactggtggctaacacatccaacatgcctgtcgctgctcgtgaagcttccatttatacaggaattacgatagctgagtattaccgtgacatgggttacaatgtcagcatgatggctgattccacctcacgatgggctgaggcattgcgtgaaatttctgggcgtttggctgaaatgcctgcagatagtggttaccctgcttatttggctgcaagactggcatctttctatgaacgtgctggtaaagtaaggtgtcttggaagtccaaaacgggacggaagtgttacaattgtaggggctgtctctccacctggtggtgatttttcagatcctgttacctctgcaacccttagtattgttcaggtcttctggggattagataaaaagcttgcccagaggaagcatttcccatcagtgaattggctcatatcttattcgaaatattctaagattccaactgcgcttgagccgcactatgagagggaagatccagatttcattgatattagaacaaaggcacgtgaggtgttgcagagggaagatgatttaaatgaaatagtgcagcttgttggtaaagacgcactggcagaatctgacaagattacactggagacagcaaaacttctgagagaagattatttggcacaaaatgcattcaccccatatgataagtattgcccattctacaaatctgtttggatgatgcgcaacattattcatttcaacacattggcaacccaggcggtggagcgggcagctggtgctgatggacagaagattacatacagtgtcataaagcatcgcatgggcgatctattctaccgcctagtgtcgcaaaaattcgaggatcccgcagagggcaaagaagttttgattgcgaaatttcagaagctgtacgatgaccttaccgccgggttccgcaatctagaagacgaagcacggtgaataattattgtagattctgtgtaaacaataaggatatatcaccaaatgttctataaaaaaaacatggaagcattccatttgctgctaccgaggctctaggtcgagatcatgtagaaattttcctgcaactatacgcgccgtcgtcgttttgtcaggttttgatcccaagtgctcgatggacacgccattatttctactctatgtatcatttatttatcatcttcattcacatcattgtaataaacatgggcatgtttatagtcgaataaatacgatgtccatctgtttaaaagtcaacgttgaaggtcaaaaaaacaaaaaaaaagaaacaacccctaaaaatacgaataaa

SEQ ID NO: 3137 - DNA, 1506 bp, Oryza sativa
  Clone ID: PAT_MRT4530_22368C.1
ggaacgcatacaagtacacggcacatcaaattatttattatggaggaatgccacagggtatccatcagaattttttttccgccgggccagcagcaaagaaatgccccgaccgaatttatccatcagaattttctcatttatatttcaggaagatgtcaatgcatcacagccgatggtccaaacgttccatcctagttagctaactgtatatattgacctatccgatattcccaacccatgactggagcaagcaagcagttcaactcagctaagcacgaagagggaggagctctcaagccagtatgctacctccctcttcgtgattcggggaatcagttccactatagaaggaggcctcacttgaggcgtccgaaccgccaccattagcctccttgtcagcggatacatgtgaatggtcctgaggcagggtgatgccgtttgatttgaatgaagaacccatcttaatgtcatcggctctcatacgctcagcatagctattgtattcgaaggtagctggattccttcctccgaatgctgagtcgagcttgtccaagtcaaagacgtcagccattatcttctggctctctttatcgctggagtacacaaatttcaccttcttgtaggtctcatggtccaaaaatggcttcactatctcaacattagggaggtaccaaaacaatacactagcaagtgtggttgaacggtaaaaatccttccagaaggactcaaatatcctaggaggattgtaaaggattgctaacccaagcctctcagggtaacagtcttgcaagacgttcacagtctctcgggtcactttcagcggtgtgctccccaatgtccaactctggaagtctgtcagccagaccatcttctcttgatcttccgtcaggctcataattgctttctccagacagtaaacaagatatttgatctgtccctttcctgaagtagtgttctctaagcctggcctcaggacaagaacagttcttccatgtttgtccttgtagtcagccctatatatctttcctgtctctgcttcatgtgcaacatcatcccagttaatcttttgtggcatatatgacacccgccactttacagctgacttcatcattttacttgctttctgcacgttccagtttcttgctcgaagaaatctcaggcacgaggcatctgaaaggaaatcttgtatttcttctgatgagtgttcaccaagctccttacgcaagtcatttatcttctcctgctgctcttctagggtcaagtttttctctgttgtagcaccattgcttgacttgaatagaaaggacattttagtacctcgacagagaagggtccactagatacggaactggatcgatgcacccccagcccccaacaaccggggaggctcgcggatcagggcccgccgcctgggcacgacggcgagggctggggtggggaggtggcgccggccgaggtgggagagtggtggtggtgggggtggggtgggcgtggggggggcgtgcc

SEQ ID NO: 3138 - DNA, 1732 bp, Oryza sativa
  Clone ID: PAT_MRT4530_22543C.1
caacgagtcaaatttgaaggcttcactgagcctttgacaatggcgccgcagctgccgctcgaggtggcctctgctcccaagctcgacgacgacggccacccacaacgcaccgggaatctatggacgtgcgtagcgcacattatcaccgcggtgatcgggtgcggcgtgctggcgctgtcgtggagcgtcgcgcagctcggctgggtggccggccccatcgccatggtgtgcttcgccttcgtcacctacatctcggccttcctgctgtcgcactgctacaggtctcctggctcggagaagatgcagaggaactactcctacatggacgccgtcagagttcacttagggaggaagcacacttggttatgtgggttgctgcagtacctgaacttgtacgggataggaattgcttacacaatcactacggcaacttgtatgagggcaattaagagggcgaactgctaccacagcgaaggccgtgacgctccctgcgactcgaacggtgaacacttctacatgctgctcttcggagcagcccagctgctgctgtccttcatacccaatttccacaagatggcgtggctgtccgtcgtcgcggcgatcatgtccttcgcctactccaccatcggcctcggcctcggcctcgccaagaccattggtgatggaactgtcaaagggaacattgccggtgttgcgatggccaccccaatgcagaaagtttggcgagtggctcaagcaattggcgacatcgcattcgcctacccgtacaccatcgttctcctggagatacaggacacgctgagatcgccaccgccggagagcgagacgatgcagaagggcaacgtgatcgcggtcctcgccaccaccttcttctacctctgcgtcggctgcttcggctactccgccttcggcaacgccgcgccgggcaacctcctcaccggcttcggcttctacgagccctactggctcatagacttcgccaatgcctgcatcgtgctccacctcctcggcggctaccagatgtttagccagcagatattcacgttcgccgaccggtgcttcgcggcgagcttcccgaacagcgcgttcgtgaacaggtcgtactccgtcaagatcctcccgtggcggcgcggcggcggcggcggcggcgcggggaggtacgaggtgaacctgcagcgggtgtgcttcaggacggtgtacgtggcgagcacgacggggctggcgctggtgttcccctacttcaacgaggtgctgggcgtgctcggcgcgctcgtgttctggccgctcgccatctacctccccgtcgagatgtactgcgtgcagcggcggatctcgccgtggacgccgcggtgggccgcgctgcaggcgttcagcgtcgtctgcttcgtcgtcggcacgttcgcgttcgtcggctcggtggaaggcgtcatcagaaagaggcttggctagctagctagctagtagcgagtaatttagcctggtcatcgagaacgaaatgtaaagctagctcagtgtgccatttcatctgaagtaaaaaggcgcggtgaactgtacaatacatatgcagaaaaaatgataaacataagatgttggttattttcagtgcctttcctcctgtgctgcagagaaactgctcctatatatgtacagaatgtcgtcatattattgccatgatacttggaacggtgaaaggaacctgctcttgaatgatgtataaaaaaaaaaaaaaaaa

SEQ ID NO: 3139 - DNA, 1966 bp, Oryza sativa
  unsure (1)..(1966): unsure at all n locations
  Clone ID: PAT_MRT4530_22702C.1
atgggaagctccgtcaaggacgccggcggcggcaaggaggagcagcagcagcagctggagagcccgctgctggaggcggcggtgtcgtcgggcggcggcgatggcgggggagggcacggggtgagcggggagctggagagcatcctgggcgacgagacggtgccgtgggcgcggcggatgtgggcggcgacgggggtggagatgcggctgatgctgcggttggcggcgccggccgtgctggtgtacatgatcaactacctcatgtccatgtccacgcagatcttctccggccacctcggcacgctcgagctcgccgccgcctccctcggcaacaccggcatccaggtcttcgcctacggcctcatggtgtttagctggctgctggcatggcatgcaatgcatgggctgctggctaatgggagctacgttgtgcaaatgcagctagggatggggagcgcggtggagacgctgtgcgggcaggcgtacggcgcgcacaagtacgacatgctcggcgtctatctgcagcgatccaccgtgctgctgatggccaccggcgtcccgctcgccgtcatctacgccttctcccgccccatccttgtcctcctcggcgagtccccggagatcgccagcgccgccgccgtcttcgtctacggcctcgtcccgcagatcttcgcctacgccgccaacttccccatccagaagttcatgcaggcgcagagcatcatggcacccagcgcctacatctccgccgccacgctcgccttccacctcgtcctcagctacctcgtcgtctaccagttcggtcttggccttcttggcgcctcgctaatgctcagcatcagctggtgggtcatcgtcgtcgcgcagttcatctacatcgtcaccagccgccggtgcaggctcacttggaccggcttctccatgctggccttctccggcttgcccgacttcttcaagctgtccctcgcctccgccgtcatgctctgcctcgagacctggtacttccagatcctcgtcctcatcgccggcctcctcaaggaccctgagatggcacttgcctcgctctctgtctgcatgacaatttctggatgggtgttcatgatctcagtcggattcaacgcagcagccagcgtgagggtgagcaatgagctcggtgctgggaaccccaagtcggcggcattctcggtggtggtggtgacggtgctgtcgttctttctgtcggtggtaatctcgcttgtcatcctgctgtgccgggactacatcagctacatcttcaccgacggcgaggacgtggcgacggcggtgtccaagctcacgccgctgctggcgctcaccctcatcctcaacggcatccagcccgtcctgtcaggtgtggccgtgggctgcggatggcaagcgttcgtggcctacgtcaacgtaggctgctactacatcgtcggtatccccctcggctgcctcctcggcttctacttcgacctcggcgctgcgggtatttggagcggtatgataggaggtacactgatgcagaccttgatccttatgtgggtcaccttcaggaccaactggaacagagaggtggaagaagccatgaaaaggttgaacaagtgggaagataagacacctctgttgtcagaataagaacaaaacaaaagaaaaggctattgtggttattacactgagagcctacatgcctagaagaaatgggattatgtgggaagttcataaaaggagatttttcatcgtggaattcatcattgagccacaatgctctgttacttctcgtttctactagcgtactagtattatttcgtttttgatgatcctgttttacagttatgatgatggagataatttgatcatttattgaactacacgtgaattattggttatttctcataagcttaaatttttgggggtgaaaaaaaaaaaaaaaaaaaaaaanaaaaataaaaaaaaaaaaacacac

SEQ ID NO: 3140 - DNA, 3752 bp, Oryza sativa
  Clone ID: PAT_MRT4530_23251C.1
tttttgtgtgtgtgtttttgacgagcaacctaggcggattttgattttgcgccaaagaaaattcaacatttatatatgtacatacacagctcttactgcgacgcgacgggaaaaacaaacagggagacgaagaaagctgcgaaaaaagaaagaagaaaagatctactcctataggtacataacaacttcgactgatcaacctacagctggaaaattcttatcttgtagcaccatcagaagcgattgctaagcttgtgtggagagttcaaaatggcatccatctgattctgaatgactgttgtttctacgggcatttcgccgccgactggcctcgttggtggcactcaccgccggctgtttctcctgtgtgtcggtggttgttgtttctaatccttctcctccttggcttccctgaggggcatgtcaaggaccccatagcctccctcatcgatcgagcccgctgccgccgacgaggtcttcgagtcgaccgtcgacccagcttggatctccttgaacattgccatcaccttcagcatcgtcggccgcctcgacggccggtcatccaagcacgcacaggcgattttcaaatgctccagcagctcaagctcgacggatggatcctccttgagtagctcagggtcgaagacatccgtgatcttcaatttggtgtgctgcttgacccaccccacaaggttattgtcctcgccaaagtctgccgagtccgtcggcggtttcccggtgagcagctccagcaacacaacaccatagctataaacatcacccttggtggtgcatctgaagctctggtagtactccggtggtacataccctggcgttccagcaagagtggacacgctaaggtgtgtatccaccacgctcatcagcctcgccataccgaaatcagatacccttgcttccagttgttcatcgataagcacattgctcgacttcatgtctcggtgaatgatgtgaggaatgcaattgtggtggaggaatgccaaaccccttgctgctccaacagcgattttccgtcttgcctcccaattcagctttttaccgatctttttgcggtcatgcaacacatcctccaagctgccaaacttcatgtaatcatacaccaacaaccgctcctcaccagccttgcaatagccaagaagtggaacaaggttacggtgtttgatcttgccaatggtctccatttctgcagtgaactcccggtcaccctgcccgctcacatgtattagcttcttgattgcaacaaccttcccatccttgagctgtgccttgtagacatcaccaaacccaccagacccaatttggcatgcgatgtggaagccatttgtggcctcaacaagatcagccagggtgagattctgcaatggcttctcgaatgcagccaggttgatgctaagaagatttgtaccggagagattttgcctccaatcagaattcatagttgcagaatgtgacctgctatcaatatatatatcacgagaggtactcgcctcctcattcttcagcctccgccgcttgctcccaatggctatgatgatcacaattatacagaacagtgagaataacagtcccatagcgatactgcttgccatcgatgcctgcctccggtgggattggtggtcattggaagatcttggggaactatggtcacatggtggcagtgggaagccacataaaccagtgttattctcatactggctcttcggaaatgtggcaagggaaccaagctctggaattgttccattcagctgattatttgacagattgatctccgacaaggaaagtgccgagaaagagttgggtattggcccttccaactggttatacgacaggtcaagcaccgcaagcttcttggcctctgctagccgcgatgggatggtacctgacagtaggttgtgcccaagattcatgatcatgaggtagaacatgtcccccagctcgccaggaatcgccgagtccagctgattatatgacaaatcgagaaatatcatcgaaccattcttgttgaaggtgtactccgtgctccccacatacattcttgtgaagttgcacagcttcttgctcggcatccgactgaggtcatcaggtcggatgctggtaaactccagcaagctccccttgccacggcactcgctgctcagctcgtcgttgcgaagataaacgtaaggccgtccaactatgaggccaacattcatcttcccagactgtttggccagctctttgggtattgatccattcagctgattgctattcaggtccagccacaccaagctctggcagtcaccgagctctggcggtataggccccgagaaggaattgttgctgagcttcaagatagccaagtagctgagcttcccaagccatgaagggattggcccggacagccggttgctcgccaaagaaatccagttcagcttggtgcacttggctagctccggcgggatgctacccgtgagcccgttgtagtcgaggatgagatgctcgaggccctgaatgcgcgacagggacgccggtatctcgccctccagctcgttctgccacaggatgaggtcctgcaggttgccaaggtcgccgagggatgccgggatggacccattgatgtagttgaggctgaggtcgagggagacgaggctggtgcagttggagacggcgtctgggatgccgccggtgaggtagttgttctgaaggtacagcagatggagcttggagttgggatcttggcagagggacgacgggatggtgccggagaaggtgttggagctgaggtcgagctgctggagctccggcagcgaggctacggtgtccgggatggagccgttgaagtggttgaaggagagggagagcgccgtaagctgctgcagctttgcgaaagcctcgccggggagctcgccggagaagttgttgttggagaggttgagggcgttgagcgacgtgaggccggcgatgtccggagggaacacgccggcgaggtggttgaaggagaggttgagcactttcagaccgcggcagtcggaaagtgccccgccgggcacctcaccgacgatgaggttgccggagaggtcaaggtactgaagcccggagcagttggtgaactccgggacaccggagatcctgttcagggcaaggtccaaccaccgtactgccccgactccggcatccaccatccaccggaggtcgctatcgtcggtgatcttgttgttggacaaatcaagcgagtccagcccggcaaagcccgggccaccaccgccaccgaccttcgccgcaccaaccgcatcgccggagagattcagcgtcttgaggccgccgcaggcgctggccagggccgccacgtcggcgacggagccccggagcgcggcattcccggacaaatcgagcgcctgcagcttgctcccgcacctcgcgccgccagccgccgagagcgcgccgctgacgttggcgccgcggaggctcagcacctcgacgctgccgagctgcagcagggtggccgcgacggcgcggaactcggcattgagcggcacgccggcgagcgacagcgacgtgagcctcccgttccggcacccggcccccgggaacctgcacgcgccgtcgccgccgctccaccccttgagcgccgcctggttcggcaccgcctgcctgaactcctcgagcagctgggcgtcgtcggccgccgccgcccccctcaccaccaccgccgccgccacaaacagtgccgctatcgctgcccacaaggaatccat

SEQ ID NO: 3141 - DNA, 1047 bp, Oryza sativa
  Clone ID: PAT_MRT4530_23285C.1
tggcacggcgcgcggcttcttccctggatccaaatcgaaaatttctctccccctgttcacaccacgcctcactcccatggcgaccgaggaggacgcgtcgaccatggcggcggccgaggcggaccccaagcccgccgccaccccgtcttacccggagatgatactggcggcgatcgaggcgctggacgacaggaacgggtcgaacaagacggcgatctcgcagcacatcgaggggaagtacgaggggctcctcccccccgcgcacccgtcgctcctcacagcgcacctcgcccgcatgaagcagaccggcgagctcgccttctccaagaacaactacttccgcggcgacgacccgtccctcccgcccaagcgcggccgcgggcaggccgcccaagcccaaggacgccgccgccgccgccgcccgcaccggcgcccgcgcccgcggcgccggcggcctcctcgccgcgcccccgtggccgcccgcctaagcccaaggaccccctcgccgaggcggtcgcgaaggccaccagtggcatgccccgcgcgcgcggccgcccgcccaagaaggccaaggtcgaacaggaagaccccattggcgctcccgccgcagcttcggctcccgccgcggcggctgaggccgcgccgcctgtcaagcgcggccgtgggcgcccgcccaaggtgagacccgccgcgccggtcggggagccagccgctgcttgattagctccgattctccgcatcgccgcgatggcgacgatggtaagctcctttaggttgtaacgtagtcttcagattatgtctcgtactgattggaggcgcggctcgggttgctgcttattgtaagttaatcggatggtgggaggtttaggtgtgctggatggatcatccgttgctgagagttgtgattgaattcgtgttatcgcgtgctgattattatggtaatgttggtgactttcgtgtcgtttgtgttaattctagattggtggctgcatttagtgttaaaaaaaaaaaaaaaaaaaaaaaaaaaaaaaagggggggcctcgtgc

SEQ ID NO: 3142 - DNA, 990 bp, Oryza sativa
  Clone ID: PAT_MRT4530_23712C.1
atggatcccggggcgggaggccccctgacggagagcgagaaggccgacctggacgccatcgccgccatcaaggagtcggcggcggcagagtacaaggagaagggcaaccggctcgtcaagatgggccggagccactacgccgacgccgtcgactgctacaccaaggccattgcccagatggagccgctgccgccgccgccggtgccatcccccgacgcctccgtcctcttcgccaaccgcgcccacgtcaacctcctcctcggcaaccaccgccgcgccctcgacgacgccgcccgtgccgtccagctctctccctccaacgtcaaggcgtactaccgggcggcgaaagcggcgattgctctcggcttgctgccggaggcggcggccttctgccggcgggggatcgagcaggaccctgctaatgaggagctcaagaaattgctcgcacaagtggacgcccaacagagtgagcaagatcgtcatagggccaaggttgcgcaggccgtgtccgctgcgaaggatattgttgccgctatagagaagagggggttgaagcttgggaaggcagcatatcaagagcttaccggtgtaaagaagccgaagttggatgagcagggtgtgcttcactggccagttcttctgctctacccggaggctggcgttggcacagttctgtccaaaagtgaaatattgaaaattcttttggaaggcactatggactcaaagtcacttcctgaaagcctgcttgatgaggaagatggagaaaatgatgatggcaagagcagcacaattacatcatcagataagggttctgtgaagtggatcaatgtaaaagagggaaaaactcttcaagaagtgctgcagcataaagacttcatcatccctgcaattcctggtctgcactatctcctccttggatacagctacaagcacgcatcatgcatgcagattggagtgccaagaactcaaacctgtgccacggtgatctga

SEQ ID NO: 3143 - DNA, 3534 bp, Oryza sativa
  Clone ID: PAT_MRT4530_23714C.1
tggacgcgtgggcggacgcgtgggcggacgcgtgggcggacgcgtgggctctcgccgtcgcagatccgatccaggaagagctcgccgccgccgctgccatggcgctctccgtggagaagacctcgtcggggagggagtacaaggtgaaggacctctcccaggcggacttcggccgcctcgagatcgagctcgccgaggtcgagatgccggggctcatggcgtgccgcgccgagttcggcccctcccagccgttcaagggcgcccggatctccgggtccctccacatgaccatccagaccgccgtcctcatcgagaccctcaccgcccttggcgccgaggtccgctggtgctcctgcaacatcttctccacgcaggaccacgccgccgccgccatcggcagggactccgccgccgtgttcgcctggaagggggagaccttcgaggagtactggtggtgcaccgagcgctgcctcgactggggcgtcggcggcggccccgacctcatcgtcgacgacggcggcgacgccacgctgctcatccacgagggcgtcaaggccgaggaggagttcgagaagtcaggcaaggtccccgacccggagtccaccgacaacgccgagttcaagatcgtgctcaccatcatccgcgacggcctcaagtccgaccccagcaagtaccgcaagatgaaggagaggctcgtcggagtctccgaggagaccaccaccggtgtcaagaggctctaccagatgcaggagaccggcgccctcctcttccccgccatcaacgtcaacgactccgtcaccaagagcaagtttgacaacctgtatggttgccgccactctctccctgatggtctcatgagggctaccgatgttatgatcgctggcaaggttgccgtggtctgcggttatggtgatgttggcaagggctgtgctgctgctctcaagcaggctggtgcccgtgtcattgttactgagattgaccccatctgtgccctccaggcccttatggagggtctccaggtcctcaccttggaggatgttgtctcggaggctgacatctttgtgaccaccactggcaacaaggacatcataatggttgaccacatgaggaagatgaagaacaatgccatcgtttgcaacattggtcactttgacaatgagattgacatgctcggccttgagacctaccctggtgtcaagcgcatcaccatcaagcctcagaccgaccgctgggtcttccctgagaccaacactggcatcattgtccttgctgagggtcgtctcatgaaccttgggtgcgctactggccaccccagttttgtcatgtcctgctcattcactaaccaggtcattgctcagcttgagctgtggaaggagaagagcactggcaagtacgagaagaaggtgtacgttcttcccaagcacctcgacgagaaggtggccgccctccacttgggcaagcttggtgccaggctgaccaagctctccaagtcgcaggctgactacatcagcgttccagttgagggtccctacaagcccgcgcactaccggtactaggctgcccagcacgactagcggctgtggcatgagaagtgtcaacttgaagttcgccatgacgactctggagtatcctgctttgttttcatcatcttatatgccgtcacttaggaggatttgttgtggggtttatggtttgagactggtgaaggggaggaatgggaagccgtttgcttttgcccagaaataatggcgtaattgggtggagttggggaggtgtgctttggcagatacagttttgtcttgttgactctacttatctgatatcatttgcaagcgttttgataaaaatcatgcgtcatttatgaataatattcttgcctttaaagataaaaaaaaaaaaaaaaaaaaaaaaaaaaacaataacaccggtctaccacgtgccgctagtctcatcccgcggcgcggcgctgggcgggggagaagaccagagcggcgaggaaggaggcggcgcccagcggggagagcgagcggctcgacgccgacggccatggcgctgctgatggatcccggggcgggaggccccctgacggagagcgagaaggccgacctggacgccatcgccgccatcaaggagtcggcggcggcagagtacaaggagaagggcaaccggctcgtcaagatgggccggagccactacgccgacgccgtcgactgctacaccaaggccattgcccagatggagccgctgccgccgccgccggtgccatcccccgacgcctccgtcctcttcgccaaccgcgcccacgtcaacctcctcctcggcaaccaccgccgcgccctcgacgacgccgcccgtgccgtccagctctctccctccaacgtcaaggcgtactaccgggcggcgaaagcggcgattgctctcggcttgctgccggaggcggcggccttctgccggcgggggatcgagcaggaccctgctaatgaggagctcaagaaattgctcgcacaagtggacgcccaacagagtgagcaagatcgtcatagggccaaggttgcgcaggccgtgtccgctgcgaaggatattgttgccgctatagagaagagggggttgaagcttgggaaggcagcatatcaagagcttaccggtgtaaagaagccgaagttggatgagcagggtgtgcttcactggccagttcttctgctctacccggaggtcatgtcgagtgacttcatcgaggattttccggagacagatactttcgtgccccaccttgatgtcatgttctcagaaagttctccaccattaccatgggatgataaacacgcttacacacgggatgctgttgagttatattatcaggctggcgttggcacagttctgtccaaaagtgaaatattgaaaattcttttggaaggcactatggactcaaagtcacttcctgaaagcctgcttgatgaggaagatggagaaaatgatgatggcaagagcagcacaattacatcatcagataagggttctgtgaagtggatcaatgtaaaagagggaaaaactcttcaagaagtgctgcagcataaagacttcatcatccctgcaattcctgtgttctttgttgtttcaagaaaatccaccttttacagaaagttcaaggcaggaaactggtctttgccgtaatgcttagcgtgattcagtttggcacatttggaagatgattagtgcggtacgcgtatgatcagagaagaaaagctggccacctagtcattcttgtatggttttatatgttgctttatagaatgatgaggtgtgttctttcctgtatttggtacaattctcaagtattttcctatcctttgcttgagatgctcagtatgccgtttctggagaaacacactgagaatgtacttatgtatggacagctttgggcctgatttagcgcttggcacagtgatggtatcttgtacgccatatctaccaaccaattttagcaccaaacctttcttgtcaaataccttgtgtgaactgtaagattcaacctcc

SEQ ID NO: 3144 - DNA, 2496 bp, Oryza sativa
  Clone ID: PAT_MRT4530_23715C.1
atgcctcctcttctgtataacctcttcgtgctcatcgtcgtcttcctcggcggcggtgctccggcgtgttcagccgcgacggacaccgtcaagcctggccatgtcgtcggcggcaaggacaaggtcgtctccaacaacggcaagttcgcgctcggcttcttcaaagccccggctccaaaccaagagaaatggttcctgggcatatggttcaacacggtgcccaaccgcaccacggtatgggtagccaacggcggagagccaatcatggacgccgccgacgccggctcgccggagctcaccatctccggcgacgacggcgacctggttgccttacacccaaccaccaagtcaatagcctggtcaaccaacgtttcagccaagaactccaccagcaacagcaacaacactgcagccgtccttctgaacagtggaaacctcgtactgcaagacacctcgaacatgtcccaacctcgtacgctgtggcagagcgtcgaccacccgaccgacacgctcctccccggcgcgaagctcggccgcgacaagctcaccggcctgaaccgccgtctcgtctccaagaagagcatggccggcccgtcccccggagcctactgcttcgaggtagacgaagacacgcctcagctcgtgctcaagctctgcaattcgtctgtcacctactggtccagtggaccatggaatggtcagtacttcactggcatccctgagctgatcggcaattcacctggctttcaccttgggttcttcgacaacagcagagaggaatatctccagttcaatgtgtcaaatgaagctgtggtgacacgcaacttcatcgacgtcgatggccggaacaagcagcaggtttggctggacagctcgcagtcttggctgacgctgtactccaatccgaaggttcagtgtgatgtgtacggtgtatgtggggctttctcggtctgcagtttcagtttgcttccactctgcagctgcatgaagggattcactgttggatcagtgaaggattgggagcaaggcgatcaaactggtggatgtgtgagaaagaatcagttggattgtgtaggtagcaacacgagttcatcagattcaactgataagttctactccatgtctgatatcatcttgcctgacaaagctgaaagcatgcaggatgttgacagttcagatgaatgcatgaaggtttgtctgaataattgctcttgcactgcttattcatatggcagtaaaggttgccttgtttggcacactgaattgctcaatgcaaaactgcagcagcagaattccaatggagaaatcatgtatctccgtctctcagcaagagatatgcagagaagcaagaaacgtagagtgataatcggtgtcgtcgttggtgcatgcgctgctggtttggctgtgctgatgttcattttgatgttcatcatcaggaggaacaaagacaagaacaggagtgaaaattatggtagcctcgtggctttcaggtacaaagatttgcgttctgcaaccaaaaacttttctgaaaagattggcgaaggcggattcggctccgtcttcaggggacaactgcgtgattctaccggcatagctgtgaaaagactcgacggtagatcacaaggagataagcaattcagagctgaagtgagatcgatcggaaccattcaacacatcaacttggttaatctgattggcttctgcagtgacggcgacagtaggtttcttgtctacgaacacatgccaaatcgatctcttgacacacatctgtttcaaagcaatggcaagttcttggactggaacactcgctaccagatagctcttggagttgccagaggcttgtgctacttgcacgagagctgccatgatcgaatcatccactgcgacatcaaaccgcaaaacatactactcgacgcatcgtttcttcccaaggtcgcggattttgggatggcaaagtttgtagggagagatttcagcagagcactcaccaccatgagaggaaccataggttatcttgcgcctgaatggattagtggaacagcaattacaccgaaagtagatgtttacagctatggaatggtgctgcttgagctagtgtcaggcaggaggaactcagccagatcagaagaagaatgcactactactaccactacttctacatccactgacactgatggcaactattctgtctacttccctgtgcaagcttcaaggaagcttctagatggagatgtgatgagcttgctggaccagaagctgtgtggtgaagcggacttgaaggaggttgagagagtgtgcaagatcggttgctggtgcattcaagaggatgaggttgatcggccgacgatgggtcaagtggtccagattcttgagggtgtcttggactgcgacatgcctccgttgccgaggttgcttcagagaatctttgagaggccgtcttcagttagcaccagcacaccagttttcctttttgtcggtagccctgaacgccaatga

SEQ ID NO: 3145 - DNA, 1444 bp, Oryza sativa
  Clone ID: PAT_MRT4530_23844C.1
cccccgctcccatcctcttccactctctcctctccccttcgtggcggcggcggcggcggcggcggcgtgacgaggaggagcaatggcgatggcctcctccgcctacgccccagcgggcggcgttggcacccactccgcgccgggcaggatcaggccgccgcgcggcctcggcttctccaccaccaccaccaagtcgaggcccctcgtgctcaccaggcgtgggggaggcggcggcaacatctccgtggctcggctgaggtgcgcggcgtcgtcgtcgtcggcggcggcgaggccgatgtcgcagccgcggttcatccagcacaagaaggaggcgttctggttctaccgcttcctctccatcgtctacgaccacgtcatcaacccgggccactggacggaggacatgcgggacgacgccctcgagcccgccgacctctacagccgcaagctcagggtcgtcgacgtcggcggcgggacggggttcaccacgctcgggatcgtcaagcgcgtcgacccggagaacgtcacgctgctcgaccagtccccgcaccagctcgagaaggcccgggagaaggaggccctcaagggcgtcaccatcatggagggcgacgccgaggacctccccttccccaccgacaccttcgaccgctacgtctccgccggcagcatcgagtattggcccgatccgcagcgaggaatcaaggaagcttacagggttttgaggcttggtggagtggcttgcatgattggccccgtgcacccaaccttctggctgtctcgctttttcgctgacatgtggatgctcttcccgaaggaagaggagtatattgagtggttcaaaaaggcagggttcaaggatgtcaagctcaaaaggattggaccaaaatggtaccgtggtgtccgaaggcatggcctgattatgggatgctctgtgacgggcgtcaaaagagaacatggagactcccctttgcagcttggtccaaaggttgaggatgtcagcaaacctgtgaatcctatcaccttcctcttccgcttcctcatgggaacaatatgtgctgcatactatgttctggtgcctatctacatgtggataaaggaccagattgtgcccaaaggcatgccgatctaagggagatgaactgagctgcaagagaggatagccaatatctgaattaggcttctctatattaggcactttctgtcagttctgtatttacttctgttgtccctgttgttatgtacttcttttactgtggttcttgtttgtggggaaataatattatgagaccttgattaagctcatccgaactcctgagcatggaatggatcgtgtgtagcataattagaatggacatgtgacatttctgcattccaagtattctgaatggtagacaaacaaataatatctgaaaaaaaaaaacaaaaaaaaaaaaaaaaaaaaaaa

SEQ ID NO: 3146 - DNA, 2547 bp, Oryza sativa
  Clone ID: PAT_MRT4530_24032C.1
ccccgtccccgcctcggtccccgtccacgaccccccctgcccccccgccccccgccgcctctcccgcctcccccgccgctccacgccgccccagcgcctcggcagcgggctccgcacaacccaacctgcttctgtagtcatccacgtgttcctcttctccagtactagtagctgctaattgccaaagcagccacatggattgacatagcttctcattggagaagaagatccaagaagaaggccaaagcggctaagctttggccaaagcagccttctcttcttctctagtgggaaagtgagataagaagcagccatcagaagagcactcccttgttttttgaccaaaactttgctgctcactgtcctagctggagagaatccagcgatacacgcatgtcttcttcttcagctcggtcttggttgccgacctcatttgcagatttctgcacatgaggggtctctctctcgaagtctcgtgttttgatttgggcaggtagccagccactgtgagagtgtgagctgaggtgagcatcgccatgggagaggttgcagaagacatctacacccaagatggcaccgtggacgtcaagggcaacccggccaccaagaagaacaccggcaactggcgtgcctgcccctacatcctcgctaacgagtgctgcgagaggctggcctactatggcatgagcaccaacctcgtgaactacatgaagacgcggctcgggcaggagagcgccattgccgccaacaatgtcaccaactggtcggggacttgctacatcaccccccttctcggtgccttcttggctgatgcctacatgggcaggttctggaccattgccagcttcatgatcatctacatcctgggtttggcgttgctgacaatggcgtcgtcggtgaaggggctggtgccggcgtgcgacggaggagcgtgtcacccgacggaggcgcagacgggggtggtgttcttggcgctgtacctgatagcgctgggcaccggcgggatcaagccgtgcgtgtcgtcgtttggcgcggaccagttcgacgagaacgacgagggggagaagcggagcaagagcagcttcttcaactggttctacttctccatcaacatcggcgcgctggtggcgtcgtcggtgctggtgtacgtgcagacgcacgtcgggtgggggtgggggttcggcatcccggccgtcgtcatggccgtcgccgtcgccagcttcttcgtcggcacgccgctgtacaggcaccagcggcccgggggcagcccgctgacgaggatcgcgcaggtgctcgtcgcgtcggcgaggaagtggggcgtcgaggtccccgccgacgggtcgcggctgcacgagacgctcgacagggagtccggcatcgagggcagccgcaagctggagcacaccgggcagttcgcgtgcctcgacagggcggcggtggagacgccggaggacaggtcggcggcgaacgcgtcggcgtggcggctgtgcacggtgacgcaggtggaggagctgaagagcgtggtgcggctgctgccgatctgggcgagcgggatcgtgttcgcgacggtgtacgggcagatgagcaccatgttcgtcctccaggggaacacgctcgacgccagcatggggccgcacttctccatcccggcggcgtcgctctccatcttcgacaccctcagcgtcatcgtctgggtgccggtgtacgaccgcctcatcgtgccggcggtgcgcgccgtgacggggcgcccacgcgggttcacccagctgcagcggatgggcatcggcctcgtcatctccgtcttctccatgctcgccgccggcgtgctcgacgtcgtcaggctgcgcgccatcgctcgccacgggctctacggcgacaaggacgtcgtgcccatctccatcttctggcaggtgccgcagtacttcatcatcggcgccgccgaggtgttcacgttcgtcgggcagctggagttcttctacgaccaggctcccgacgccatgcgcagcatgtgctcggcgctgtcgctcaccaccgtcgcgctaggcaactacctcagcacgctgctcgtgaccatcgttacccatgtcaccacccggaacggcgccgtcgggtggatcccggacaacctcaaccgcggccacctcgactacttcttctggctgctcgccgtgctcagcctcatcaacttcggcgtctacctcgtcatcgccagctggtacacctacaagaagacggcggattcaccggacgacaaggccgagcacgccggagcaaactgagccacgaggtgaagctgattatgacatacaagggggaattgaactgaattgtggcgtgtgaatgtcagaatgtgtggggttctaaacaagttcttgggagataaaatggaaaggaaattagtgtcgtttgtgaccttcaaaaaaaaaaaaaaaaaaaatgcattatgtctggtaggaaaaaatgaagaagaataggaggatatagtagtttaaaaatataaatgtgatgtttagttttctagaaaaaaaatgaaaaaagttgttcaag

SEQ ID NO: 3147 - DNA, 5400 bp, Oryza sativa
  Clone ID: PAT_MRT4530_24184C.1
atggggactggaagccgggccgtcgtcggcgccgccgctggcctcggcagcgccgtcctggggcctccgtcaagccttcctccacggagacgcgcaccggtattccgccggagctgtaggaccggtgcctcaactgcttgtcgtcggcgcaccagattgcgacctgccgtctcccgtgcgtcgccgattcgctcagaggacgagtcgctttgtgtggtcgagcgctcgccgcagctcatagaggaggagggccggctccggcgtgctctcttcgcccgggtgagcggcctggacatggcgctgtcggccggcgatgccgccgcggcgctgtcggctgctcttcacctccccgcaggccgcttctccgtccactgcgcgcagcccgatcacttcctcatcgtcttcgctaactccggtgacatggacctcgcgctctcgcgttccccgatcccggctcccccctaccagctgattctacgaccatggacccggcttgtgatggctacctccttctccatgccgttcagggtgtcgctggacctcgagggtgtaccggcacacgcctggaacgcgtccacggcggcggccctcgtcgctcccggtcgtctcatctctgtggacaccccggcgcgccccgacgagtaccggtttcttcgagtcaccatctcgtcgcacaacccggccgccattcccaaggctcgtcttcttctcattcccgagccgacgttgggctcccagtgccttctccggtatcgggtccttctccacgtgctctcggtggtctgcctctcggccccctcggcgtctggcgatgtcgacccggccggtggcggtggtgctagcggtgagggtggtggcgctgcgaacgatggtggtggcgctgcgaacgatggtggtggcgacctcggcgctcgttcttcgcgagcccatgcggccacctcattttctccgttggccgacgacggacggggcttgctgctggcgttgccggacgccacgaattcgccagctgctgcagacgccatcacggcctctccggtcgacgtcgtcccgccggtcgacgcgggctcgccagctgccgatgtggccaccacgtgctctccggtagccgctggcatgccggccgccgccgtggccgctgctggctcgacggctcctgctgtggtcgccccggactcgccagttgctgccgtggctgtcttcagctcgccaactgtagtggctgcctccagctcgccagctgcttcgccggttgacatcgtggccgcctcttcttcgccggctgccgccgtggccgccttcggctcgccgactgtcgtggttgcctccaactcactggttgcgggttcactagccgccgtcgtctctccggtctgcgccacttcaccggttgctgcctgccacccgccgaccgcatcttccttgctgtctggcccttcgggtggcggcccggcgttccctgcctcgccgctgtgctcgcgacgttcgccgttgttggccgatgggatcgcggcctcctacgccgagccgactggtctcttcttcgacgagctcgacgccctggccgcggagtttggtccggctgtgcctttgccgcccagggtatcgcctgtgccgccgtccgcctccggtgcaggcacttctctgccgaggactgcctgcacaccgcctactggtggggagtggctgaggcctgagtcgccgctttctcagcaggctccaactttggtggttgatgtgcccgacggcgtcctctacgatgtgccgatggttgtccttgacctcgatggccgcccactggcgcactcgcttccatcttctgtggcagacaacgccgctcttcacgccttcctcaccagctgctccaggcctctccctcctgcgctcctcccgccgcctttgccgctgccgcctctcgccgccaaggcggtggaggttgtgccgaagcgcagtgagtgtatcgctgctaagatggcacttgaggcgcttgaggggccgatccacgcagtgtcgcgcgcccagcgcaacctgatgcggaagctcggcctagttccggagaggggcccggtcacggccgaggcggtcgcggcttacaacgccctcttctccaagccactttcccaggagcacatcatcgcgctctcctcgctcttctccagctccttgcccccggccaaggctgcggaggagttggtcgagactattatggatgtaatcccctctcgtactattctggaaatgctaggcctcgactttgattattctttcttgcctgcggtcggtcggagtgggggggtgttgcttgcctcgcggacgaccgtctggtctgtctcagatgttcaccttgcggatttctctcttgcctcgttggttcgacactcttctgatgtcgccccctggtggctctccgtcgtctatgggccacaggaggagccggacaagcttcgtttcttagatgagcttcgttcgctgcgctcctctcgcacggggccgtgggccatcgtaggcgatttcaacctcattctcgaagatcaggataaaaacaaccttaatctcaatcgtcgtatgatgggtcgttttcgtcggctcgtcgacgagttggaactccgggagctgccgcttcacggacgtcgcttcacttggagcaatgagcgtgagtcgcccacgcttgttaagctcgaccgcgtcctcttctctgcggattgggaggagcttttcccctcttgcctcctccaagcggcctcttctatcgcctctgatcactgtgctcttctccttcatacctgcgtcacctccccgaaagcgcatcgttttcgttttgaggccttttggcccaagttcgacggctttcttcaagtcgtgcaggacgcctggcatccccctgccaacctaccccctcttgccgctcttgcctggtgcttctctaccacggccaagcgcttacagagctggagtgaccgtcacattggcagtgttcgtctgcagcttcagatggcgaaggaacttgtcttccggcttgatgttgcgcaggagagtcggtctctttcccccttggagacctggctgcggcgagatttaaagttgaagtgtattggtcttgcctcgcttgagcgtactatcgcgcgtcagcgttcgcgtttggtctggcttaaggagggtgacaccaataccaagttcttccacctgcacgccagagctcgtaggcggaagaacttcatcacgtgcctttgtgatggtgaccagcttgccgtctcccatgatgcgctgcaagagcttgcctcctctcacttttgcgccatcttggggacgagcgtcgagcgtgaactagccctagacctccactctcttggcctccgccctgcgcagcttgaggggctggactgtctcttcacagaggatgaggtctgggcggtgatcaagtccttgccctctgataaggcgcccggtcctgacggttttacgggccgtttctacaagtcttgctggcctgtgatcaaggtcgaaattctggcggctcttaactccttgttcctgaccaacggccaaggtttcgcttccctcaacgacgccctaatctccctcttgccgaagaaggacgaggctgttgacgttaaggatttcagaccgattagccttattcacagctttgggaagttgttctccaagatcttggcctctcgtctctcccctcgcctggacgagcttgtggcgcctaatcagagcgctttcatcaagggccgctctctccatgacaacttccgctatgtccagcttgcggcaagggcgctgcacgccaaacgcattccccgacttcttctcaaggtggatatcgcgaaggcctttgacacgagaggtcttcgccaaggagatcctctttcccccatgcttttcattctagtcatggatgtgctcaatgcgatgctccgcaaagcctctgacttgggtgattttcttcccctcaatgatcgtgctattcgacatcgtgcatccctctacgccgatgatctagttctcttcctttcccccgttcggcaagaccttgagttcatccaaggcatcctctctgtcttcggtgccgcttccgggcttcggaccaacttcaccaagtgctcgattactccgatccgctgctcggttcttgacctggagctggttcagtcctcttttccttgctcgatctcggagtttccctgcacctacctcggcattccactgtcagttcgcaagctgccaaaagcggccctgcaaccgcttgtggataaagtctcccatcggctccccccctggaagggccgtctaaccactctggcgggtcgctcggttctagtccagtcggttctctcttccattccggtccatgtttctatagcgatcggcttgccaagctgggttatcaaagccattgacaagaagcgtcgcgccttcttgtggacgggtacggactcggccaatgggggacagtgccgggtgtcctggatgagggtttgtcgtcctagggatctcggtggactgggcattccggatctcagggtggctggctttgccttgagagttcgctggctctggcttcagcgctcgggacacccctactggtctgatctgaaggcccctgttgagcggagcgtctccgacatgttcgcagcatccaccttctctatcctgggagatggtcagtccacgctcttctggactgatcggtggatcgatggtcgctcaatagcttctatagctcctgacctcctccacgtcgtgcctccacgcttccggggatcgcgcacagttgctgctgggttagcgaacaactcctgggttggtgacatacgtggcgccctcactgtcccggtcatctctcagttcctgttagtctgggacgcggtggttcctacccagctctcgccgggtattgaggatcacctcgtctggcgttggacgggtgaccagtgctactcagcgcgatcggagtatcaggcgttcttccttggccagcactcttttgcctatgccgacttactctggcacgcgaagggccctgctaaatgcaagttcttcctttggtttgcatttcagcagcgctgctggactgccgatcttctccaaaagcgtggtatcgatagccactctgcttgccccttttgcgctcaggagcttgagacagcgaaccacatcctcatcgattgcgtgttcgctcggcaggtctggctccgtgtgttgtcccctcctcgctgggctgccctctctccccctcgtggcagctggctccaggattggtggtcatcctccagggtatgtttacctgagcaccttcgcagcggcttcgactccttggtactcctagtctcctggcagctgtggaaggaacgaaactccagggtttttactctgcgctcgcttcggtcgtag

SEQ ID NO: 3148 - DNA, 299 bp, Oryza sativa
  Clone ID: PAT_MRT4530_24833C.1
acgtgatgttgcttgacttacaccttgtgccctcatctactgctgcggaatctacagtgtcttacctgaagatgaaaggtgattaccacaggtaccttgtggtatttaagactggtgccgtgagaaaggtagctgctgtaagcacattggtggtttacatggctgctcaggattttggtttggcgtgtcttgctactactcatcccataaggattggactgtcacttaactactctgggttctactactagattataaactcttcagacaaggcttgctaccttgctatgcaggcgttt

SEQ ID NO: 3149 - DNA, 4535 bp, Oryza sativa
  Clone ID: PAT_MRT4530_25119C.1
gccgatccccgggctgccggacccgccgcgtgggggtgttcccgcgtcagcccagttaccgcgcacgccgcctccggcgccgcctgtgtccctcggactggacagagggcctttatcccgggtccctccccagcctgaactggggttgctcctctctccctcgttgcagcccccggatcgctcggttaccctttccccgcgagtctctccgggcctccatcagccttctccctactggctgccttgttacttcatgtgggtcagggaggtctggcagagagcattacatgtccctggagacggtcaccaccagaggtccacattccatgccgtgggtcatcttgagccccttcaccacctccagcattgtcggcctcttgaacggctcgtcggcggtgcagtcccgggcgatggcgagcacgcgcgccatctgctcccgccacacgcttgaaaccggcaagcatggatcgaacagctcgttctgcttaccgcgggcgatcatccaccgcacccagccgacgaggtttccacccccttgcacctcctcctggcctgtaggtggccgtccggtgaggagctccagcatgacgacgccgaagctgtagacgtcgcctttcgtggtggacttcattgtgaggccatactccggaggaatgtatccaaatgtaccggcaatgtcagtgctgacatgggtctcacaggcactgatgatccttgcaaggccgaagtcagagaccctcggctcgaagttctcatccagtagaatgttgctcgacttcatgtcccggtggatgatatggggcacaaagccatgatgcaggaaggcgagcccacgggctgaaccgaggcagatcttgagacggtccggccatccaagagcttcaagtgcatctgctcggtttctcagccacatctcgaggctcccattctccatgtactcgtagatcaggaatcgttcatcgccacaaacacagtagccaagtagagggacgaggtttggatgtttcacctttccaattgtctccatctcagctagaaactcacggtcaccttggaactgatggccaccatggagcctcttgatcgcgactctccggccttcagggagcgctgccttgtagacagtgccaaatccaccatcacctattatgtgcaccttactgaagttttctgtggctttcagaatatcatccgcggtgaccctcagaagtgcatgctcaaatgttgcaagattgatactcagaggttcccttgacttctttcctagcagttcatcagttgaggtaggctcaactgtagccttggccttactggcagattcaaaagccaaaggcctgcttctaaccagcttccgtctcagataaacagccagaagcactaaaacaatgatgatgacgaatgtaaaggcacagatggtaattgcccttcgaacccgatgatatggatgcaatgctttatgatcagtaccattagtagaacaaatgcctcctgcagcacaatctgccaagctgtacatgtcaatatagttacctgagaagttggcaaatgagaggccaaatatattgcagattccacagggtatggcaccatagagattgttgctcgacagatcaagataattcaaagaactgagatcagaaagtgctgaaggcaaccttccagtgaggctattgttgtggatatcaagagtagacaattgtgtgaagttcgagatagactcatctaggctccctgagaaatggttgctgcttgaattgaagaagagcagtgtacttgagtattctttgccatcggggcaagagaactggatatgcccagataggtggttgttgctgacatccagatggtttaggtaattgttgcagagcaaagactgtggtagagtgccagtgagtgcattgcttgacaagtctagcactgcaattttgggaaggatttggcctatcttagcaggaatggagccatctaggtggttattggacagaataaggccttgcaattgaaccaaaggtccagaccatggaagcattggtccaacaaattcattaaatgacaagttaatggatgtaagatttgttagctcgccaagctccacaggaatggtgccattcagcaaattgccttggaggttgagcaccatcaccattgcacagttctttatagatgttgggatctgaccagtcaattggttgtatgacagatcaagaagaccatggtgctgaagaaactctgagtcagggtgagcctcattctcaaatcccacgcaaatctcagcagggatagaaccagacagctggttggaagacaaaatcaagctatcaagcaatgtcaagtgagatatggcacttggaatgttcccagtcagattgttatagctcaagtccagcgtggcaagttttctgcagttgaaaagtgctagtggaatgatcccagataacctattgccacgcagggatagattggtcagattccttagatcaccaacagactgagggataggcccttcgagtaagttattgtctatatgcaacctttgcaatacagagagtttaccaatactctcaggtattgggccggtaatttcattgttactgagagatatctctagaagggtttttgactcccacagctccgcaggtaacatccctgcgaatttgttttgtgacaactccagagtaaccaggggtaattctgctaaatatcctggtacctccccatgaatatggttgtctaacaagttcaattcagtgaggttcgtgcaccctttaaatgcctcatcaatagtcccagtcagattgttatgatgcaataagagtgaatgcaaggagttggcttggcatatgtgagaaggtatagaacctgagagaaggttggattctgcagcgaaacttagcagatgctgcaatggcagcactggcaaaggtccactgaatttgttctgtcccaacctgatggaccttgcatttttccatttctgaatccaatctgggacacgacccgatagtttatttccttccacaaaaaatgagacaatagcctctaaatctgcaaattcttcaggaataggtccaataagggcattgaatgacaggtttataacagtaagcttcttgcaattcccaagttcttttggcatgttcccactgagcccagcattctttgcaatcagctgtgttagattgccaagctcacccatggatgatgggagctcagcgtcaaagttgttatctgatatgtcaagttctgtcaagctgctgagtccactgattgaccaaggtattttgcctgtgaactgacattcctcgagatgaagtaacttaagctgcttcagactaccaatctcttgtggaatccttccagtgagatcattctttcctagaatcagtaattccagattttccagttgaccaatctccctaggaattgttccctcaaaactgtttgatgatagatcaagtgtcaataggtttgtcaacgaggttattccagggaatattgatccagttaggttattctggctagcatcaaagtgcaagagacaagacaggttcccaaaagttgctggtatagatccattgaatgtgttcatcttaatgtccaacaactccaggttcttcaggctgcccagatctggtggaaggcttccggagatggaattcatggatatagatagcttagtaaggtgctgcagctgagcaatagcaggactaagttgtcctgacaaggagttgtagtcaagcaccatttccttcagcatcttcaggttatatagtgagataggtattggcccagtaagctcgttattgctcaagtctaggtactggagattctgcaaatttcccaaagcttccggaagctctccggaaaacccacatccactgaagttgagccgaacaagtgactggaatgccccaatgcataatggaaacggagcatagagtggaacagaggacaaatcaatcgccacaacattatgtcctatgcaagttatgcctgaccagctgcatgggggagtttccgaatcaaaccagttacggagaaagccttttccttcggtgattgaatccctcagagtgaacagagtacttatatcacgtgattctgcccaagcagaaatggggatgaagctcactagcaggatgaaaagccagaaactattggataccatttccacgttattctttttgggactgtaacaattatcttataagatgtagccttgtaacttcaagtaggatatagatgactgacagataaaactgtgcaatacacatccttctgcagtctgaaccattacgccctctcagaaatgcatcttactcccgatgctcgtcgccggggatcgtcgcgtcgtcgaaggcgccgcgcgctcctccgcgagacgacgggctgctcgctcggctggatgggtacgacggcgtggtctcgccggcggcgagcggcggcggcgccgtgctcctgctgctgggctcgtgagtttgtcagggggcgggcacgagggagacgtgaggagcagcaggtggcgaccctcgtgc

SEQ ID NO: 3150 - DNA, 1740 bp, Oryza sativa
  Clone ID: PAT_MRT4530_25375C.1
atgggatcatgcaacgagaacattttggtgtggaacgtgcgaggcctcgactttgattattctttcttgcctgcggtcggtcggagtgggggggtgttgcttgcctggcggacgaccgtctggtctgtctcagatgttcaccttgcggaattctctcttaccgcgttggttcgacactcttctgatgtcgccccctggtggctctccgtcgtctatgggccacaggaggagccggacaagcttcgtttcttagatgagcttcgttcgctgcgctcctctcgcacggggccgtgggccgtcgtaggcgatttcaacctcattctcgaagctcaggataaaaacaaccttaatctcaatcgtcgtatgatgggtcgttttcgtcggctcgtcgacgagttggaactccgggagctgccgcttcacggacgtcgcttcacttggagcaatgagcgtgagtcgcccacgcttgttaagctcgaccgcgttctcttctccgcggattgggaggagcttttcccctcttgcctcctccaagcggcctcttctatcgcctctgatcactgtgctcttctccttcatacctgcgtcacctccccgaaagcgcttcgttttcgttttgaggccttttggcccaagttcgacggctttcttcaagtcgtgcaggacgcctggcatccccctgccaacctaccccctcttgccgctcttgcctggtgcttctctaccacggccaagcgcttacagagctggagtgaccgtcacattggcagtgttcgtctacagcttcagatggcgaaggaacttgtcttccggcttgatgttgcgcaggagagtcggtctctttcctccttggagacctggctgcggcgagatttaaagttgaagtgtcttggtcttgcctcgcttgagcgtactatcgcgcgtcagcgttcgcgtttggtctggcttaaggagggtgacgccaataccaagttcttccacctgcacgccagagctcgtaggcggaagaacttcatcacacgcctttgtgatggtgaccagcttgccgtctcccatgatgcgctgcaagagcttgcctcctctcacttttgcgccatcttggggacgagcgtcgagcgtgaactcgccctagacctccactctcttggcctccgccctgcgcagcttgaggggctggactgtcccttcacagaggatgaggtctgggcggtgatcaagtccttgccctctgataaggcgcccggtcctgacgattttacgggccgtttctacaagtcttgctggccggtgatcaaggtcgaaattctggcggctcttaactccttgttcctgaccaacggccaaggtttcgcttccctcaacgacgccctaatctccctcttgccgaagaaggacgaggctgttgacgttaaggatttcaggccgattagccttattcacagctttgggaagctgttctccaagatcttggcctctcgtctctcccctcgcctggacgagcttgtggcgcctaatcagagcgctttcatcaagggccgctctctccatgacaacttccgctatgtccagcttgcggcaagggcgctccacgccaaacgcgttccccgacttcttctcaaggtggatatcgcgaaggcctttgacacggtcagctggcctttcttgcttgaggtccacggttcccccatcggagaggtcttcgccaaggagatcctctttcccccatgcttttcattctag

SEQ ID NO: 3151 - DNA, 1023 bp, Oryza sativa
  unsure (1)..(1023): unsure at all n locations
  Clone ID: PAT_MRT4530_25382C.1
ttgggggccccaaaaaaaaaattataccttgccagcccggggaaggaaactttggtcccctaaaagggccccccctttttttttttttttttttttttttatttttttttttttttttttttttttttttttttttttttttttttttttttttttttttttttttttttttttttttttttttttttttttttttttttttttncaataaaaacagtcaaattagaagatttaagcaaatccgttaacggttcccttacatataagggcagatggcaacagttagctgcttgcgaaggcaatgtcactaccgcacaaaatataataggtcaatcataccaatactgttcctaacacaaaaggctttgtttgagggttctaattctctcagcatatgaaaactaacggaatacaacatagctttcatgtgtagcttctacagcagactacggatgggttcagcgactaaaattacacagttggtccagttacgagataatttgatgaaactaaataaatgttctggtgccgctgattgagtaacccaagataaaacgctgattttccaggaggtgcacttattgtatcctagaaaaaactctcatgagttcactcatttcccatatggatggtacctgctggaaccccgcccaccagcaccggctgctccagctccaccataactgccatatcctccagcaccaccataggcacccggagcgccaccataggcaccaccaccataagcacctccgccataggcaccccctccataggcaccaccaccatatgccccataagcaccataggcacctccatacaaggagccaccataaccaccaccatatcctgatccaaatccagcattacctccatagccataccctcctctgccataaccatatgcagtactatcataataacctcctccagctgatcggtaaccagcaccatacccatagccaccactgctgccactgccgccaccaacacctccgccggacgcgtgggcggacgcgtggg

SEQ ID NO: 3152 - DNA, 1644 bp, Oryza sativa
  unsure (1)..(1644): unsure at all n locations
  Clone ID: PAT_MRT4530_25494C.1
ggtccggaattcccgggtcgacccacgcgtccgctccaacatcctgagctccaatctcccactccattccggccgcgcattctcccgctctcgatcgatcgatcgatcatggtggtgccttccgcgacgacgccagcgaggcaggagacggtggtggcggcggcgccgccagctgcggcggcgtccggtgtcgtcggcggcggcggcggcgtgacgatagcgacggtggacatgtcggcggagcgcggcgcggtggcgaggcaggtggcgacggcgtgcgcggcgcacgggttcttccggtgcgtcgggcacggcgtgccggcggcggcgcccgtcgcggcgaggctggacgccgcgacggcggcgttcttcgcgatggcgccggcggagaagcagcgcgccgggccggcgagcccgctcgggtacggctgccggagcatcgggttcaacggcgacgtcggcgagctggagtacctgctcctccacgccaaccccgccgccgtcgcgcaccgggccaggaccatcgacgccatggacccctctcgcttcagtgctattgtgaatgagtacattgaagccatgaagaagctcgcatgtgagatcctggacctgttaggagaggggctaggtctcaaggaccccagatacttcagcaagcttaccacaaacgctgacagtgactgcctcctgaggatcaaccactaccctccatcatgcaacattcacaaacttgaccatgatgaccaatgcaatatcaagagccttgttagcaccaaggctagcaatggtgggaatctgatggcaggtgggcgcattgggttcggcgagcactctgacccgcagatccttagcttgctccgagcaaacgatgtggaagggctacaggtgtttgtgccggaccacgagggcaaggagatgtgggttcaggtgccatcggacccatcggccattttcgtcaatgttggtgatgtcctccaggctctgacaaatgggaggctgataagtatccggcacagggtaattgcaaccgcctgcaggccaaggctgtccacaatatacttcgcatcaccacccctgcatgcacgaatctcggcactcccagagacaatcacagccagcagcccacgccgataccgatcattcacctgggctgagtacaagacgacaatgtactcactccgcctgagccacagccgcctagaactcttcaaaattgacgatgatgacagcgacaatgccagtgagggaaaagcataggaattgctggttaaattgcagacgatgcctatggaccagtggggattaggaagctgaaactgtccccaaaattttggctctctggcagtctggctactatcgtcagatatctcactattatgatggtgtagtgcctaagttgacgggtgtgtaatatcgttagcagtctacagaagctatggttgtacggaagtaatgtactgtcgccttttcagctaactatccatgttctctcttatatgtaatgagttagttgacggatgtgtaatattgctagcattgtatataagctatggttgtatggaagtatgtaatatagccttttcagctaaaaaaaaaaaaacccaaaatacaaaaaaaaagaanaggaaaaaaaanaanaagttt

SEQ ID NO: 3153 - DNA, 1303 bp, Oryza sativa
  Clone ID: PAT_MRT4530_25496C.1
gtcgacccacgccgtccgcaacctttctgagctccaatctcccagtgggtggcgggcgcgcattctcccgctctcgatcggtcgatcgatcatggtggtgccttccgcgacgacgccagcgaggcaggagacggtggtggcggcggcgccgccagctgcggcggcgtccggtgtcgtcggcggcggcggcggcgtgacgagttcgacgggggacatgtcggcggagcgcggcgcggtggcgaggcatttttttacggcgtgcgcggcgcacgggttcttccggtgcgtcgggcacggcgtgccggcggcggcgcccgtcgcggcgaggctggacgccgcgacggcggcgttcttcgcgatggcgccggcggagaagcagcgcgccgggccggcgagcccgctcgggtacggctgccggagcatcgggttcaacggcgacgtcggcgagctggagtacctgctcctccacgccaaccccgccgccgtcgcgcaccgggccaggaccatcgacgccatggacccctctcgcttcagtgagatatgcttacatatttctgcatctgagtactgctcaggggtgatgcaacgaagcatcagtgctattgtgaatgagtacattgaagccatgaagaagctcgcatgtgagatcctggacctgttaggagaggggctaggtctcaaggaccccagatacttcagcaagcttaccacaaacgctgacagtgactgcctcctgaggatcaaccactaccctccatcatgcaacattcacaaacttgaccatgatgaccaatgcaatatcaagagccttgttagcaccaaggctagcaatggtgggaatctgatggcaggtgggcgcattgggttcggcgagcactctgacccgcagatccttagcttgctccgagcaaacgatgtggaagggctacaggtgtttgtgccggaccacgagggcaaggagatgtgggttcaggtgccatcggacccatcggccattttcgtcaatgttggtgatgtcctccaggctctgacaaatgggaggctgataagtatccggcacagggtaattgcaaccgcctgcaggccaaggctgtccacaatatacttcgcatcaccacccctgcatgcacgaatctcggcactcccagagacaatcacagccagcagcccacgccgataccgatcattcacctgggctgagtacaagacgacaatgtactcactccgcctgagccacagccgcctagaactcttcaaaattgacgatgatgacagcgacaatgccagtgagggaaaagcatag

SEQ ID NO: 3154 - DNA, 3543 bp, Oryza sativa
  Clone ID: PAT_MRT4530_25684C.1
tatagagaaatctcccgtctcgtcgtctgctgggctccttgcgccaagactactcataatcgctatcatcgtcatcttctagagggaatgttggaccttcattatcactcgaggtcgtctcctccgctccttgcgccaagacgagtcgcggctcaacagaggaggggcgccgatctccatctggcgagcagagcaggggaggggaagggaaggtatcctgaaagatgcttaatcttatcaaaataaaggataaaaagaaagagcaggcagcaagtgctgctggaaaggctcctgtgaagaagcaatctgctggagagctccgtcttcacaaagatattagtgagctaaacctacccaagagcacatcaatttcttttcccaatggcaaggatgatctgatgaattttgagatcatcgtccgacctgatgaaggatattacctaggtggcactttcgtctttacttttcaagtctctccctcttatcctcatgaacctccaaaggtgaagtgcaagaccaaggtataccatccaaatattgatttggaaggaaatgtatgcctgaacattttgcgtgaagattggaagcctgttctcaacatcaacactgttatttatggccttaaccttctttttacgcaaccaaacgatgaggatccgttgaaccatgaagcagcagctgtcctccgtgacaacccaaagctgtttgaagctaatgttaaaagggcaatggccggaggctatgtgggtcaacactatttcccaagatgtgcatgatatggtgctgggtgccacaaacattagtaagttaagccacctgggcctcttcccgacattctggattgtatggtttcggtgcgttaaagtctgtcggatggatgtgatatgttgactgtatgacggcgatgctgccatctgtgtgatatttgttaaacgtcagtaaattggtaatctggtggtggtacatgtcaacatcatcaccaaagtacttcgagcaaatagtcaaacactcagcagcaacatatgcttctgcaatggacccttcaagccttgccatgttcctcacaaaccgtttcaatgttaataaccttctttctattgggtacatccatccatattgtactggacctctaagaattgcctcttcaggtaaatggacagccaggtgtagcatcacatcaaagaaagaaggaggaaatattttctcaagcttgcacagaatgattgggacgttagctttcaatctttccagcacatctaagttcaaagtttttgcacatagttgctgaaaaaaattacctaattcagcaagtgcttcgtttatgtccttgggcatgattcctcgtacagcagcaggtataatcctttgaagaagaatatgacaatcatgagttttcaatccttggaggttgcatccatctgcagtaacacatgttgctaagttggaagcatatccatttggaaattttacactcttcaaaaaatcacaaaaatcagccttctgtgttttagtcattgtgtaaggggcatgaggagcactatatgaatctccatcacggatcaagtgtaaatgcttcctaatacccatatcttccaaatcaagcctagaatttgtactgtcctttgacttcccagctatgcctagaaatgtaccaaggatgtactcacatatatttttctcaatgtgcatcacatcaagattatgccgcagcttcaaactcgaccaatacggcaaatcccacaaacatgaccttcgcttccaacattggccctcttcgtcccgctttctttttttgctttcaggatgctttcctggtctaacatccttgaccctctccagttgctccatcagctcatccgtggtaaatttctctggcttctcacagttttcaacattaccatcaaacaccttgcttctcctccatggatggtccctagcaaggaaacgccgatggccaatgtaacatatcttattccttatccttttggagcaagcgtttttatcacaatgcacacatgcataataacctcttgtgactctacctgataatgtgctcaaaccaggataatcatgaatgcaccatattacagcagcatgtagatcaaacttcttcttagtaagtacatcaacagtagggacacctttccaaagctctagcagctcctcaataagtggctccaagaaaacatcaatgtcctttcctgggcattctcgaccagggataagcaggcccatgataaagtttgattgctctacacattcccatggaggaaaattgtacgggataagaaacactggccacatgctatacgagaagctcattttaccaaatggattgaaaccatcagtagcaaggccaagtctgatgttccttgcatcttctgcaaaccacccatactttctgtcaaagtctttccatgactcgccatcagctggatggctgagctcattctccactggcttcctcttcaacttatgccattgcacctcctctgccgttcttttggaagaaaaaattctcttcagcctaggaatcaatggaaaatgtcgcaaaaccttctcaggaatcttcttccttccaccattgtctttccatcttgtgcaaggaccaccagggtacagttcttgtttcatctcttccaatagaattgcaaacatagactttttcccttgaccttcttcttcagctgtgtacaactcctctaccataccatgaattccatcatcagggtcatcttcctcatccacattcatgtcaaaatcctcattgagactagtatcctcatcaacatggtcatcaatttcatgtggtacaaccttcaatggttctccatgatgtatccatctagtgtaagtagtagccatcccatgaatatgcaagtgatcatgcacccgtcctttaaattggggaacccgattcaaacaccgacggcatgggcacaacatctcttcatcgtcgccaaatctctcagaaagaaaggtcatgaattcattcaccccatccatgtattcattgctgaacctcttactgttgatccaagatctatccatcgtcggccacttgacgcgcctctctgcccgcccagtgcgccgctggctgcgcctcttcgcctgccccgcgcaccgctccccacgcttctctagcgtgccgctagatccgccgctgccagcgcccgccaaaccgctgccccacgctccggtgaggaccccggcagacccctcaaaactgcgctcaacgagtaggagcaccacggcgctccggtgatgctcgcgacgatgacggaggagccgcacagcggcggtggaggcggagattggagtcgcaaggagaggactgcggtatgggctcaagtaggaaggttgacgacctgttaggttagtttctttagaggatataaacatgatatataaaataatatgcaacatcgcccttgaaacagaaggttgtgggttcgactcccatggccaacatttttttaagaaattttgctgagtaacgggttggcccattttgaaattttgctgagtaacgggttggcccat

SEQ ID NO: 3155 - DNA, 981 bp, Oryza sativa
  Clone ID: PAT_MRT4530_25685C.1
ccggccgggttccggccgggagttccttcccttgcgtaatagaaagagaaatctcccgtctcgtcgtctcctccgctccttgcgccaagacgagtcgcggctcaacagaggaggggcgccgatctccatctggcgagcagagcaggggaggggaagggaaggtatcctgaaagatgcttaatcttatcaaaataaaggataaaaagaaagagcaggcagcaagtgctgctggaaaggctcctgtgaagaagcaatctgctggagagctccgtcttcacaaagatattagtgagctaaacctacccaagagcacatcaatttcttttcccaatggcaaggatgatctgatgaattttgagatcatcgtccgacctgatgaaggatattacctaggtggcactttcgtctttacttttcaagtctctccctcttatcctcatgaacctccaaaggtgaagtgcaagaccaaggtataccatccaaatattgatttggaaggaaatgtatgcctgaacattttgcgtgaagattggaagcctgttctcaacatcaacactgttatttatggccttaaccttctttttacgcaaccaaacgatgaggatccgttgaaccatgaagcagcagctgtcctccgtgacaacccaaagctgtttgaagctaatgttaaaagggcaatggccggaggctatgtgggtcaacactatttcccaagatgtgcatgatatggtgctgggtgccacaaacattagtaagttaagccacctgggcctcttcccgacattctggattgtatggtttcggtgcgttaaagtgctgtcggatggatgtgatatgttgactgtatgacggcgatgctgccatctgtgtgatatttgtttaaagtcagtaaattggtaatctggtggtggtacagataaaatttgagttgcagttcaagctggatttatacatcattttcttttgtgcaaaaaacaaaaa

SEQ ID NO: 3156 - DNA, 1018 bp, Oryza sativa
  Clone ID: PAT_MRT4530_26068C.1
cgcggacgcgtgggaaaaaaaaccctaatccatccactccaaatcgccacgcaggaagggaggaaaggaccaccagccaccgcgcgcgcccaaatcgtcgcagctgcttccccgaggagaagaacatgagtcgccacccgagcactaagtgggcgcagaggtccgacaaggtgttcttgacgatcgagctgcccgatgccagggatgtgaagctcaacctgaagcctgagggccagttcatcttctcggcgaagggccctgccgacgacaccccttatgagcttgatcttgagctctttgatgctgtgaatgttgaggagagcaaggcagctgttgcggcaaggtccatatgctatcttatcaagaaagcagagagcaagtggtggcctaggctgctgaagaaggaaggcaagccacctgtgttcctcaaggttgattgggataagtggcaagatgaggatgatgaagacattgggcttggtgacttcggtgatatggacttctcgaagctgggcatgggaggtcctgatgatgatcttgaggacgatgacgaagatgacacggctgacagtgctaacaaagatgatgaagacattaaggcagaggggagcggggaacaggaagctgctggtgaagcgaagccgtgaaatacctgagagttttagaacgctatgcttgacttgtttgtgacgctgccaggtcttaagatttttttggtgtaaactctggagagtggatcactgccactaaagtaaagtagtagttatggtttagtagctccattttgttaaaaaactttgtgcattgcacactgttctgttatgtgaatcgccatatttgcatcaaccattgcaaagctatccagccattctgtgtttcatacttttactcatagcggtttggtggcatgttccatttgccttgtactttggaacttgcataattgttcgtgactgtaaaaataaactgaagtatccagcttgctcatccatattgttaaaaaaaaaaaaaaaaaaaa

SEQ ID NO: 3157 - DNA, 561 bp, Oryza sativa
  Clone ID: PAT_MRT4530_26070C.1
atgagtcgccacccgagcactaagtgggcgcagaggtccgacaaggtgttcttgacgatcgagctgcccgatgccagggatgtgaagctcaacctgaagcctgagggccagttcatcttctcggcgaagggccctgccgacgacaccccttatgagcttgatcttgagctctttgatgctgtgaatgttgaggagagcaaggcagctgttgcggcaaggtccatatgctatcttatcaagaaagcagagagcaagtggtggcctaggctgctgaagaaggaaggcaagccacctgtgttcctcaaggttgattgggataagtggcaagatgaggatgatgaagacattgggctttggcgcgaattgacagtgcacttccttcttgttgcagttggtgacttcggtgatatggacttctcgaagctgggcatgggaggtcctgatgatgatcttgaggacgatgacgaagatgacacggctgacagtgctaacaaagatgatgaagacattaaggcagaggggagcggggaacaggaagctgctggtgaagcgaagccgtga

SEQ ID NO: 3158 - DNA, 522 bp, Oryza sativa
  Clone ID: PAT_MRT4530_26127C.1
atggcaaatgactcattgacaaggagccatatagttggagatgtgttagaccaattttcaaactcagtgcctctaactgtgatgtatgatgggaggcctgtgtttaatggcaaggagttccgttcctcggcagtctcgatgaaacctagagttgagattggtggcgatgattttcgatttgcctataccctagttatggtggatcctgatgctcctaatcccagcaacccaaccttgagggaatacctgcactggatggtgactgatatcccatcatcgacggacgatagctttgggcgggagatcgtaacatacgaaagcccaagccccaccatgggcatccaccgcatcgtgatggtgttgtatcagcagcttgggcgcggcacggtgttcgcgccgcaggtgcgtcagaacttcaacctgcgcagcttcgcgcgccgtttcaacctcggcaagccggtggccgccatgtacttcaactgccagcgcccgacaggcacaggtgggaggaggccaacctga

SEQ ID NO: 3159 - DNA, 1606 bp, Oryza sativa
  Clone ID: PAT_MRT4530_26698C.1
gcacgagggtttttttttttttttttttttttttttttttttcctgaaagtatgtgcattcatgttactcaagacatcaaatgtaaatggacatcaatttttacagtcaggtgagcccaagagctaaatttcttgttcattattttcgaatcatatcaacatcaaggacaaagtacttgatcaggaaaatttcctttggaagccaaaaaaatatggaccaacattgcgtccacaagcctagtccatgtaatatctttcatagctcatgaccttgggtagagacatatataggtactggtaagaaaggaaaaggggccacagaagcataggcaaccggagggcgcgagtgaatacgagaaggttttcggtcctcacgcttctgtctagctcgttcttcatcctgctgttcagcaccataaagaattccggtgatttcactcgtctgagtgacattatgctccttttgctcattaggcagccgatgcaacagaagtccagccataaaagcaggaagatacaaaaggctaccatagaacattctccttgcagttttgggggttggctccagcacaaatgatagagctccaattgtaaggcccaaagttagaagtgatgcttcaagactgaaccactcagatgtgagaccccagttgtatgcaaaaaatcccaagggcagcatgtatagacaatttctgagtgatacccatgcagttcttttaccagtaggatcagcaaaagaaaacattcggtaccctccagcaaggtaatcattccgacataagtatgcaagggccataaaatgtggtatttgccaatagtacaatgcagcagggagaatcatagcattcagtgacagttcagacgaagctgctgcccaccctagaagtggtggtatggcaccaacaactgctccaacccatgtatttacagggtgtatttgcttcaatggtgtgtatacaaatgcatacagaataagattagaagctgcgagcccagccgccaagccattagccttccaagccaacaaagctgttccagcaactccaacactagtagcccacatggcagcatgtgcaggactaatgcgccctgatggtaggggccgtcgcatggttcttttcattttagcgtcattctttatctcaaacacctggttgagagtatttgcagatgctgcaaccatcatggtaccagcgcaggtgcaacaaagtccagctatgtctaccatgttgccacttccgagcacataaccagccccagatgttgccacaacaagggcacgcctgcaatttacagaattattgcttatgcaaccttgaaaacttaggcgggctttggagagctcgaagtagcacctcccgtagtgcctcagcgcgtcggagacggatccagcttgcctcgaaacagcggccgcggccgccgtagcctccgcgacggcgggcacagcggcggcgatggtgggggcagacgaggaggaggaggaggaggaggagcgcggcgatgcgatgggagctagagccgtggccgggtggtgggacgtgtcggggatcaggcgcgagcggagagccctcgcggcggaggcggcggtcgcgccgcccctccacat

SEQ ID NO: 3160 - DNA, 2522 bp, Oryza sativa
  unsure (1)..(2522): unsure at all n locations
  Clone ID: PAT_MRT4530_2675C.1
ccccaggctttacactttatgcctccggcccgtatggtgtgtggaattgtgagcggataacaatttcacacaggaaacagctatgaccatgattacgccaagcgcgcaattnaccctcactnaagaaacaactagaatgtgacagaatttcatttcaggcaaataaccaacaattgcttgcactgaaaaacacataacctgcaattcactgaaaaacagacagaactgccgcttggtagttccctgttttgaaaaacacaatctgcagtaacgctgctaattttccaaataataggtacaggtggagatactccctccgtcccaaaaacacatacatcaacctggagatcaacctaggagagatcacatcccctcttaattcttatcccctcttaattctttttgggacggagggagtactgttgaagaagtccgatgacattttttctctactgatcagtatgtacaagcattcacagacgtcctcctcccatatttacaaattgcaaatttgcaacaaatgctccctatacattcgtgtcttctaactagcagagcttccaaacgaacatattcttgggtctaaaatttcgccatctcactccaatatggagagtatacctggagatttcatctatgaatcatcacatacaggcgcacagcaaaatacatgcctagctagctaagctagtctcagttgaaaactatgggcaacttcagaacttggccagaagccacccaaatgtccagccaagaagcagccctgcacctgcaagacctaaaccaacggcaaataagagcgcgtcacagaaactccctgcatttttatgccttctgcctttcttccttgtccaatcttctttctcatgatctggtgtagtccttttctttagtgtaatccatggaatatcaggtatcatggttgctatctgatgctctctgtgtttaagctggaggcagatgttctccaactgtaacattttcagccattgtttgcacgcaaagagatgcgaggcctgtctgaaaaatagcttgatgacatcgtctttttcactttgtgctttcttcccagccatctcagcttccctcgcccgtgtttgcgagtgacaaagtgcctccaaaagttgagcttgctctgcaggattctggtatgttcgcttgcctcgtggttctgtattgatgcccctagaaaaatcttgtgcatcactgcgtgcaacatttctttcctgctgttgccaaactccatcactggttaaatccacctcatctgtgcttgctgtgctgtaactgcattcaatatgttcacattgtccagtatcaggatatgacattgtacctgctggacctgatgaccccctgtacctacccatattttcatgactgcgtgattcagtaccctgaacacgaactatctgggtaggtcttggtaaatcgcaattctcaatatgctgcattgctctttctgcaaccagtaaagccagctcattctcatcagtgatctgccaccatggttgactcctttcacctcctttccaaggcgcattcatatcaaaatcgtccttctgtgggttcttcgacggtggtgggttaaaatttttgaaatccaggaattctttatcattgaacaaacagtcactggcattttctttgcacttcgaaggaacttgggaatagccacctatatttttcaagtcttgtaagcctgtttcagaagaatacttcatggaagctgtggaaaccatccacgaaggctcaaaaacatcctcaatcttctcaggattggtgtcgaacatttcacaaaataatggttcgtcgtgtatattcttttgtgctgaatcctccacttccttatcactgatctctcttcccagaaaatataggtgctcacctgcaagattcttctgccctcctaaatttggttgtaactgaagccaccatctaatatcaggtggcagactggagttcatgggattccagctcaatggcatgaaattgggcacagggcggtcttcagaattcctacaatttccattgcttttgacatgctgctgttctgatgatggtggacagcaggctagttttggtgctctttttctatcctcctgaacgatgcaacggtttgcagcacgctgccaagcagcccttgcttcagcagcggccattattctcactgatcagagaactggtcacttgatggatctagggacaagaagacggcggtggcatcgcccgcatccgtgacctcgcttcgttgcccctcgatgcaaagattggggcatccgtccggtgcgaaccaccggtcgctttatgggaggagggcgagagaatcagccggtggaaatcccacagaaacggagcaaacgatggatgagatgaggtgaggtactgaggtgacgcagcagcaacagcagcagcggcagcaagctggattagactaggtggatggagtgagagtggggatttctctctccgcccccgcgggacaacgacgcgtaagctcgcgacagggaaaggcctcgtgc

SEQ ID NO: 3161 - DNA, 2475 bp, Oryza sativa
  Clone ID: PAT_MRT4530_26806C.1
atggcgccgccctgctcctctgctctcgttcttccttgcctgcttgtcatagccatggccgctctgcaaagtgctgtggtgtttgccgataccgtcactgccaaacgcccgttgtccggcagccagagtgcactggtgtccaagcgtcgcaagttcgcgctcggtttcttccagccagaaaattcacagcattggtaccttggcatctggtacaaccaaatttccaaacacacacctgtctgggttgcaaacaggggcactccaatctcgaatccggacacctcacaactaaccatagcaaccgacggcaacatggtattactcgacaattcaacaactgcaatttggtccacgaacatctccaagatcgcctccaactccacggtcggtgtcatcctcgacaccggcaaccttgtcctcgcagacgaatcgaacacctccatcatccactggcagagcttcgaccatttcggcaacacctggctccccggcggcaagctcggccggaataacaagctcgccggcgtgagcacccgtctggtcgcatggaaggctcgcaatgacccatctccaggcgtcttctccctcgagctggatccgaatggcacgagccaatacctgctcgaatggagcatcacgcagcagtactggacgagcggcaactggactggccgcatattcgccgacgtgccggagatgacgggatgctacccgagctcgacgtacaccttcgactacgtcaatggcgagaacgagagcgagagctacttcgtgtacgacctcaaggacgagtccgtcctcacgaggttcttcctgagcgagatggggcagatccagttcttgacatggatctacgcagccaaggactggatgccgttctggtctcagcccaaggtgaagtgcgacgtgtactcgctgtgtggcccgttcagtgtctgcaccgagaacgcactgacatcttgtagctgcctccggggattcagcgagcagaacgttggcgagtggttgcagggagatcacacttcagggtgcagaagaaacgtcgagctgcagtgtagcagcaatgcctcagtgatggggaggactgatggtttctacacgatggccaacgtgagattaccaagcaatgcagagagcgtggtggtcataggaaatgatcagtgtgagcaagcatgcttaagaagttgttcttgcactgcttactcctacaacggcagctgctcactgtggcatggagacctcatcaacctgcaggatgtgtctgccattagtagccaaggaagcagcactgttttgattcgcttggccgcttcagaattgtctggccagaagcagaagaacaccaagaacttgatcactattgccatcgttgctactagtgttctagtactcatgatagctgctttgtttttcatcttcagaagaagaatggtaaaggaaacaacaagagtggaaggttccttgatagcattcacataccgtgacctgaaatctgtgaccaaaaatttctccgagaagctcgggggaggcgcattcggtttagtgttcaaagggtcgctacctgatgcgaccgtggtggccgtgaagaagctcgaaggttttcgtcagggggagaagcagtttcgcgcggaggtgagcacgatcggcaacatccaacacgtcaacctgattcgattgctcgggttttgctcggagaaatcgcgaaggctactcgtctacgagtacatgccaaacggttcactggacaagcaactttttgacaataaaaaacatgtcctgagttggaacacgaggtaccagattgctcttggaatcgcgaggggattagactacctccacgagaaatgcagggattgcatcatacactgcgacatcaagccagagaacatactgctcgatggctcgtttgcacccaaggtcgccgacttcgggctcgccaagctcatgggccgcgacatcagccgcgtgctgaccacggcgaggggcacggtggggtacatcgcgccggagtggatcgccggcacggccgtcacggcgaaggcggacgtgttcagctacggcatgacgctgctcgagatcgtgtcggggaggcggaacgtgcagggacgacggaggaggcaggagcagcaggacgacggcggcgcggcggcggaccgcccattcccgttggtggcggcgggcaggctcgtcggcggcggcggaggccggcgggaggagctggtcagcgccgtggtggacggccggctcggcggcgacgccgacatgggcgaggcggagagagcatgcagggtggcgttctggtgcatccaggacgacgagaacgcgaggccggccatggcgacggtggtgcaggtgctcgaagggctcgtggagatcggcgtcccgccgattccgagatcacttcagttcctcgcggagttggccgatcaatcaaattacttgcagttcttctccgatttattaccgtcgaattga

SEQ ID NO: 3162 - DNA, 2126 bp, Oryza sativa
  Clone ID: PAT_MRT4530_26969C.1
atggcgggcgcggaggccgccaatggcaggaacaagtacgcggttcttgatcccagcgacgagccggaggggcggaggaggccctcggcgtgggagcggaggagcaaggagcggttcgtgctcgcctgcgccatcttcgcctcgctcaacgccatcctcctcggctacgatgttggtgtaatgagtggcgcaataatctacattcagaaagatcttcacattaccgaatttcaggaagaaatcctagttggttgcttgagtgtggtttcactcttgggaagtctgtcaggaggaagaacatctgatgcaattggcaggaaatggacaatggctcttggtgcaattgtcttccaggctggtgcagccataatgacgttcgccccttcattcaccgtgctcatgatcgggaggctccttgctggtgtgggcattggctttggtgccatggtatctgcagtctatatcgctgagatatcccctgcagctgcccgtgggactctcacatccctccctgagatctgtatcaatttagggatcctccttggttatgtttccaactatgctttctcgggcctttcagagcatatcaattggaggattatgcttggtgttggtatcctcccatctgtcttcattggatttgcactttttgtgatcccagaatcacccaggtggttgatgatggaaaagagagttccagaagccagggcagtattgctgcagataagtgagtctgaagctgaggttgaagaaaggattgctgagattgaggaagctgcaaatcttcttaaatcgacgaaatccgaggacaaggcagtgtggatggagctgttgaacccttctcctgctgttcgtcggatgctatatgctggctgtggtatccaaatgttccagcagatcacgggtattgatgctactgtctattacagcccaactattttcagagatgccgggatcaagtctgatcaggagcttcttgcagccacagtggctgttggttttactaagacagtgttcatattggttgcaattttcctcattgataaagttggacgcaaaccgcttctttatgttagcaccattggaatgactatgtgcttatttgtcttggggattgcactcacattgcaaaagcatgccatgggacttatttctccaagaattgggattgacctagcagtttttgcagtttgtggaaatgtggctttcttttcaattggcatgggtccaatatgttgggtcttgtcttcagagatatttcctttgagattacgagctcaagcatcggcactaggtcaagtaggtggtagagtgagcagtggtttggtttccatgtcatttctttccatggcccgtattatatcagtggcaggaatgttctttgtctttgcggttatctcgactgtctctgtggcctttgtgtatttctgcgtgccagaaacgaaagggaaaactctggagcagattgagatgatgtttgaaggtgggaaagaatggagagggagtgagatagagcttgaggatacacaacatttaatacagagcagcaagaagtctgtgtctctaggctgacactattagaaacaataaattcgaaatcattcgatgttcaatgatgaaccatacttatcctgcttccatcgcctacgggattctgaaattcaggtctgcaaaatgatcaggctgccttggactgctacggattttgagggcttaacacgagtatattaggtgtaggcgcaaaacagcatgtaaatgtctgctttacacaactacatcccaaaatgttacctgggaggacacagatgatgttgtatatggcggtatcttccacctaccaaaaaatatagttgttgaagttccttattccacagtttaattttaatagaggaagaggtgtgtgatttccaactgaatgaattctgtgtgattcttgatccagctttttgatttagtccttcatgatattgtagtactgtggctttgttggtctagtataaaaccttcaagaccatgccatgtctatagctttgcattgacgtgcagagttctgtaaataccagatttggatgattcattctgtcaaattaattatttactgaaagtgcactgtgactctgtgagtc

SEQ ID NO: 3163 - DNA, 103 bp, Oryza sativa
  Clone ID: PAT_MRT4530_27304C.1
gctgattcctagacgtgcacacaaacacacgcctgcttttctatatgccacagctggtgtgcgcaagctaccgagtgcagattctgagtggcttctggacaag

SEQ ID NO: 3164 - DNA, 1748 bp, Oryza sativa
  Clone ID: PAT_MRT4530_27531C.1
atggccacctcccacctcctcgccgccgccccctccacccccccctcctccgcgcctcttccccctcccccccccatccccagctccccccccccacctcctcgccgcctcctcctccaccgccgcctcctcggcgaccccccggcctccacgcctcagcctccgatccccaccgccctcttcactgcgcccgagccagaggccccacttcccggtggtctccgcggccgggacggcaaaaaagacgacgaccaatggaaccgagaaagctacctcgggaggctactgactcagccagcggctcggcatcaagtgctctgaggaggagatcgacatgtagatgactcgcgtacaatttactaagccggtgaaattgttgccgcttgtatagtgtgtgctttatggagtagctgattctggaaattaccaatggacagttgaagtctggagctagatctgttgtatgcatgttactgtcctgttcatgtcttccaggtatcacacagagagatattgactggtttcatcgaaaacatagatgaggttgctaagcctcacggtcctagtcattcaggcgctatttcaaacgagatatagatgcgttaaatgagccttaccttcctattcgtccttgctctaatttgggcactgttgttagcagggcttggcctgggtgctctgttagatgtatgggcaggacatgattttcctattattttttatcttgctgttggtgggtccttgctttcttacatatattcagctccacctctgaagctcaagcagaatggatggattggaaactttgctcttggtgcgagctacattggcttgccctggtgggctggccaggcattatttggaacccttactcctgatattgttgtcctgacttctttgtatagcatagctgggctagggattgctattgtaaatgactttaagagtgttgagggagatagagctctggggcttcagtcactcccggttgcttttggtatggaaactgcaaagtggatatgtgtaggagcgattgacataactcaattatccgttgcaggctaccttttcagttccggcaagccttattatgccctggcactgctaggactcacaattcctcaggtggtctttcagttccaatacttcctcaaggaccctgtgaagtatgacgtcaaataccaggcaagcgcgcaaccgttcttcgtcttgggccttctggtgaccgcccttgcaaccagccactgatgaaagcagcaatcgccctggactgtgattctgtgacagcgaagttttgggtggaagatgcagattgatggttctctgcaactgttggtggagctaggttcagcagctatgttcgcgagtgtattagcgctcttttggcggtgctgggtagtagaatgtagaatcgtttcttgttgattccctgaactgatccagatcaaacatcttctaaaggttctgcgatgcaatgctagctgcagacgggagatggtacagggggtcgttttgctactttgccgccgatgttgtagggtgtgtagacagactgtagatgaataatgtcagtaacacctgtggggggttcagtgctagtgggctgcaaaacttgagcactgcttcgatcaaattgtgtctttgattatgaaattatggaatccagcacaggcaggtaataatttcgtaatagagcataaacaatttgtgaccttaggtgcgaagaaaaaacaaaaaaaaaaaaaaaa

SEQ ID NO: 3165 - DNA, 2421 bp, Oryza sativa
  Clone ID: PAT_MRT4530_27544C.1
atctcctcttctcctctcctccctttttctttcttgtgctaatattatatccgtctcgcggcgacgcgacgatcatggagacccgggacgacgtcgccgacgcctcggcgcttccctactcctactcgccgctccccgccggggacgccgcctccgccgacctcgccgccgcccgccgttcccggaggcgcccgctctgcgtcgccctgttcctcgcctccgccgcggtgatcctcgccgtggcggtcctctccggcgtcaggctcgccgggcgccccgcgacgacgacgatggtcgtcccgggggtggtggagatggagatggcgagcagggggccggagtccggcgtgtcggagaagacgtcgggggcggaggagatggtgaggctgatgggcggcgcggcgggtggggaggcgttcccgtggagcaacgcgatgctgcaatggcagcgcaccggattccatttccagcccgagaggaactggatgaacgatcccaacggtccggtgtactacaagggttggtaccacctgttctaccagtacaacccggatggggcggtgtggggcaacaagatcgcgtgggggcacgcggtgtcccgcgacctcgtccactggcgccacctccccctcgccatggttcccgaccagtggtacgacgtcaacggcgtctggaccggctccgccaccaccctccccgacggccgcctcgccatgctctacaccggctccaccaacgcctccgtccaggtccagtgcctcgccgtcccctccgaccccgacgaccccctcctcaccaactggaccaagtaccacgccaaccccgtcctctaccctccccgcaccatcggcgaccgcgacttccgcgaccccaccaccgcctggcgcgacccctccgacggcgactggcggatcgtcatcggctccaaggacgagcaccacgccggcatcgccgtcgtctaccgcaccgccgacttcgtcacctacgacctcctcccgggcctcctccaccgcgtcgaggccacggggatgtgggagtgcatcgacttctacccggtggccggcggcgagggggtggacatgacggaggcgatgtacgcgaggaacaagggggtggtgcacgtgatgaaggcgagcatggacgacgatcgccatgactactacgcgctggggaggtacgacccggcgaggaacgcgtggacgccgctggacgccgccgccgacgtcggcatcggcctccgctacgactggggcaagttctatgcctccaagaccttctacgatccggccaagcgccgccgcgtcctctggggttgggtcggcgagaccgactccgagcgcgccgacgtcgccaagggttgggcttccctccagtcgattcctcggacggtggagctggacaccaagacggggagcaacctgctgcaatggccggtggaggaggtggagacgctgcgcaccaactccaccgacttcggcggcatcaccgtcgactacgcctccgtcttcccgctcaacctccaccgcgccacgcagctcgacatcctcgccgagttccagctcgacccgctcgccgtcgacgccgtcctcgaggccgacgtcggctacaactgcagcaccagcggcggcgcggccggccggggcgccctgggccccttcgggctgctggtgctcgccgacaagcgccaccgcggggatggggagcagaccgccgtgtacttctacgtggccaaggggagcgacggcggcgtcacgacgcacttctgccaggacgagtcgaggtcgtcgcacgccgacgacatcgtcaagagggtcgtcggcaacgtcgtcccggtgctcgacggcgagaccttctccctccgggtgctcgtcgaccactccatcgtcgagagcttcgcgcagggggggaggtccacggcgacgtcgcgggtgtaccccacggaggccatctacgccaacgccggcgtcttcctcttcaacaacgccaccagcgcgcgcgtcacggccaagaagctcgtcgtccacgagatggactcctcctacaaccaagcctacatggcctagactcctctcttcttcttcttcttcttcttctccattattacattattgctgcttacttgtaaatcatttttgacgccgccgcctgctgctagctgctggcctggccttcagaattttatctctttgcttcttttttttttttgtctctgctttaattttgtatctcgatcgatctcgaccgatcgattaattactatatctccatgaagaaatgcatggatgatggatcatggatggatcgctcccttcgatccaactgtacctaggggaagaagatgccatggtcaagcaatacttctgtaaatgtttcacatgagtcaagatttatgcagagttataatatatatgtttctctctc

SEQ ID NO: 3166 - DNA, 2080 bp, Oryza sativa
  Clone ID: PAT_MRT4530_27686C.1
tttgtgttttacatcaaaaagctttgactgtttgagtatgagtatgattaccatcacaaaaaccacagggagcaaaccaccaacaagcgccgatccacagaagtaaatcaaacccgtatatatctggagtactagcgtatagggcccccccaatcccaaggccaccgaggtgaccgtgcgcgccacgacacacttacacccctcactgtactccactaagcccacgaggccacgacccacactgtgcgcgcgcgcggcattttgaccgaacaaaagctgaagcttgacactgttcttcagacttcgaaagaatctgcagctcataaagccggagcactttcacatttcgagccactgttcccagcgaatcaacgactttagcaatagaaacactcccgccctcgcgcacgctgttctccgcgaaccgcacgctggccgcgttgaaacccttctcgcgctcgtgatccgaccactcccggctgtagtactcctccgccgtggcccccttcctcgggcctacgagcatgccgccccactgcgggaagtagatgagcatgacgggcagcgtgcacgcgatgatcatgagccccatgtacttgatcccggtctccgtcttgtactttgtgccgtggaagaagatgtactgcgtcagcacggcgcccacgttgcccccgccgccggtcatcccggagatgagccccagcgacctccgcgacacgaacggcacgatgccgaaggtgagcccgcacgcggcctggacgaagaaggagaagagcaccatcacggcgacggacgcggcgaaggagaagtcgacgattccgagcaccacgcagaggacgccgccgatggtctgcacagtccacagcccccacagcctgccgcgcatgccgtaccggctggagagccagtcggagagtagcccgccgccggggcgggagatgatgttggccatcccgaagctggcggcgatgagcccggcggtctggaggttgacgtcgaagcggtcgtagaagtactggtgcacgacgttgtcgatggtgagctcgacgccgaagctgtagccgtaggtgagcgccaggatccagccgcggtagttggtgagggcgtggcgcagcacgttgccgaagctgtccttgtgcatgtcgccagtcttgtggagcttcccgtagttgccgccgggcatgtcctgcccgaacgccagcacggcgatggccgagaacgtctgcatcaggcccgggatgaagaaggcgatgcgccacgccgtgaacggcgtgctaccgatcttgtggatggcctcgtacacgagcggcatgagcagctggacggcgccgccgccgaggttgccccagccgccggccacgccgttggccagccccactttgggggccgagaacatggagctcatccagaactgcgccgacacgaacgacgccagcgagatgcccgtgaagaagcgcacgaggaggtaccccgacggggactggatgatggaggagcagtacaccgccggtgtggtgaggaggatcagagacgcggaggccagcctgggcccgaccaggtcgcacgccgtgcccatggccagacgcgcgaacacggcgcccgacacggacgcgatcccggcgttgccgatgtccgtggccgtgagcccgagggtgtcgcggatgagcggcagcagcggcggcgcggcgaacgtggacacgaagcagcagaagaaggagaaccacgccatgtggaaggaggccatgtgtggcctcgcgaaggagaagagccagaactccgtcgccttgaggtcggagtccaccggcatcctgaaccgcggcttgccccccgccgcctcgaccccctccacctccatcgccaccggcttagcctccatctccaacacgtggtagcaaggctagcagcttagctagtgactgtgtgtacgtacatccgctgtgccctgcgcgtcagctcttatagcatagcggaaagcgcggctccggcagcgcggcgcggcgtggcgcgatggttgggtgcggcgagagggcaaccggtggagagaaaatgaataaagatttcgaacgtgatcttacgcgac

SEQ ID NO: 3167 - DNA, 2481 bp, Oryza sativa
  Clone ID: PAT_MRT4530_27817C.1
gcgaccggccgtccagacggagaagcgagaggggaagagcaccgacctcgacctagctaattaaggcgcaacacagaaaccctcaccgccgcccgcatccatggcggaggagcacgagacgaggccgccgtccgccggaaggccgccgtcgtccggccgcggcagggccgacgacgctgacgagagggaggagggggagatcgccgacgacgactccggccacgcgccgccgcaggccaaccccgccgcgccgcacccgctcgagcacgcctggaccttctggttcgacaacccgcagggaaagtccaagcaggcaacctggggaagctccatccgccccatccacaccttctccaccgtcgaggacttctggagcctttataacaatatccatcacccaagcaagttggttgtgggagctgacttccattgctttaagaataaaatcgagccaaaatgggaagatcctatctgtgctaatggaggtaaatggaccttcagctgtggcagaggaaagtccgacacaatgtggttgcatactttattggcaatgattggcgaacaattcgattatggggatgaaatttgtggagcagttgttagtgtgcgtggcaagcaggaaagaatagctatctggactaaaaatgctgccaatgaagctgctcagataagcattgggaagcagtggaaagaatttctggattacaaggactcgattgggttcattgttcatgacgatgcaaaaaagatggacaaaggtctcaagaaccgctacacagtttgatctgagcactcctgtccagatatccaagagagtagtatatccacatgtaggatgggttttcttcgatgctttagtgtttgtcattcgcttgtagcgagcgcttgaaggctataatattgccgtgaactgtttaaacttgaaacgtaatataatgacgtatcagaggtgtctctgtactctataaatcagtccagttcttcccttgtaactctgatgtcggctgtgatccctcaaaggttggcacggataatggcgctcaaccatgccaatatcaagttgttgtatcagaatattccgctaaaggttcttcagcaaatatttctgaggttacgtctgctgatccatccgaagtcacaaggatatttaccatggggctgccttatacgtctcagcatggaggtcagatcctctttgggcctactgacggatatctctacctcatgatgggggatggtggaggaaagggggacccttttaatttctctcagaacaaaaagtcgcttctgggaaaaattatgaggcttgatgttgataatccaccaagtaagtcttccagtacaggacagagtgaaattgctaaccagagcttgtggggtaactactccattccaaaagacaacccatacactgatgacagtgacttagaaccagaagtttgggcattgggtcttagaaacccatggagatgcagctttgattccgcgaggccttcctacttctactgtgccgatgttggtcaggatcaatacgaagaagtagatttgatctccaagggtggaaactatggatggcgtgcatatgaggggccacttgttttcaatccaccttcggcacctggagggaacacttccctcaattccataaacgccattccccctatcatgggctacagccattctgatgtcaacaagaagattggatctgcgtcaataataggtggtaatgtttatcgaggatctaccgacccctgcttggtcggaaggtacctatacgccgatctgtatgcatcagcgatgtggaccggcacagaggctccagagagcagcgggaactacagctcgagtctgatctccttcagctgctccaagagttctcctatagcgtgtgacactgctgctggaagccccctcccatcacttgggtacatatactcgtttggcgaggacaacaacaaggacacctacgtcctgtcgagcaagggcgtctaccgggttgtgcggcccagcctctgcggctacacctgtccaacagagaaacctgcgacgaacactgggacgacgacgccttcgtcagcggcatcatctagtatcttatccgatgttgagatcaatggtttttatttagaattaaaggtgttgcaagtgagtttgccagattcttcgatgttcgtgcctgagattctgaagtttgttatggatgcattgttggactgtccggataggttgctagattgctatccaaatgtttcagttgcctatcgaattctcttaactgtacctatgacggtagcttcagctgaaagaagtttatcaaaattgaggttgttgaagaactatttgagatcaactatgtcgcaagaaaggttaaatggcttggttatgtgctctatcgagaatgatatcttggacactattgatcttaataccgttcttgatgattttgcatcaagaaatatccaaagaagtatcttttcataa

SEQ ID NO: 3168 - DNA, 1154 bp, Oryza sativa
  Clone ID: PAT_MRT4530_28152C.1
cgggctgcaggaatcggcacgagggcgacacttcttcgcagttcgcgtcgcgcacacactctccctttgcctcgcgcagaggcggccgcgccttctccgccgcgaggcatggccggcgccgccgccgccgtggaggacgccgggatggacgaggtccagaagcggctcatgttcgacgacgaatgcattttggtggatgaacaagacaatgttgttggccatgaatcaaaatataactgccatctgatggaaaaaatcgaatctgaaaatctacttcatagggctttcagtgtattcctgttcaactcaaaatatgaactcctactccagcaacgatctgcaacaaaggttacatttcctctagtttggaccaacacttgctgcagccatcctctgtaccgtgagtctgagcttatacaggaaaactaccttggtgttagaaatgctgctcagaggaagctcttggatgagctgggcatcccagctgaagatgtgccagttgaccaattcacccctcttggtcggatgctttacaaggccccatctgatggaaaatggggtgaacacgagcttgactacctgctgttcatcgtccgcgacgtgaaggtagtcccgaacccggacgaagtggccgatgtgaaatacgtgagccgtgagcagctgaaggagctcatccgcaaagcggacgccggagaggaaggcctgaagctgtctccctggttccggctggttgttgacaacttcctcatgggctggtgggatcacgtcgagaaaggcaccctcaacgaggccgtggacatggagaccatccacaagctgaagtaaggactgcgatgttgtggctggaaagaatgatcctgaagactctgttcttgtgctgctgcatattactcttaccagggaagttgcagaagtcagaagaagcttttgtatgtttctgggtttggagcttggaagtgttgggctctgctgactgagagattcccttatagagtgtctatgttaatttagcaaacttctatattatacatgattagttaattgttcggtgtctgaataaagaacaatagcatgttccatgtttatttgctacatatatgatgatgatgatgccattccctcgtaaaaaaaaaaaacaaaaaaacagcggccgc

SEQ ID NO: 3169 - DNA, 512 bp, Oryza sativa
  Clone ID: PAT_MRT4530_28392C.1
taataagcggatgaatggcagaaattctatagaggatggatgaagttaaatgttgacgggtttttgatgcaacctcaggaactggaggtctaggtgctgttctcaggaatagtttaggctctgtcattttgtcatttttttcagcctgcggttctatggagagatgtagcagccctcttgaagctgaacttttggcttgcaaagaaggcatcaatctagctctacaatgggctctgctgccgctcattatggagtcggattgtttggtcgctatcaatatgatccagtcaccagggagggagatgtcccagcttgcttaccttgtcagggacatagaagagctgctggcaggcgatagagtggtcagcattcagaaagttcagcgatgccagaataacataagccactttttagctaatagaggccgcactaattttctttctgagttctggccagatggctcttgtaatctcatttcacagtttgtgaatgaggaagctttaaatgagtaa

SEQ ID NO: 3170 - DNA, 359 bp, Oryza sativa
  Clone ID: PAT_MRT4530_28680C.1
gctgatttttcaagacaaaaacaagtacaacacacgggggggctatttgtagtgcgatgtaccatcaaggacatcactggccaaatcatatctgctagtatagcgggtgatatggatcttgcttctgcctactcgcatgagttgccacgatatggtcttgaagctggcttgaccaactatgcagctgcctactgcactggccttctgttggctcgccgtgtgctcaagatccggggttcggatcaggagtacaagggcaatgttgaggccactggtgaggacttctttgttgagccagcctatgagaggaggcctttccgtgctctcttggatgttggccttatcaggactacaacagg

SEQ ID NO: 3171 - DNA, 2283 bp, Oryza sativa
  Clone ID: PAT_MRT4530_29154C.1
atgcagcagcaccagggtggcgggtcccagtacggggccgtgccgccggacatggggccgttctcgccgacgcatcatgcttcggcgccggcccccctgccgctgagcagccggccaccgccggcggcgttgtctcagccaccgccgccgcagcagcagcagcagcaaccgaggacgagctacgacgagctggccgccgcgaccagcgccggcgcgggcggcttccccgacgacgacatgctgggcgacgccggcggcagcggcggcggcggtgggtcgggagcggccggcaaccggtggccgcgggaggagactctagccctcatcaggatccggtcggagatggacgccaccttccgcgacgccaccctcaagggtcccctctgggaggaggtctccaggaagctcgcggagttgggctacaagagaagcgccaagaagtgcaaggagaagtttgagaacgtccacaagtactacaagcgcaccaaggaagggcgcgccgggaggcaggacggcaagagctaccgcttcttcactgagctggaggcgttgcatgccgctgcgccgcagacgccccagccgcagcagcagcagcagcagcagttgccgccggttacaagcagcgcacccgcgatgcacgccttcgcgccgccggttcccgcgccaccgccgatgagcgcaatgccaccgccgccggggccgatccagccggccccgatatcttctgcggctcccgcggtgcccctggagctgccgccgcagccgcccatcaacctgcaaggcttaagcttctcgtccatgtcggggtccgagtcggacgatgagtctgaagacgacgagatgacggcggagaccggcggcagccaggaccgcctcggcaagcgcaagcgaggcgccggcggcaaaaggctggcgactttcttcgaggggctcatcaagcaagtcgtcgacaggcaggaggagatgcagcggcggtttctggagactatggagaagcgagaggcggagcgcacggcgcgggaggaggcgtggcgcaggcaggaggtggcccgcctcaaccgcgagcaggagcagctcgcccaggagcgcgccgcggcggcctcccgcgacgccgccatcatctccttcctccaacgcatcggcggtcagtccgtacaggtcccacccgccgccaccgtcatccagatgcccacaccggtgcagctccagacccctccgccggtcaagcaacctgccaggcagcaccagccacagccaacgccgccgccgccgcaggcggcgccaatcccggccgcgcccctccagcagcaaccgccgcagccgcagcacaaggagacgattccccccgaggcagtgacgccgcgcagggcgccaccgacgtccggctcatcactcgagctggtgcccgcggcggagcagcacgtcgagagcgggctaggaggaggggagggcgggtcggcgtcgtcgtcgcggtggcccaagacggaggtgcaggcactcatacagctgcgcatggagctcgatatgcgctaccaggagaccgggccgaagggcccgctctgggaggagatctcgtcggggatgcggcggctggggtacaaccggagctcgaagcggtgcaaggagaagtgggagaacatcaacaagtacttcaagaaggtgaaggagagcaacaagaagcggcccgaggactccaagacatgcccgtacttccaccagctcgacgtcatctaccgcaggaagcacctcaccggcggtggcggcggcggcgcttccgcggccaatgtcgccgccacggcaatcgagcaccagaacccgaaccggcacgagatagaggggaagaacataaacgacaacgacaagaggaagaacggcggaggcggcggcgcgcaggtgcccaccagcaatggcgacacggcaccgaccacggccacgttcgacgtcgatagcggcatgaagaagcgtttcaagctcaatatgcgaatgttcgtgcggaagctaaccggaaatccgcttgccgtgaagccagaagacattgtgagggagctgagcgagcagccgccccgggagttcacaacggacgagaccgacagtgacgacatgggcgatgactacaccgacgacggcgaggaaggcgaggacgacggcaaaatgcagtacaggatacagttccagaggccgaacccgggcggcgccaacaccgcacctccgccggcgacaaccccggcgtccgcggtgccaacctcgactccgacgagcaccttcctcgccatggttcaatag

SEQ ID NO: 3172 - DNA, 1499 bp, Oryza sativa
  Clone ID: PAT_MRT4530_29234C.1
cggacgggtccatctcgtcaacaaaaaggcgcctctaagaattcctcccaaactttttggtgttgtcaagccgtgcgtttcggggtacatcaacggcggcgatgagctcccggatggccggatcggcgatcctccgtcacgtcggcggcgtccgcctcttcaccgcgtcggcgacctctccggcggcggcggcggcggcggcggcgaggccgttccttgcaggcggagaagccgtccccggggtgtgggggttgcggctgatgtccacgtcgtccgtggcgtcgacggaggcggcggccaaggcggaggccaagaaggcggacgcggagaaggaggtggtggtcaacagctactggggcatcgagcagtcgaagaagctggtgcgggaggacggcacggagtggaagtggtcttgctttaggccatgggagacctacaccgcggacacttcgatcgatctgacgaagcaccacgtgcccaagacgctgctcgacaagatcgcctactggaccgtcaagtcgctgcgcttccccactgatatcttcttccagaggaggtatggctgccgcgcgatgatgctggagacggtggcggcggtgccggggatggtgggcggcatgctgctccacctccggtccctccggcgcttcgagcagagcggcggctggatccgcacgctgctggaagaggccgagaacgagcgcatgcacctgatgaccttcatggaggtggcgaacccaaagtggtacgagcgcgccctcgtcatcaccgtccagggcgtcttcttcaacgcctacttcctgggttacctcctctcccccaagttcgcgcaccgcgtcgtcggctacctcgaggaggaggccatccactcgtacaccgagttcctcaaggacctcgaggccggcaagatcgacaacgtccctgccccggccatcgccatcgactactggcgcctccccgccaacgccacgctcaaggacgtcgtcaccgtcgtgcgcgccgacgaggctcaccaccgcgacgtcaatcacttcgcatcggacatccattaccagggcatggagctgaagcagacccctgcgccgatcggatatcactgaggatgtttgtctactgccgaggatttgcatcactaataatcaaatcaaatgagtatacttcgtttttcagggaaagcaaatgagagctctttagctgtatcggatttggtaattgctactagtaactactaagtactgaaaaataaggagtctccttgtttgaagtacaaatctaggagattttttgaaccaactctatctgaattgggcctgtttttcgtacgccgcactgcttcatgtacatatattccatcccctatcttatgtgtggcaagtgtctttctaaattcttggatgtaatgacacctgaatttctttcgttgaactattggcagctgagttatatatactacataccattcttttgttaaaaaaaaaaaaaaaaaaaaaaaaaaaaaa

SEQ ID NO: 3173 - DNA, 2007 bp, Oryza sativa
  unsure (1)..(2007): unsure at all n locations
  Clone ID: PAT_MRT4530_29468C.1
ggacgnncngnccgngagcttggctgagcttgagctgagctgagctgatcggcggcggcaatggcgggcggcgcgatggtccagacggtgggtggcaagacgtacccggggaagatgaccgcgttcgtgttcttcacctgcctcgtcgcctcctccggcggcctcatcttcggctacgacatcggcatctccggcggcgtcacctccatggactccttcctcagcgagttcttcccgtcggtgtacgcgcaggcgaaggcgagcaaggacaccaaccagtactgcaagttcgacagccagctgctgacgctcttcacctcgtcgctgtacctggcggcgctggcgacgtcgttcgtggcggcgtgggtcacccgggtgttcggccggaagtggtccatgttctgcggcggcgtcaccttcctcgccggctcggcgctcaacggcgccgccaccgacgtcatgatgctcatcctcggccgcatcctcctcggcatcggcgtcggcttcgccaaccagtccgtgccgctctacctgtcggagatggcgccggcgaacctccgcgggatgctcaacatcggcttccagctcatgaccaccatcggcatcctctccgccaacctcatcaactacgcgacgtcgagcatcgagggcgggtgggggtggcgcatcggcctcggcctcgccggcgtgcccgcgctcatcatcacgctcggcgcgctcgtcctcccggacaccccaaactccctcatcgcccgcggctacgccggcgacgccaagcgcgtcctcgtcaagatccgcggcacggacgacgtccacgacgagtacgacgacatggtagcggcaagcgaagaagccgcctcgatcgagcacccatggcggaacatcctccatcgcaagtaccgcccgcagctcaccatcgccatcctcatcccgtgcttccaacagctcaccggcatcaacgtgatcatgttctacgcgccggtgctcttcctcaccatcggcttcgccggcgacgcgtcgctcatgtccgccgtgatcacgggcctcgtcaacatgttcgccaccgtcgtctcgatcatctccgtggaccgcctcggccgccgcgtgctgttcctccagggcggcacgcagatgttcatctcccaggtggtggtcgggacgctgatcgcgctccagttcggcgtcgcgggcgtcggcgagatgtcgcggtcgtacgccatcttgctcgtgctgttcatctgcatgtacgtggccgggttcgcgtggtcgtgggggcccctggggtggctggtgccgagcgaggtgttcgcgctggagatcaggtcggcggggcagagcatcgcggtgtgcgtcaacatgatgctgacgttcgtcatcgggcaggcgttcctcaccatgctgtgccacctcaagttcggcctcttctacttcttcgccgggtggatgctggtcatgaccaccttcgtcgcgctcttcctgccggagacgaagggggtgcccatcgaggagatgaaccacgtctggagccggcactggttctggggcagctacgtcaccgcccacgacgtcgccggcgccggcgccggaggaggaggaaaccgcagaagccacaacgtctagctcttacatatactattaccgtttacgagttacgcgagagagagagaattaatgggtaggttgtgtaattaggtaatgcaagaattaattaaaccaattaatttcaagggacaggtttttaattaattaattaattcggggaggggggagctttagaatttggtcggggcaggttaatttcagggtatttgttgtatagattttgaattttataggtgttttctttttatgaaattcttatgtagtaaattctttggagagcgcttcaaatatcgcatggtgttgccgcgcatgtaaagtactgtttctctaaccaataaaaaatgtttcaacaaaaatgtatcagttatgtgtatcttgaaaataaaaaatgtttcgtttctcttt

SEQ ID NO: 3174 - DNA, 2032 bp, Oryza sativa
  Clone ID: PAT_MRT4530_29514C.1
cactcctctcccctccccacgcaaccgccttcctccgccgccgccgacgccgacgccgacgccgaccccttctcccaatctgcggattccagcgggggtcccccccccctcccaccggcggcgcccggtggtcgtggtcgtgggggaggggagtcaacgaacgagccgagccgcccgcttgccggagctctctatctatctctctatctctatctctatccctccagattccctcctccatcgaatctctgatatttggagggagcgactcgacgcagcatcgcatcgtaaggaaggtcccctccactgtcgatggatcagcaccagctcgacgaggagaaccagagagccgcgctcttccactcctctgccccatcttcctctttgggagctgacggggaggaggagagggagactgtgccgctgctgtcctgcaagatggccgacgataaatctgacactgtccaggtctccgaggatacggcgcaccagattagcattgatccctggtatcaagttggattcattctgacaaccggggtgaatagtgcatatgttctgggatattctgcatcaatcatggtccctttaggctggattggtgggacatgtggcttgattctagctgctgcaatatccatgtatgcaaatgctcttcttgctcaccttcatgaagttggtggcaaacgccatatcagatacagagatcttgctgggcacatatatggtagaaaaatgtattcgcttacatgggctctgcaatatgttaatctattcatgatcaacactggccttatcattttagctggtcaagccctgaaggcaatatatgtattatttagggacgatggagttctaaagctaccctactgcatagcattatctgggtttgtctgtgctctttttgcctttggaatcccttatctgtctgctctcaggatttggttgggattatcaacagttttcagtctcatctatataatgatagcatttgtcatgtcgcttagagatgggattaccacacctgcaaaggattatactattcctggatcacattcagatagaatcttcactacgataggtgctgtagcaaaccttgtgttcgcttacaacactggaatgctcccagaaattcaagcaaccataaggcctcctgtggtcaagaatatggagaaggctctatggttccagttcactgttggttcgttgcctctttatgctgtcacctttatggggtattgggcgtacgggtcctcaacatcaagctatctactgaatagtgtgaagggaccaatttggataaaaactgtggcaaatttatcggcgtttcttcagactgtcatagcattacatatatttgcaagcccaatgtacgaattcttggacacaagattcggcagtggacatggtggtccttttgcaatccacaacataatgttcagagtgggtgtcagaggaggctacctgaccgtcaacaccttggtggccgcgatgctccccttccttggcgacttcatgagcctgacgggtgcactcagcacctttcccctgacattcgttcttgcaaatcacatgtacctcacggtgaagcagaacaagatgtccatcttcaggaaatgctggcactggctgaacgttgttggcttcagctgcttgtccgtcgcagctgcggttgctgcggtgaggctaatcacggtcgactacagtacataccatttgtttgctgatatgtgaggctggaaagtgcaagcatgcagccctggatcagctgtaaattcgtcctcttcttttttatttttttggttaggggatgcatgtaggtcgatagaatgatggagattgcaataaataatttggctaaaatgttgtccagatttggttgtttgaggtgcaagatgtttgcctcaaaacgtaccgctatggttcactttttaagaactgtactgctacctctgtttgcggagatttttgtctgcaggcatgcaggatgaatattattcaagtgctctaaacgaggatccgggtaccatgg

SEQ ID NO: 3175 - DNA, 1804 bp, Oryza sativa
  Clone ID: PAT_MRT4530_29596C.1
ccgcggctgttgttttttttttttttttttttttttttttgcaaccttttatcttatttaccaagggaaagaaaggagaatgtataatagagaagctaattactgtacattatttagtgtacctcttcttcacataactactgtagttaatactacagtgtgtgccttagctttttatatggatcactatctgcctaaacatttctcactgcaataataatagtaaaccaccaattacaagacgaaagaacagtacaatttaggctggttcataaattttgcacaggagtttcttctgatgttggagattctgtttctgcaggcttcagaaacttcaggatatccatttttgttttctcagtacagcctgatccttgtggttatatgctgctggcacatagggcagcgcaccaaattcttcccgcattcataacaggtctgatgtccacatccaaatgcaagatcctttgatttatccatacagatagcgcacaaaagtcttccttctaaagaactttccgaggtataagtgtcaggtgcagtggtagccacaggctgtctctgtttgaagctttcagattgctgaaagccacttgtttgtgggccgaagctactagatcgtgaataaacaccagaatgttggtcaaagctagtagacctcgaataagcattcctcataggtggcggcagaggaattcttggctgtattctttggcgacggcctagaagttggagatcaagtgttgccttgtattgtgttgggatttccatcaaggcggatagtgcaaattctgcctccttcctgtcagctgctatgctctttgacatgatgtccgtgaaattcacaaactggaaattgtcaaatgagcgagcaggtatattgtcatcaaactgatgcatcatgtcccatggtccatcacccaccccaacaagaacaatagacaaggggaactggctagcttttactatagcatcaatcgtatcacgctcctgcgggcttaactgcccagactgtgtatcaacacttcgagtaacctgtccatcggctattatcagaagaacatgatactgaccaccagtgctgtctacaataccaattgctgtttcaatcatcggggcaaaagatgttggtccagctaatcgaagagtcggaacaatttctctgtatctttctaatgcctcttcaaatccgttgcatgggcggttctctggataaaagctgaatacctcctgatcatgagttgatgcgtcaccaaatccaaagcaaggaatcaaattatcttcatcaaaagctgaaagtgtccttccaataatagatattgcttgctcatatggatttggagtgtttccaatatcatgcagacatcggcgattgaaggaaagtttacctgtccattcattgctctttgtaaaatcaatgcctacaataagatttgatgattcaagacctgcttgtgccaaagcttcagtcacttgattcagagagcggtagtcatcaccaatcctcgagtacttcctctgcaacctggcatgcgtttctggctgcacatagttctccatagaaggagcataccttgtgttctgactggaagatgcatttgcagggtatgcagggtatctcgagttatatcccgatgatgaattcccatgatcatatgaagaagaatagctgtatgagggcttggagtcctttgcccccatttctcacctcagttgaattccccctgctacgcggcacgcctccgctccacgacgagagaggccccgaggaagacgacgacgatgagcgagcgagcgagcggag

SEQ ID NO: 3176 - DNA, 2023 bp, Oryza sativa
  unsure (1)..(2023): unsure at all n locations
  Clone ID: PAT_MRT4530_29796C.1
cggggggcttggtgttttttttttttttttaaccacgtagacacagcatactgcagttttctttttcattttgcattttgcattcttgctttaacaggggggaggggggacaaatgcaggtgctcgacaaagcgaatgatagtctgatacagcacacacatggcttgcttgatgacccagtatcatatactggaattcataagttgctattgccatgcaaggcttattgtaaaaccgtaagagcaactgtaaaaaaaattctgtccgtccgttctgaatgtacagggttgatcttgctttcaggtaatgacgtgctccgtcgctcttgacacgaatgacaaatctacagcttggatggaggccggtaccatccgtatggttcatctgagcagtacttggtgacttgcttcacgctcaagtagttatcgaggccccactgtcctagctcccggccaaaaccactccgcttgttccctccccatggagcttgaacaaagcatggttgcgagcaatttatccaaacgatacctgactggatagcctttgaaatgcgctcgcacctctctagatcattggaaatcacagcgccagctagaccatagtgagtatcatttgcaagttctactgcttcacgctctgtcctaaattctttaacgcagatgaccggtccaaagacttcctctcgccaaatttgcattgatgtgctaacatttgttataatagtaggctcaataaagaacccccttttgaggtgttgtggtcgggcacccccatatagaattgtggcaccttcacatcttgctgttgagatgaacttcattattttttgatactgcccttcactaacgactgaccccagcctgcaaccttcttctagtggatctgagattttgatactctttgcccatgcaaccaacctatccaagaatcgctttgcaattttctcatgcaaaagtagacgagaagtagcactgcagacttgaccagcgttcgcaaaacacccaaacatggcccactcaacagctttatcaatatcaacatcatcaaagacaataagaggacttttgccaccaagctctaacgaaacaggcttgaccatttgggaagcagtaatcattatcctcttaccagtttctgtgcttccagtaaaagcaatcttatccacatggggatgtgaagctaatggagcaccagcttcagtgcccagaccagtaattatgttcaagactcctggaggtaatccaatttctgcacatattccaccaagctctaaacatgtcagggaagcaagctcagatggctttaatacagctgtacacccagcagccagggcaggtgcaaccttccaagtagccatcagcagaggataattccagggagtgataagtccaacaaccccaatgggttctttgagtacataggactcaaaattttccatgggtagagagattggtgcccgttgtttcccatctaaagcttctgccagatcagcataatactcaaagcatgcagcgacatcctccatgtccccagctgcttcatccagaggcttcccagaatcaagagtctccaacaaagctagataagatttcttatctttaatcttagcggcgatcgccttgaggtacttggcccgcacggccccaggcgcgcgcgaccagtgtctcccaccgtcgcggccgaacgcatccctcgccgccgacaccgcgagctcgacgtcctccgccgtggccgccgggatgtcaccgatggttgcctccgtggccgggttgacgacggggaggcggcggccgagggacggctcccgccacccgccgccgatgaacaggccgcggcgggggatcgccgacggcgcggccatggcttccggttggggggcggcgcgagctgctgctgctgctgctccgctgtcgccgcggccttttgggttgtcccggaccttgggcgatcgacgacgagcactctctctcaccgattgatgagagcaaaaaaaagcggacgcgtggtcgacccgggaantccg

SEQ ID NO: 3177 - DNA, 379 bp, Oryza sativa
  Clone ID: PAT_MRT4530_30009C.1
tttttatccattcttctccagcttccacttccgtggatgcttccacgtagcagtcacagaacgcgatcgacatgggaaggtttgccacgacctagaagacccatgcctacttcaagcgtttgcacagtaagttcaagagacaggaggcagggcacgactgactacagggcacaggattaggctgagcaaccaagataagaacaaggccaacacaccggcgtaccgctttgttgcgagatgtacacacaaagatcttacatttgagattgtatatgctaccattgaggatgatatcgtgatggctgctgcctactgccatgagcagcctcgttatggtctggaagttggtctcaccaactatgcgagagcttactgcact

SEQ ID NO: 3178 - DNA, 282 bp, Oryza sativa
  Clone ID: PAT_MRT4530_30384C.1
atgaggaggtttctgccggtggggggaggaggaggaggaggggtggagccgtcgtcgtcgtcgacgacgccgcagcgaggggaggcggaggcggcggggctgcggttcggtgggggggacatctcgctgggcccgcacggcggcggcggcggcggcggcggagggggcggagggcatgggcatcagctgcaggacgggagcgtggacttgctggcgcggcacagcagctcgccggccggattcttctccaacctcatggccagcaacggagagaacggctag

SEQ ID NO: 3179 - DNA, 5332 bp, Oryza sativa
  unsure (1)..(5332): unsure at all n locations
  Clone ID: PAT_MRT4530_3082C.1
aatctataaaaggcgcagcccgtcgtcgagccctctcatccctcttctttgtctgatcgatcgattgcttctccctcctctcgctactagactagagagtaggtagagctagctttctagctcgtggatcgttaagtttgtagtcctgcccgggcgccggcggtgaggtcgcgatggccggcggcgcggtggtgagcacgggggcaggcaaggactaccctggcaagctcaccctcttcgtcttcttcacatgcgtcgtcgccgccaccggtggtctcatcttcggatatgacatcggtatatcaggtggtgtgacgtccatggacccgttcctgaggaagttcttcccggaggtgtatcggaagaagcagatggcggacaagaacaaccagtactgcaagtacgacaaccagctgctgcagaccttcacctcgtcgctctacctcgccgccctcgtctcctccttcttcgccgccaccgtcacccgcgtcctcggccgcaagtggtccatgttcgccggcggcctcaccttcctcatcggcgccgccctcaacggcgccgccgagaacgtcgccatgctcatcgtcggtcgtatcctcctcggtgtcggcgtcggcttcgccaatcagtcggtgccggtgtacttgtcggagatggcgccggctcggctgcgggggatgctgaacatcgggttccagctgatgatcaccatcggcatcctggcggcggagctgataaactacgggacggcgaagatcaaggccgggtggggatggcgggtgagcctggcgctggccgccgtccccgccgccatcatcaccctcggctccctcttcctcccggacacccccaactcgctcatcgacaggggccacccggaggcggcggagcgcatgctccggcgcatccgcggctccgacgtggacgtgtcggaggagtacgcggacctggtggcggcgagcgaggagtcgaagctggtgcagcacccgtggcgcaacatcctccgccgcaagtaccgcgcccagctcaccatggccatctgcatccccttcttccagcagctcaccgggatcaacgtcatcatgttctacgcccccgtgctgttcgacaccctgggcttcaagagcgacgcgtcgctcatgtccgccgtcatcacgggcctcgtcaacgtcttcgccacgctggtgtccatcttcaccgtggaccgcctcggccgccgcaagctgttcctgcagggcggggcgcagatggtggtgtgccaggtggtggtggggacgctgatcgccgtcaagttcgggacgagcggcatcggcgacatccccaaggggtacgcggcggtggtggtgctcttcatctgcatgtacgtggcagggttcgcgtggtcgtggggcccactggggtggctcgtccccagcgagatcttcccgctggagatccggccggcggggcagagcatcaacgtgtcggtgaacatgctcttcaccttcgtcatcgcgcaggccttcctcaccatgctctgccacatgaagttcggcctcttctacttcttcgccggatgggtcgtcatcatgaccgtcttcatcgccctcttcctccccgagaccaagaacgtccccatcgaggagatggtgctcgtctggaagtcccactggttctggcgccgattcatcggagaccacgacgtccacgtcggcgccaaccacgtctccaacaataagctccaaccataatccgctcacgaatatcgtcgtccatgtctccgtcacgccctatattcttcttcttgtgttcatccccgtgtacagtagatgccttttattagtttgttttgttttgcctagtcagtcttcaatcttaatgtacgtgtgtttcttgtttggccaaattgatcttaattgctgtacctttcactgtcaaagagcgtcccttgttaccattatcacacggaaagattaatcaattaatttcactctgtatgtacagcaagaataacattagcagagtgtttacaggttgcccatctaaatattgttttgttcctcattagtcagcaatgaattattcaacacaatcaccatttgtcttccaatgtaatactactcaacaccatctaggaaaacatatcatacgaactgctgctgcagctgaaactcagcatattgtttgagctttatttaccaacaaattaaaagaaaacaggagagagcattggcagtctgaaaaacttattactgagcctttctctcgatctgaacatccccggcaccgccatattccatcagtctaggccctgaagctgccaccgccatgcttcggccccttggattcttcagaaaagagctcgaggcatgcccagaacgcgcatgccgtgaactctgtgccttgtaagaggatgtgctagccaccaacctcgaggatttacgatccgatctaccgctgcgatcggaacgatgggaagaagaaatcttgcgggtgtgccggtccgatacctcttttgagccagatgctcttataggatgcttgttgtagaaaccaaggtttggcaggagacctacaaggtacttcttcaggtgctcatcacctacattcttctgcgctgggttcccatctaggtttacggcttcaagagaactatagtttgcagccagctgaccaagccccttcgatgtggagatcttgttgtggcgcaggtccagaacctttagcttcagaagacggtgaagaccatctacctcactgatcttgttaccacccagatacaactccttcaaagaagaacaggacgccaaaccatggccaattctggatatcctattatagctgatgtccagtaagcgtaagcgtgtcaattctctaaggccctcaattgttgagatattattctttgacaagcttaacatgtgaagaccccttggaagagcccctgcagttattcgcacaattgaattcccagacaagttcaacaagcgtaggcctaagaaagcgctcaatcttggaattgcaaccaagccaaggtttcctaattgtgccgacgaagaagtcggagtcaatttcgaaatataagtgtaagctatctccatgccaagaggacttttagcatcaggccggacagcaggaacaccagccaccggctcattatattttgtcaacaccgagtttgaactttctccttgctcctcgacaagggtgccatcgtcaatatcaatttggttgatccaatcctcaattcttttaatgctaaaagttcttggggaaagttcatctgggtccacatcgaaatactggttgtcattaattccagttctgttgtgcttgagttcttcactaatatcctttgaatcacacaactttagatcactcgcatcaatgacaagtgatttgtggtagggagtgctatctctgttccacaagttatcttttctctcttgatctagagcttcattgatgccaccgtcattgttggaatggtgagaaccatcccctgtaccagagtagtagggggcaactggatcaactgattggtgaccgctcacatatttgttatcccaatattcatgacttagcatcccatccctaacaaaactttcttctgcacttgcagtagacctttgacccccatcagcagcatcagaacaacctattgaaccattgtcctcaaagttcattctttcatagacatctggagaagaaggtccagcacaatgcacatccaaatttgatttagagtgatgtggctcgacgctattcagataatcaaccttctcactaaccgctgaacacagatcgctattcagataatcaaccttctcactaaccgctgaacacagatcttcataagacctgcaacgaggccctagtatctcagaatcagcagaaccttctgtaccacaattggaattattctgaaatatagcagattgtgatcttggaaatttggtctggtcataacacaggtagtggctatcagagtcaacaacatggtcacctgaaggactgaccaagtcagacaaggcatcaaaagcattctcattgcccttagtgtttaacttagcagaatctccaacagctgaattgcttttcaaactagagcaatggcctttgtggtcacagtcaataatatcacattcagcaccttcactaaaatgatgatcatgatccttgtgaagcatgtttccaagagataggctcttctttaggtggccagactccttactgtcatcagagcatgcatatctgttcaagtcttcagatctccagcattcttgatgagacgatgggctagtatcatactgccggctaacatttgaatgatcatttacatctgtcaactggtttggacttgctgatccagcgttggacttcactgtttgatcctgagaatccatctgtgaaacagcaagcatggtatccttctgtgaagcaccgagaatgacttgttcagctggcagaaagtgttccctaagagcacaaaacgctttgaaaattgcaacagcaaggacgagatagaaatgaaaaggctttatgctcttatcgagtccatcgttggacgacccaatggcaacagttaatgagatacgagtacgagaggtcctggaccgaaagctccccagcactgtctcatctcgtgagcacatttgccctatgatgtgtggtactggtcgaggatgagaagcagaaaaacctanccataagtcaactctgatggcaatcacaagtacaacacaaacagagtcgacccaatcacattgctatatcaaaggactaccttcgatgagaactcagttcagcaaacgtgttacatctcaactattgttggaaattaaccataatcgaaaagaccctccaatgctcggcgtagtctccagatgtaagacgggcttttccccagaggcgaggttaagttggttgcagagtagttgcaaacccacacccacttagaggtgcgagatgtgcctgacctcttgatatctgccaggctggacgaaagattaaggaactagataattccagaaggatgcatatggttggcacaatccttcttcttccctctccgccttgtccgtccagaaaagaatccggctctaatggctaggagctagttggggtggtgtgcgctgcggcgaagagagtcaggagaacctacctcacctgtgattggatctgtaattatcaatctctctctctctctctctcgctgctgctgctccttcttcttgtttgggacttggagaccgaccgggtaaaggaaaggaagtgtttcttcgttttatttatttatttccctttttttttctggtgatgaggaggagaccgaagagaagcagaagggaag

SEQ ID NO: 3180 - DNA, 1821 bp, Oryza sativa
  Clone ID: PAT_MRT4530_3088C.1
ggaccgaccccgaggctgaagcgacgccgccgccgcaagccgtccgccttgctcctcctcgccgagagcttggtcctcgccgtctcctctccccacgcgcagatctaagcctagggttagggtttgtgtagctcgcagcgatggcgatcaagaggaccaaggcggagaagaaggtggcgtacgacaagaagctctgccagcttctcgacgagtacaccaaggtgctcatcgccgtcgccgacaacgtcgggtccaaccagctgcaggagatccgcaagggcctcaggggcgactccatcgtcctcatggggaagaacaccctcatccgccgctgcatcaaggtgcacgccgacaacaccggcaacaaggagttcctcgagctcatgcccctcctcgtcggaaacgttggcctcatcttcaccaagggtgacctcaaggaggtccgcgaggaggttgccaagtacaaggttggagctcctgctcgtgttggtcttgttgctcctgttgatgtggtggttccccctggcaacactggtctggatccatcccagacctctttcttccaggtgcttaacatccccaccaagattaacaagggtactgtggaaattatcacccctgtggagctcattaagaagggtgacaaggtgggctcctccgagtctgctctgcttgccaagcttggtatccgccccttctcatatgggctggttattaccaatgtctatgacagtgggtcagtcttcagccctgaggtgcttgacctcactgaggatgacctgatggagaagtttgcttctggtgtttctatggttgcctcagtctccctggcaatctcgtacccaactattgctgctgcaccacacatgttcctcaatgggtacaagaatgtgcttgctgttgctgtggagaccgaatactcgtacccacatgctgataagatcaaggagtatttgaaagaccccagcaagttcgctgttgctgccccagttgccgccgacagtggtgctgctgctccatcggctgccaaggaggaagagaagaaggaagagcccgaggaggagtccgatggtgacctgggcatgagcctcttcgactaagcctcttgccatatcgctgcaaagttgaaagttttgtttcaagttctgaacatcgaagtttgtttttaatctttagcatattaattttctactagacaagaatgtatccaacaatggtatcgttaattatgcattttggttgtgcccgtaaaaaaaaaaaaaaaaaaaaaaaaaaaaaaaaaaaaaaaaaaaaaataaaactccctgttttgtgctatcctgtcccggagagcacggatatacaccaacatccctctttgtgctttaaattcgtcggtctctcgtttgctccagcggtggacgctccgccctcctcccgactcttctcagtgcgccttccggtggcatgccctgtgccccccccccctcctaccggtccctggggccgcccccctcagcacccacccgctcgtttgtacatctgaccttgttgccaatctctgtcatgttaattgcttactaggactaggcatggatgcagcaatgaagtacgaccttatgcatagtgcttttgccccctgggcatgagcctcttcaactaaacctggttgccatattgttgaaaatccaaactgtcttgctcatgctttcaacatcgtagcttttttatagtgtctcctatattaattttacttctccacaggtttgcatccaacagtcgtgtaataacttgtgcgttctgaatttactcgtcttgcatcacatccccctttagacaagt

SEQ ID NO: 3181 - DNA, 1519 bp, Oryza sativa
  Clone ID: PAT_MRT4530_3089C.1
aaaacccacacctcgcgcgccgccgccgccgcaagccgttccgccgccttgctctcctcctccccgacgccgagtcctcttcgtgtgagctcgcactcgcagcgcagcaatggcgatcaagcggaccaaggcggagaagaaggtggcgtacgacaagaagctgtgccagcttctggacgagtacaccaaggtgctcatcgccgtcgccgacaacgtgggatccaaccagctgcaggagatccgcaaggggctcaggggcgactccatcgtcctcatgggcaagaacaccctcatccgccgctgcatcaaggtgcacgccgacaacaccggcaacaaggacttcctcgagctcatgcccctcctcgtcggaaacgttggtctcatcttcaccaagggtgacctcaaggaggtccgcgaagaggtcgccaagtacaaggttggagctcctgctcgtgttggtctggttgctcctgttgatgtggtggttccccctggaaacactggtctggatccctcccagacttctttctttcaggtgcttaacatccccaccaagattaacaagggtaccgtggaaattatcacccctgtggagctcattaagaagggtgacaaggttggctcctctgagtctgccctgcttgccaagcttggtatccgccccttctcatatgggctggtgatcaccaatgtgtacgacagtgggtcagtcttcagccctgaggtgctcgacctcactgaagaggacctgatggagaagtttgcatctggtgtttcgatggttgcctcagtgtccctggcaatctcatacccaactattgctgctgcgccacacatgttcctcaatgggtacaagaatgtgcttgctgttgctgtggagaccgaatactcatacccacatgctgataagatcaaggagtatttgaaggaccccagcaagtttgctgttgctgccgctgttgctgctgctgacagtggcgctgctgctccagctgcttccaaggaggaagagaagaaggaagagcccgaggaggagtctgacgtaagatgcagatacgtgcatcaagctagacttccaatcctgaccgtcgattttagattggacggcagcggcgaggaggaggcggcggcgccgctgctgctgctgccggcggcggcggcggcggcggaggagaggtgcccggggtgcgtgcaggagcagaggaaggcgaggcgcggagggcggatcccctacacggagctcttcttcgtcgccgttaccacactcgcttcttttatcgccggagagatggacgagatgaagggtatcgatcacgaacatgctttaccaatcacgtgcctcttccctttcctctacttcatggtaagggacctgcaagtagcacaaacagaggaggacattgggaattatgctggatttctcggtgctctaaatggtttacttgcgccaataaaggttaacacagcatggggtttgggtctggttgttggtccagctcttggaggctaccttgcacag

SEQ ID NO: 3182 - DNA, 817 bp, Oryza sativa
  Clone ID: PAT_MRT4530_31692C.1
ggcgggaagaagcaacagtgagtttgaacagaacaacgcgacgacccttgcagcgcacgaccccgcggactcgatccagatctagggcttctcgtcggcggcgatggcgggcaagggaggcaaggggctcctcgcggccaagaccacggcggcaaagagcgccgacaaggacaaggacaagaagaaggcccccgtctcccgctcctcccgcgccggcctccagttcccggtggggcgtatccacaggcagctcaagtcgagggcgtcggctcatggccgcgtcggcgccaccgccgccgtgtactccgcggcgattctcgagtacctaaccgccgaggtcctggagctggccggcaacgcgagcaaggatctcaaggtgaagcgtatcaccccgcgccatctccagctagccatccgcggggatgaggagctcgacacgctcatcaagggcaccatcgccggcggtggcgtcatcccccatatccacaagtcgctcatcaacaagacctccaaagagtgatgcgaaaaaaaaaaaactccctcatgtgctttgcttgactcgaagtttggtgggtgttttactgttaatttgttatgttttctcatttgatttgatgtatttgtgctacagtgttcaatccttagtgggtttaggtgccttttagtcttttgaaattatcgtgacaatgttggttgcagctgaattcttgtgaattcttcactccgtatgctgttctgaaccatccatctcgatgcttcagttcagattatcttgttaatgtttaagatcagttcgattgaaaaaaaaaaaaaaaaa

SEQ ID NO: 3183 - DNA, 2022 bp, Oryza sativa
  Clone ID: PAT_MRT4530_31733C.1
tcctaatagtcagttcccgcgccgtgtgaccaatactcaacacttaaaccgcgcgctttttagccgacccgagcagccggagagtgaggcgaggcgaagcgaagggaagagcgcgaggcagagtaagcagacgagaagaacagcgcgcggcgcggtagctgaggagagtggtgcggagatggatcacgaggcggacgcgtaccggacggacctgatgacgatcacgcggtacgtgctgaacgagcagagccgcaacccggaggcacgcggcgacctcaccatcctcctctcccacatcgtgcttggctgcaagttcgtcgcctccgccgtcaacaaggccgggctcgccaagctcatcgggctggccggcgagaccaacgttcagggagaggagcagaagaagctggacgtgctgtccaacgaggtgttcgtcaaggctctcgtcagcagcggccgcacctgcgttcttgtctccgaggaggacgaggaagcgacgttcgtggaccctgcgctgcgtgggaagtattgcgtgtgctttgatccactcgacggctcctccaacatcgactgtggcgtctccatcggaacgatctttgggatctacatgatcaaagataaggagaatgtgactcttgaggacgtgttacagcctggaaaaaacatggttgctgctggatactgcatgtacggcagttcctgcacgcttgttctgagtactggaaatggtgtcaatggcttcacacttgatccatctctcggggagttcatattaactcatccagacatcaagataccaaagaaagggaagatttattcagtgaatgaagggaatgcgaaaaattgggacgagcctaccgcaaagtttgtggagaagtgcaagttccctaaggatggttcatcacctaaatccttgagatacattggaagtatggttgctgatgtccaccgtacgttgctatatggaggagtatttttgtaccctgcagacaagaagagcccaaatggaaaactccgtgttctgtatgaagttttccccatgtcattcctgatggagcaggctggaggccagtctttcacaggcaaagaacgggctcttgacctcgttcctaccaagattcacgagagatccccaatatttcttggaagcttcgaagatgtggaggagatcaaagggttgtacgctgcacaggcgaagtaagctcggtttgatcgatctggcaccatcaaggcgtgcgaatggactccctggccttactgtaacatgcatgattcgtcaggcacttcttttattcgtcttactgtacgtttgtaaaattcagtgtaatagtgttgaggcctggaacagcttcatgagcaactaaggccttttctactattatttacaaaatacatacaccgtgcatctctagcagctaaagcactaatacaacaagtcactaaggcaaacctgtgcttcctgtcttcctggcaaaatattttttcagttttgggtaccccttttgagtagatattttacggtccttcagaaagtgtacctgcggtgcgggtatcaaaattttacactaaaattttagtacctcaaggtagtttggcacttctattaaacacatgatcaatggcggtgaaggattgttctggtgttatactactggtctactgccccaagtgctcaatgtactgagcatacagatccctgcaaacttgcaaagatgtcatcttgctgttacacgtgtaaactgtaaactactcaatatatcgttctaaaatctgaactgatggacagttcatcacttacatggaatactggatggcatcccgagcagcggtcacaggcagtacctcattcacggcgacctccttgttttcattcttcttgtagtcttcaaagaaacgccggatttcctggacgcgatgaggcgaaagctcactgagatcgttgtagtggcggtactcaggatcgtccacgcagacggctatgatcttgtcgtccttctctccctgtctccttaaagctgcagcccg

SEQ ID NO: 3184 - DNA, 1265 bp, Oryza sativa
  Clone ID: PAT_MRT4530_31736C.1
atggatcacgaggcggacgcgtaccggacggacctgatgacgatcacgcggtacgtgctgaacgagcagagccgcaacccggaggcacgcggcgacctcaccatcctcctctcccacatcgtgcttggctgcaagttcgtcgcctccgccgtcaacaaggccgggctcgccaagctcatcgggctggccggcgagaccaacgttcaggcaagtgtacctggcaataactgtcatctttctcagtttcttgtctctgagattgagataggagaggagcagaagaagctggacgtgctgtccaacgaggtgttcgtcaaggctctcgtcagcagcggccgcacctgcgttcttgtctccgaggaggacgaggaagcgacgttcgtggaccctgcgctgcgtgggaagtattgcgtgtgctttgatccactcgacggctcctccaacatcgactgtggcgtctccatcggaacgatctttgggatctacatgatcaaagataaggagaatgtgactcttgaggacgtgttacagcctggaaaaaacatggttgctgctggatactgcatgtacggcagttcctgcacgcttgttctgagtactggaaatggtgtcaatggcttcacacttgatccatctctcggggagttcatattaactcatccagacatcaagataccaaagaaagggaagatttattcagtgaatgaagggaatgcgaaaaattgggacgagcctaccgcaaagtttgtggagaagtgcaagttccctaaggatggttcatcacctaaatccttgagatacattggaagtatggttgctgatgtccaccgtacgttgctatatggaggagtatttttgtaccctgcagacaagaagagcccaaatggaaaactccgtgttctgtatgaagttttccccatgtcattcctgatggagcaggctggaggccagtctttcacaggcaaagaacgggctcttgacctcgttcctaccaagattcacgagagatccccaatatttcttggaagcttcgaagatgtggaggagatcaaagggttgtacgctgcacaggcgaagtaagctcggtttgatcgatctggcaccatcaaggcgtgcgaatggactccctggccttactgtaacatgcatgattcgtcaggcacttcttttattcgtcttactgtacgtttgtaaaattcagtgtaatagtgttgaggcctggaacagcttcatgagcaactaaggccttttctactattatttac

SEQ ID NO: 3185 - DNA, 1442 bp, Oryza sativa
  Clone ID: PAT_MRT4530_32113C.1
ccccgggcccccgggccgcggcgccctaaacctcacgacttcacgagctgcagcgagaggagcgaggactcgagaggcggacttggacgcggcggggcagatggagaacggcggcggcggcggcggcgatggcggcaagagcgacgtcccggcggacgccaacgagcattgccctgggacgcagtcggaggaggcggggaaggcggatgcctgcgccggatgccccaaccagcagatttgcgccaccgcccccaagggccctgatcctgacttggttggtattgttgaacggatggctacagtaaaacacaagatactggttctgtctgggaaaggaggtgtagggaagagtacattttcagcccagctctcatttgcccttgctgaaatggactgccaggttggccttcttgatatagatatatgtggccctagcatcccaaaaatgttaggccttgaaggtcaggatattcatcaaagcaaccttggttggtcaccagtctatgtggagtccaaccttggtgtcatgtcaattggtttcatgctgcccaacccagatgatgctgttatatggagaggacctcgcaagaacggactcatcaaacagttcttgaaggatgtcgattggggggagattgactatcttgtggttgatgctcctccagggacatcagatgaacatatttcaatcgttcagtaccttcaagccacaggaattgatggtgcaataatcgtgaccactccccagcaggtctctctaatcgatgtgcggaaggaaataaatttctgcaagaaggttggtgtgccgatcttaggtgttgtggagaacatgagtggcttgcggcaggttctctcagatttcagattcgtgaagcaaggtgagggaggcgagatggatgctacagaatgggcgctgaactatatcaaggagaaagctcctgagcttttgacaatggttgcatgcagcgaggtgtttgatagcagcaagggtggtgcggagaaaatgtgcaacgaaatgggagtacctttccttggcaaggtgcccatggatccacagctatgcaaggcggctgaggaagggaggtcatgcttcgtcgatcagaagtgcagtgctagtgcaccagctcttaaaagcatagtcaagaagctgatcgagaatcaagattgagtgaactttttttaaaaaaaggataattgaagactgagtgaactagtgatgatggtttctgggaaacgggatgcggagatatcgaagctcagtgtagatatacctgatactgtcccatatgttttgaagttcagttttggttgtgtagaactattctgcttgtggaatcactgaatcagtttttcagtctgatgtgaggaatgtgccataataaattgcatgatgctgcaagctcatccaaccagttgttcttgatatacattaaaaaaaaaaa

SEQ ID NO: 3186 - DNA, 660 bp, Oryza sativa
  Clone ID: PAT_MRT4530_32262C.1
attcggctcgagcaacctcttaccgagcgaatccctcaattcttttaaactaacaacatcatcaccatcgtcgcaccgaaatcaatcgccacaacctcgggatctcagattcgacgcgccaaatcatgtcgaaggcgcgtgtctacaccgatgtcaatgtccttcgccccaaggagtattcggattacgagtctctcacccttcaatggggtgatcaagatgattatgaggttgtgcgaaaagtgggcaggggtaaatatagtgaagtttttgaaggcataaatgtcaatagcaatgagcgctgtataattaagattctgaaacctgtcaagaaaaagaagattaaaagagagataaaaatacttcagaatatttgcggaggcccaaatattgttaagcttcttgatattgtcagagatcaacattcgaaaactcccagtttgatatttgagtatgtcaacagtacagattttaaagttttgtatccaaccttgactgattatgacatacgctattacatatatgagctccttaaggccttggattactgccattctcaaggcatcatgcatagggatgtcaagcctcataatgttatgatagatcatgagttacgaaaacttcgctggatagattggggtcttggctgattttatcatc

SEQ ID NO: 3187 - DNA, 1022 bp, Oryza sativa
  Clone ID: PAT_MRT4530_32410C.1
acgaggcccaaagcagcaattgcaagaagcaaaatctcttctcctcctcctcctcctcctcatcatcatcctcctctcgcccttcgacaacgcaccatagtttaacccaagctagaagaagaagacgatagatatgagcactactcgcggcgtctcctcctcttctgctgctgctgctcttgcgctgcttctcctcttcgccctctgcttcttctccttccacttcgccgcagctgctcgcgccgttcctcgtgatgaacaccaagagaatggcggtgtcaaggcagtagcagcagttgcagctgatcagcttgtgctccagctggaaggtgacaccggcaatggcgacgaggtctccgagttgatgggagcagctgaggaggaagcagcagcatgcgaggaggggaagaacaacgacgagtgcgtgcagaggaggctgctcagcgacgcccacctcgactacatctacacgcagcacaagaacaagccttgatcgatcgatccatccatccaactacacgctgaaatccaaagctaatacaaggaagatcgagatcgagataaattaaccaactctatatgcatatctatctatccatctacctctgcatgctgttttcactgcatcgatcgctactgttctgcagtgccaatcactgtccgtttctgtacaatctgtgatactactagctagtagcagtacatggcatcgttttccttcaagtgttcgttggcttttacttagtccggtgagtgcttgtgggttatttctgacgagggagtgtgatcagtacgcgtactaatgggattttggtttgtcatggcatgatgaaattaagctgtggtagcaatataatgcatatatatattacctttgtctcatgtccttagtatgtagtagtggtaaatagtacatagcatgaataatatacttatcaaggaacacttgtgttttgtttaatggcgcaaaaaaaaaaaaaaaaaaaaaaaaaaaaaaaaaaaaaaaaaaaaaaaagggcggg

SEQ ID NO: 3188 - DNA, 1893 bp, Oryza sativa
  Clone ID: PAT_MRT4530_32481C.1
tctattgaagaagcttccagctgagctgggggatcaaaatggaggtgcttcttccccttctccttgcctgctctctcctcttcaccattgcaacccctatcagagacatcaccgacgtttgtgcctcacagatcagtgatttccagcacctgaacagctccggactgcacctgacgctgcaccacccgcagagcccctgctcgccggcgccgctcccctccgacctccccttctccgccgtcgtcacccacgacgacgcccgcatcgcccacctcgcctcgcgcctcgccaacaaccacccgacatcgccgtcgtcatcgtctctcctccacggccaccgcaagaagaaggccggcggcgtcggcggctcgcaggcgtcgtcgtcgtccgtgccgctgacgccgggcgcgtcggtggccgtcggcaactacgtgacccgcctgggcctcggcacgccggcgacctcctacgtgatggtggtcgacacggggtcgtcgctcacctggctgcagtgctccccgtgctcggtgtcgtgccaccggcaggccggcccggtgttcgacccgcgcgcgtcgggcacgtacgccgccgtgcagtgctcctcgtcggagtgcggcgagctccaggccgccacgctcaacccctccgcctgctccgtctccaacgtctgcatctaccaggccagctacggcgacagctcctactccgtcggctacctcagcaaggacaccgtctccttcggctccggcagcttcccgggcttctactacggctgcggccaagacaacgagggcctcttcggccgctccgcggggctcatcggcctcgccaagaacaagctctcgctgctctaccagctcgccccgagcctcggctacgccttctcctactgcctcccgacctcgtcggcggcggcgggctacctctccatcggctcgtacaaccccggccagtactcgtacacgcccatggcgtccagctccctcgacgcctcgctctacttcgtcaccctgtcggggatctcggtcgccggggcgccgctcgccgtgccgccgtcggagtaccgcagcctgccgacgatcatcgactccggcacggtgatcacgcggctgccgccgaacgtgtacacggcgctgagcagggccgtggccgcggccatggccagcgccgcgccgcgggcgccgacctactccatcctggacacctgcttccggggctccgccgcggggctgcgcgtcccgcgcgtggacatggcgttcgccggcggcgcgacgctggcgctgtcccccgggaacgtgctcatcgacgtcgacgactccacgacgtgcctggcgttcgcgccgaccggcggcacggcgatcatcgggaacacgcagcagcagacgttcagcgtggtgtacgacgtcgcgcagtccaggatcggcttcgccgccggcggctgcagctgaggacccaaactgcagctggccgactcaagctaggtaaaagagcaatgctgcttcttctgctgctgccgccgcctcctatctctgctcaggcacagaagtgacaacttcttaactgcaaattcattcatcacatgtaaatgcatatacatgtgccaggaagttacgagtgtggctctaggacctagttttacatgtcataaacaaatatagatgtacaaataaatacagggtaactactttaggtgaagataatacttatcaatgtgaaagattattatgttatatggctgcttgttagcaatcaagccaaaatgttcatcatgtacatgtaaactatgggtgtgtttgggttctaaatgttcagggtgaaaagaaaagcagtataagaacatgaagatttgagttatcatttatcattggttaattgataaaaaaaaaaaaaaaa

SEQ ID NO: 3189 - DNA, 2612 bp, Oryza sativa
  Clone ID: PAT_MRT4530_32658C.1
ccggccgggctctcaaaaccctctcctaaccctagccgccgccgcagccgcagccgcagccgcgcgtcgtctcctccgcccgcgagctcctcttcccgccggcgagagatcaggagcacgcaaggcgcgcggccatggcgtcggagaccgagacgttcgccttccaggccgagatcaaccagctgctgtccctcatcatcaacaccttctactccaacaaggagatcttcctccgcgagctcatctccaactcctccgatgcattggataagattaggttcgagagcctcacggacaagagcaagctcgatgcgcagccggagctgttcatccacattgtccccgacaaggctagcaacaccctgtcgatcatcgacagtggtgtcggcatgaccaagtcggacctcgtcaacaacctcggtaccatcgccaggtcggggaccaaggagttcatggaggcgctcgctgctggtgctgatgtgtccatgattgggcagtttggtgtcgggttctactccgcctaccttgttgctgagagggttgttgtgaccaccaagcacaacgacgacgagcagtatgtgtgggagtcacaggccggtgggtccttcactgttacacgtgatacctctggtgagcagcttggacggggtactaagatcaccctctacctcaaggatgatcagctggaataccttgaggagcgtcgcctcaaggatctggtgaagaagcattctgagttcatcagctaccctatctccctatggactgagaagacaactgagaaggagatttctgatgatgaagacgaggaagagaagaaggatgctgaggagggaaaggttgaggatgttgatgaggagaaggaagagaaagagaagaaaaagaagaagatcaaggaagtctctcacgagtggaacgtgatgaacaagcagaaacccatttggttgaggaagccagaggagatcaccaaggaagagtacgctgctttctacaagagcttgacaaacgactgggaggaacatctggctgtcaagcacttctctgtggagggtcagcttgaattcaaggccatcctgtttgtaccaaagagagcgccatttgacctctttgacaccaggaagaagcaaaacaacatcaagctgtacgtacgccgggtgtttatcatggacaactgtgaggagttgatcccagagtggctcagctttgtcaagggcattgttgattctgaagaccttcccctcaacatctcacgtgagatgctccagcagaacaagatcctgaaggtgatccgcaagaaccttgtgaagaagtgcgtggagctcttctttgagatcgctgagaacaaggaagactacaacaagttctacgaggctttctccaagaatctcaagcttggcatccatgaggattccaccaacaggaccaagattgctgagctcctgaggtatcactccaccaagagtggtgatgagttgaccagcctcaaggactacgtaacccggatgaaggagggccagagtgagatctattacatcactggtgagagccaagaaggctgttgagaactcccccttcctcgagaagctgaagaagaagggttatgaggtcctgtacatggttgatgccattgatgagtacgctgttggtcagcttaaggagtttgaaggcaagaagctcgtctctgccaccaaggaaggtctgaagcttgatgagagtgaggacgagaagaagcggcaggaggaactcaaggagaagttcgagggtctgtgcaaggtgatcaaggaggtgctcggtgacaaggtggagaaggttgttgtctctgaccgtgtggtggactctccctgctgtctagtcactggggagtatggctggactgctaacatggagaggatcatgaaggcccaggctctgagggactccagcatggccggctacatgtctagcaagaagaccatggagatcaacccggagaatgccatcatggacgagctccgcaagcgtgccgatgcggacaagaatgacaagtccgtgaaggacctggtgatgctgctcttcgagactgccctgctgacctccggtttcagcttggaggaccccaacaccttcggcaccaggatccaccgcatgctcaagctcggcctgagcatcgacgaggacgagtccgccgaggctgacgccgacatgccgccgctggaggacgacgccggcgagagcaagatggaggaggtcgactaaacgtcatggacccatggatgccattctgtcccttctagttatccctctcctagttctcttctcatagctatctgactgctgctgttcgctttctttttggtacgttggatgcatcagttttgtctttgtcttagctcttaaacaatgcgtggtaccttgtcatactgtttgcgttgcaatgctactagccgaagtatatgccagcttcttattcatacttataacgtctttttttatcaaattatgttggctgaatcccttggagtgtgccaatttccatcttgaacttgagtattccaagtagctgttgtgagcagcccgaccagtattctggaacttcttcctaataagcctggttgctgcaaattgatggaatg

SEQ ID NO: 3190 - DNA, 544 bp, Oryza sativa
  Clone ID: PAT_MRT4530_32862C.1
acagaaaaaaatacattggttcatgacacggggagggccatgcccaccacttatttggacacacagagggcaagggtgcagaaaaaatcaagcaacacaagctgaacttacgggcccacctgtaagccttttactgggcgagggcggagacttttgtgaaaaacagaaacaccacccatgcagaaaaagacaaattttttcacacacaaatcgaccacccggggggcggggacctacggggaggtcgtcgccccccccggcgacgttgtgatgagggcgatcaccccaaaagggggggcttttttttcccgggggactcctcggggctcttgggggccttctttttctcggggggctcggggaaggggtaacccccggggcccaccgccgccggggccgcaaactcctccgtgatcttgggcctgggcgcgttctccggggccttttttgccttgggcttttaatacaaggcaaaggcccccgcgggaagggcccccgccttccccaagagctggttgggcttgggcttgttcttctccttttt

SEQ ID NO: 3191 - DNA, 1372 bp, Oryza sativa
  Clone ID: PAT_MRT4530_32961C.1
cggacgcgtgggcggacgcgtgggcctaaacctcacgacttcacgagcagcagcgagaggaggagggagcaatcaatccatcggcggcaatggagaacggcggcggcgacgtcccggagaacgccaacgaccattgcccggggacgcagtcggaggcggcggggaaggcggacgcgtgcgccgggtgccccaaccagcagatctgcgccaccgcgcccaagggccccgatcccgatctgcttgccatcattgagcgaatgaataccgtgaaacacaagattctggtactgtctgggaagggtggtgtcgggaagagtacattttcagcccagctctcttttgcccttgctgagatggaccatcaagttggccttctcgacatagacatttgtggtcctagcatcccaaaaatgttaggccttgaaggccaagatattcatcaaagcaatcttggctggtcgccggtgtatgttgagtccaacctaggtgtcatgtcaattggcttcatgctgcccaacccagatgatgctgttatatggagaggtcctcgcaagaacggactcatcaaacagttcttgaaggatgtcgattggggggagatcgactatcttgtggtggatgcacctccaggaacatctgatgaacatatttcaattgtacagtacctccagatcgcaggaattgatggggcaatcattgtgaccactccgcagcaagtttctctgatcgacgtgaagaaggagataaacttttgcaagaaggttggcgttcctgtcttgggagttgtcgagaacatgagtggcttgaggcaggcattttcagacatgaaatttgtgaagccaagtgaggcgggagaaacagatgccaccgagtgggcgctgaactacatcaaggagaaagccccagagcttttatctgttgtcgcatgcagtgaggtgtttgatagcagtaagggtggtgctgagaagatgtgccaggaaatggaggtcccttttcttggcaaggttcccatggatccccagctctgcaaggcggcagaggaaggaagatcatgcttcactgatcagaaatgcagtgctagtgctccagctcttaaaagcataatcaagaagctggtcaagacgaagtgagaaggtggtgtgactcatgaccgtgaagttacgccagtagtttctgccgtatggagtgctattacttgctgagtgtgtgtgtgtgtgtaatgcgatcctaactttgcctagagtttttcttgccgcatgcaaagttggcagatattcgcgctgcagctgttgcagtggtaaacaattcagcacatctagaagcacatcccttcagtttatggttcattttgctctgccgcttttgggcatgc

SEQ ID NO: 3192 - DNA, 1767 bp, Oryza sativa
  Clone ID: PAT_MRT4530_3350C.1
atgtcgtctcctcccgacagcgccacgacctgcaacttcctcttctcccctcctgcagcacagatggtcgctccttcacctggctactactacgtcggcggcgcctacggagacgggaccagcaccgccggcgtctactactcgcacctccctgtcatgcctatcaagtccgatggctccctctgcatcatggaaggcatgatgccgtcgtcatcgccaaagctcgaggacttcttggggtgtggcaatggcagtggccatgacccggccacctactatagccagggccaagaagcagaggatgcaagcagggcggcctaccagcaccaccagctagtcccctacaactaccagccattgacggaagcagagatgctgcaagaggccgcagcggcgccaatggaggacgcaatggcggcggccaagaacttcctcgtcaccagctacggcgcctgctacggcaaccaggagatgccgcagccgctcagcctctccatgagcccagggtcccagtccagcagctgcgtcagtgcagctccccagcagcatcagcagatggcggtggtcgctgcagctgctgctgctggtgatggccagggaagcaacagtaatgacggtggcgagcagcgtgtcgggaagaagaggggccccgggaaagggggccaaaagcagcctgttcaccggaagtccattgacacgtttgggcagaggacatcgcagtataggggcgtcaccaggcacaggtggactggaagatatgaagcccacctctgggataacagttgcaaaaaggatggacagacaaggaagggaaggcaaggtggttatgacactgaagataaagctgcgagggcttatgatctggctgcgctgaaatactgggggctatctacgcatataaatttcccgttagaaaactaccgagatgagatcgaggagatggaaaggatgacaaggcaagaatatgttgcgcacttgagaaggagaagcagcgggttctctcgcggtgcttccatctaccggggagtaacaaggcatcaccagcatggaagatggcaagctcggattggcagggttgctggcaacaaggacttgtatctcggcactttcagcactcaagaagaagcagcagaggcatacgacattgctgccatcaagttccgtggcctgaacgcggtgacgaactttgacatcacaaggcacgacgtggacaagatcatggagagcagctcgctgctgcctggtgaggcagcgcgtaaggtgaaggcgatcgaggcagcgccggaccatgtgccaataggccgcgagctcggtgcgaccgaggaagcgagcgctgctactgtcacgggcaccgactggagaatggtgctccatggatcacagcagcagcaagctgcagcgtgcaccgaagcaacggcagatcttcagaagggcttcatgggtgacgcgcactcggctctccacggcattgtcgggttcgacgtcgagtcggcggcagctgacgagatcgatgtcccgggagggaagatcagtggcatcaacttctcgaactcgtcttcgctggtgactagcctgagcaactcgagggaggggagccctgagaggcttggcctcgccatgctctacgccaagcatcatcccaccgccgtcagcctcgccgccatgaacccctggatgccgatgccggcgccggccgcagctcacgtgatgaggccgccgagtgccattgctcatctccctgtttttgcagcctggacagatgcttaa

SEQ ID NO: 3193 - DNA, 1741 bp, Oryza sativa
  Clone ID: PAT_MRT4530_33578C.1
ttattccacccccttcccttctctcgtcctcctcctcctcctcccgctctcactctcgctcttcaaaataggtgggcggtgctctcgcctcccctccccgccggcttccgcctccagatccgcgccgcccgccgccgccgcgctcgctcgagcgggagctatagctgccgccttcgattcgacgctgcatgtactggcgagaggcgtagcgcgtggcgtgctctccccgacgcgcgcctcgcctcctccccgttcattacaagatggcgatgatggtggaccctcctaatggcatgggaaaccaagggaagcattactacacaatgtggcaaacgctatttgagattgacaccaagtatgtgccaatcaagcccatcggaagaggggcttatggaatagtttgctcctctataaaccgtgcaaccaacgaaaaagttgcaataaagaagatcaacaatgtctttgacaaccgtgtggatgcactgaggaccctaagggagctgaaactactgcgacacttgcgccatgaaaatgttattgccttgaaagatataatgatgccagtacacagaaggagtttcaaagatgtatacttggtttatgaactcatggacacagatctacaccagataattaaatcatctcaacctctttctaatgaccactgtcaatatttcctttttcagctactccgaggtctgaagtacctccattcagcagggatactccatcgagacctgaaaccagggaacctcctggttaatgcaaactgcgatctgaagatctgcgactttggtttggctcgcacaaacaacactaaaggccagtttatgactgaatatgtcgtgacccggtggtatagggctcctgagctgctgctctgctgcgacaattacggaacctccatagatgtctggtctgttggctgcatctttgctgagcttcttggccgcaagccaatatttccaggaactgagtgcctcaatcagctcaagctcatagtcaacgttctcggcaccatgagtgaagctgacattgagttcattgacaacccaaaggcccgcaagtatatcaagacccttccatacactcctggcatccccctcaccagtatgtacccgcaagcacatcctcttgccattgatctgttgcagaagatgctcgtctttgatccctccaaaaggattagtgtcactgaagctctggagcacccttacatgtctccactgtatgatccaagcgcaaaccctcctgctcaagtgcccatcgatctcgacatcgatgaaaatcttggcgtggatatgatccgggagatgatgtggcaggagatgctccactatcacccagaggttgttgcaggagtgaatatgtgacaggcaagaacgaacatgtgaaggcaacgtgctacactaagatcttcacatgttggttttttgtataaatcttattcgcgattgtcgcgcctatcaagcttaagctatggcgatgtcgcccaggtgacctcttatgtaaatatgtgcgaataagacagcattctggagttgttcttcctgtggacctctacttgtagtatatggactaatgtgttgtatgagtacgtgaagcagaattcggtattatcaaggcttgtaatgttagatgctcttatattacactatgaagtgtcaactttcaagtggccacgtttacacataaaaaaaaaaaaaaaaaaagagactcgtgccctctcccccccgtgccg

SEQ ID NO: 3194 - DNA, 2242 bp, Oryza sativa
  Clone ID: PAT_MRT4530_33579C.1
ctcgttttgcgtatcttcccaatctcctcaatccccttctcctcaaacactccgggaacggaacaggaggccggtagctcgccggaggaagaagccaagaggcgcgggcggcggctgcggcagaagaagacggagtcgctagctggaggcggagacgatctagacgaataggccgcggcgacggcgagagtggcaagtgggggagtccgtgcggtggtcgctccctcctctcgcgcggtgacatctaagtgccgcgtgttctcctcttcctcttcccctccaccttcatttcccattccacccccttcccttctctcgtcctcctcctcctcctcctcctctctctctggcgctctctctcttcaaaataggtgggcggtgctctcgcctcccctccccgccggcttccgcctccagatccgcgccgcccgccgccgccgcgctcgctcgagcgggagctatagctgccgccttcgattcgacgctgcatgtactggcgagaggcgtagcgcgtggcgtgctctccccgacgcgcgcctcgcctcctccccgttcatgtaagtgggataaattcctcgccgcctcacctcctcctccagtacttctgtcacgacgccgcgtcggcgagtacaagatggcgatgatggtggaccctcctaatggcatgggaaaccaagggaagcattactacacaatgtggcaaacgctatttgagattgacaccaagtatgtgccaatcaagcccatcggaagaggggcttatggaatagtttgctcctctataaaccgtgcaaccaacgaaaaagttgcaataaagaagatcaacaatgtctttgacaaccgtgtggatgcactgaggaccctaagggagctgaaactactgcgacacttgcgccatgaaaatgttattgccttgaaagatataatgatgccagtacacagaaggagtttcaaagatgtatacttggtttatgaactcatggacacagatctacaccagataattaaatcatctcaacctctttctaatgaccactgtcaatatttcctttttcagctactccgaggtctgaagtacctccattcagcagggatactccatcgagacctgaaaccagggaacctcctggttaatgcaaactgcgatctgaagatctgcgactttggtttggctcgcacaaacaacactaaaggccagtttatgactgaatatgtcgtgacccggtggtatagggctcctgagctgctgctctgctgcgacaattacggaacctccatagatgtctggtctgttggctgcatctttgctgagcttcttggccgcaagccaatatttccaggaactgagtgcctcaatcagctcaagctcatagtcaacgttctcggcaccatgagtgaagctgacattgagttcattgacaacccaaaggcccgcaagtatatcaagacccttccatacactcctggcatccccctcaccagtatgtacccgcaagcacatcctcttgccattgatctgttgcagaagatgctcgtctttgatccctccaaaaggattagtgtcactgaagctctggagcacccttacatgtctccactgtatgatccaagcgcaaaccctcctgctcaagtgcccatcgatctcgacatcgatgaaaatcttggcgtggatatgatccgggagatgatgtggcaggagatgctccactatcacccagaggttgttgcaggagtgaatatgtgacaggcaagaacgaacatgtgaaggcaacgtgctacactaagatcttcacatgttggttttttgtataaatcttattcgcgattgtcgcgcctatcaagcttaagctatggcgatgtcgcccaggtgacctcttatgtaaatatgtgcgaataagacagcattctggagttgttcttcctgtggacctctacttgtagtatatggactaatgtgttgtatgagtacgtgaagcagaattcggtattatcaaggcttgtaatgttagatgctcttatattacactatgaagtgtcaactttcaagtggccacgtttacacatatatttgctatgctgacttgctgagacatgcttggttttagggcggtttgcagcttaacatgtgttcctttcaaagagcagtagatctgcagtttgcatggtattcctgtccaaactgtctagtatactctatactgatactctggtataaagctccctgcagtttgcaaaaaaaaaa

SEQ ID NO: 3195 - DNA, 1379 bp, Oryza sativa
  Clone ID: PAT_MRT4530_34086C.1
gcccgcggttcgggcgcggctgctttcccgagtggcgaatccgttgctgtcgtatatctcgtctatggcgtgctgtatgtcctctccttctttcttcctttccaaataagcactcctcttcttcctcctcctcctcctccgcctcctcttctcattcccaactcatcgatccatcagtagctagctagctagctagctagctgcattgtccggcgagagagatagctgctgcagggggcggccatggggaggggcaagatcgagatcaagcggatcgagaacgcgaccaacaggcaggtgacctactcgaagcgccgcacggggatcatgaagaaggccagggagctcaccgtgctctgcgacgcccaggtcgccatcatcatgttctcctccaccggcaagtaccacgagttctgcagcccttccaccgacatcaaggggatctttgaccgctaccagcaagccatcggcaccagcctttggatcgagcagtatgagaatatgcagcgcacgctgagccatctcaaggacatcaaccgcaacctgcgcaccgagatcaggcaaaggatgggagaagatctggacgggctggagttcgacgagctgcgcggtcttgagcaaaatgtcgatgccgccctcaaggaggttcgccacaggaagtatcatgtgatcaccacacagactgaaacctacaagaaaaaggtgaagcactcctacgaggcgtacgagactctgcagcaggagctggggttgcgcgaggagccggcgttcgggttcgtggacaacaccggcggcgggtgggacggcggcgccggcgccggcgcggcggcggacatgttcgccttccgcgtggtgcccagccagcccaacctgcacggcatggcctacggcggcaaccacgacctgcgcctcggttgatatatcatcgccgccgccgccgccgccgccggcggcctgctcgtcgccggccggccggccgccggacaccgtatcatcgctcgatctagataacaagccgacgaataaattgcagtgctcgtgttacttacctgcatgcgcatgcattattatcgatcaacgcaagaacttcatttcatttaccaaaccacttgatgtgtgctatgatccagcggttaaaccgtgtgttgtctcttgacattttgtaccagttactgatgatgttgtattatgtatgcgtggtgtgcaactgtgcttggataatttcacacttatttgccacgcttgctttattagctttgactatcaagctactgatcagagagttacctagctcaaaggattaattattatgtatacagctcaaatacattaatgggctactggctgctgctgtccgagtaattatttacacctgtggt

SEQ ID NO: 3196 - DNA, 197 bp, Oryza sativa
  unsure (1)..(197): unsure at all n locations
  Clone ID: PAT_MRT4530_34426C.1
tcgttccgctgcacgagccgtcatctctgcgcctgggcttcccctcgcgccggcctctgcctccaccaccaccgccgccgccgncgcagcagccggaggacgaaactcgccgtgcgcgcgatggcaccgacgttgtnctcggtgtcgacggcggaggcagctcccccggggctgaaggagggcatcgtggggatcta

SEQ ID NO: 3197 - DNA, 2345 bp, Oryza sativa
  Clone ID: PAT_MRT4530_34852C.1
caaggagtggctcgccgaggtgcagctgctgggcgcggtggcgcgctggagatcgagaagacgccggaggcggcggaggacatggagtcggagcccgcgctggcggcggcgcgcgaggcggagcgcgtcccgccgtggcgggagcaggtgaccgcccgcgggatggtggcggcgctgctgatcggcgtggtgtacacggtgatcgtgatgaagctgagcctcaccacggggctcatccccacgctcaacgtctccgccgcgctgctcgccttcctcgcgctccggggatggacgcacgcgctcgaccgcctcggcattgcctcccgccccttcacccgccaggagaacaccgtcatccagacctgcgccgtcgcctgctacaccatcggctacggcggtggattcgggtcgttcttgctggggctgaacaagaagacgtacgagctgtccggcgcgagcacgccggggaacgtgccggggagctacaaggagcccgggatcgggtggatgacggggttcctcctctccaccagcttcgtggggctcctcaccttgctccctctccgaaaggtgctggtcatcgactacaagctaacatatccaagtgggacagcgactgctgttctcataaacgggtttcacacgcctcaaggagataagaatgcgaaaaagcaagtccgtggattcctcaggtatttcggcatcagcttcttgtggagcttcttccagtggttctacaccggcggtgacgtctgcggattcctccagttccctacctttgggctgaaagcttggaaacatacatttttcttcgacttcagtctcacgtatgttggtgccgggatgatctgttctcaccttgtcaacctctctctcttgttcggcgcgatcctctcctggggaataatgtggccgctcatcggcaagcagaaggggaattggtactctgctaaggcatctgaaagtagcatgtcgggcctgttcggttacaagtccttcatctgcattgcacttctcgttggagatggcttctacaacttcgtcaaagtgatcgttgtcactctcaagagcgtacgcgaaagatcaaggcgcaggggtcttaacaacagagtggcggacgcggacaccatggcgatcgacgacatgcagcggaacgaggtgttcaaccgggacaacatccccgacctggatggcgtacaccgggtacacgctgctcagcgtcatcgccgtggtcctcatcccggtgatgttccggcaggtgaagtggtactacgtgatcatcgcgtacctgctggcgccggcgctggggttctgcaacgcctacggcacggggctcaccgacatgaacatggggtacaactacggcaagatcgcgctcttcatcttcgcggcgtgggccgggaaggacgacggcgtggtggccgggctcgtcgggtgcgggctggtgaagcagctggtgctcatctccgccgacctgatgcacgacttcaagacgggccacctgacgctgacctcgccgcggtcgatgctggtcgggcaggtggtgggcacgctgatggggtgcgtcgtcgcgccgctcaccttcttcctcttctacaaggcgttcgacgtcggcgaccccaacgggtactggaaggcgccgtacgcgctcatctaccggaacatggccatcatcggcgtggaggggttctcggcgctgccgaggcactgcctgcagctgtgcgcggggttcttcgcgttcgcggtgctcgccaacctggcgcgggacttcctgccgcgcaggtacgggcggtacatgccgctgcccatggccatggccgtgccgttcctcgtcggcgccagcttcgccatcgacatgtgcgccggcagcctcgtggtgttcctctggcacaggttcgacggcaagagggccgcgctgctcgtgccggccgtcgcgtccggcctcatctgcggcgacgggatttggacgttcccttcgtcgctgctcgcgctggccaaggtcaagccacccatctgcatgaagttcataccgggaaactagccaatgcatcgctgtaatttacagcgtcaatgcagacgtatagatcgtaaaaaaagagatcgtatagacgtatagcgtcaatgcagaaacactagaaaagagatcgtgtatcgagcgttttggacttagatttaagatttaggcgcagcgagaggaagaacgggtgtagctatgacggataaatccccaaaagcagaaatgctgttcataggggttggggttctgtactgtgtatatcagttgagaagaaaattagatgaaaacacaacaattagttgtgcttattgtcaaaaaaaaaaaaaaa

SEQ ID NO: 3198 - DNA, 2943 bp, Oryza sativa
  Clone ID: PAT_MRT4530_3553C.1
gtcgaatcctcctccgagaagaggagagtacatgaatcctagcgcgaggatctcgcaggtagcaatggcggcgatactgccggacctggcgacgcaggtgctggtcccggcggcggccgtggtcggcatcgcgttcgcgctggtgcagtgggggctggtgtgaaaggtgaagatgcccgcggagcgccgcggcggggaggggtcccccggagcggccgccgggaaggacggcggcgccgccagcgagtacctcatcgaggaggaggaggggctcaacgagcacaacgtcgtcgagaagtgctccgagatccagcacgccatctccgaaggagcaacttctttcctcttcactgaatacaagtatgttggactattcatgggcattttcgcggtcctgatcttcctcttccttggatctgttgagggattcagcacaaagagtcaaccttgccactacagcaaggataggatgtgcaagcctgcccttgcaaatgctatcttcagtactgttgcctttgtgcttggtgcagtcacctctcttgtatctggtttccttggaatgaagattgcaacttatgcaaatgccaggacaacccttgaggcaaggaagggtgttgggaaggcattcattactgctttccgctctggtgctgtcatgggtttcctgcttgctgcaagtggccttgttgttctttacattgccatcaacttgttcggaatttattatggtgatgactgggaaggtctttttgaggctatcactgggtatggtcttggtggttcttctatggccctatttggccgtgtaggtggcggtatttacacgaaagctgctgatgttggtgctgacctagttgggaaagtagaaaggaatatccctgaagatgacccaagaaacccagctgtcattgcagataatgttggtgacaatgttggagatattgctggaatggggtcagatctctttggttcctatgctgagtcatcttgtgctgctcttgtcgttgcttcaatctcttcttttggaattaaccatgaattcactcctatgctgtacccgctcctgattagctcagttggtatcattgcttgtctgataaccacacttttcgccactgatttttttgagatcaaggctgttgatgaaattgagcctgccctcaagaagcaacttataatttccaccgttgtgatgacggttggcattgcacttgtcagttggttaggcctcccatattccttcacaatattcaactttggtgcccagaagactgtgtataactggcaacttttcttgtgtgtggcggttggtctttgggctggactaatcatcggatttgtgacagagtattacacaagcaacgcctacagccctgtccaagatgttgctgattcctgcagaaccggagctgctactaatgtcatctttggccttgctctgggatacaaatctgtcattattcctatttttgctattgcttttagtattttcctcagcttcagccttgccgcaatgtacggtgtagctgtggctgcccttggaatgcttagcacaattgcaactggtcttgccattgatgcctatggccctatcagtgacaatgctggaggaattgctgagatggctggcatgagtcacagaattcgtgagagaactgatgctctggatgctgcaggaaacaccactgctgccatcgggaagggtttcgccattggctcggcagccttggtgtctcttgccctctttggtgcctttgtgagccgtgccgccatctccactgtcgatgttctgacacctaaagttttcattggactgattgttggtgctatgctcccatactggttctctgctatgaccatgaagagtgttggcagcgcagcgctcaagatggtggaggaagtccgtaggcagttcaactccatccctgggctcatggagggcacaaccaagcctgactatgcaacctgtgtgaagatctccactgatgcatccatcaaggagatgatccccccaggtgctcttgttatgctcagccctcttattgttgggatcttctttggcgtcgagaccctctcaggactacttgctggtgctctcgtttctggtgttcagattgccatctctgcatcaaacactggtggtgcctgggacaacgcaaagaagtacattgaggctggagcatctgagcatgcaaggaccctgggcccgaaaggctcagactgccacaaggctgctgtgatcggcgacaccattggggatcctctcaaggacacctcaggcccctcgctcaacatcctcatcaagctgatggctgtcgagtcgctcgtgtttgccccgttcttcgccacccatggaggcatcctcttcaagtggttttagatggtgacgatagatttacgaggacgttatttttgccaggagggcgctggaaatcatccatatattatagagttcatcgagttgacacatatagttccctccgtttcctatttgttattactgtctgtccatcagtcgatcatgctaagcttattagcatcatacctgtgtctagtttttttgagtctggtagttgtagccgatgggagcaaatcactggccacctacaggtttggacaagagtaccttgaatttgcgttttcctgtaggttggatgatacgatgatggtgatgattattgtacgtgcacggaatgcacctgtctcagtgaaattttcccgggaaggttctgctgtttctttatgtccttgtgggaatgttaggatgatcttgtacaaaaaagaaaacaactctagtgatagggggtggagtacatgtgtgccaactaagtttgagttgtcttgaattattgaagtaaaatactttagctaaaaaaaaaaaaaaaagcgtgtgcttgcttttgttttaagatagagaattatagtattattttgtataccccc

SEQ ID NO: 3199 - DNA, 2652 bp, Oryza sativa
  Clone ID: PAT_MRT4530_3554C.1
atggcggcgatactgccggacctggcgacgcaggtgctggtcccggcggcggccgtggtcggcatcgcgttcgcggtggtgcagtgggtgctggtgtccaaggtgaagatgaccgcggagcggcgcggcggggaggggtcccccggcgcggccgccgggaaggacggcggcgccgccagcgagtacctcatcgaggaggaggaggggctcaacgagcacaacgtcgtcgagaagtgctccgagatccagcacgccatctccgaaggagcaacttctttcctcttcactgaatacaagtatgttggactattcatgggcattttcgcggtcctgatcttcctcttccttggatctgttgagggattcagcacaaagagtcaaccttgccactacagcaaggataggatgtgcaagcctgcccttgcaaatgctatcttcagtactgttgcctttgtgcttggtgcagtcacctctcttgtatctggtttccttggaatgaagattgcaacttatgcaaatgccaggacaacccttgaggcaaggaagggtgttgggaaggcattcattactgctttccgctctggtgctgtcatgggtttcctgcttgctgcaagtggccttgttgttctttacattgccatcaacttgttcggaatttattatggtgatgactgggaaggtctttttgaggctatcactgggtatggtcttggtggttcttctatggccctatttggccgtgtaggtggcggtatttacacgaaagctgctgatgttggtgctgacctagttgggaaagtagaaaggaatatccctgaagatgacccaagaaacccagctgtcattgcagataatgttggtgacaatgttggagatattgctggaatggggtcagatctctttggttcctatgctgagtcatcttgtgctgctcttgtcgttgcttcaatctcttcttttggaattaaccatgaattcactcctatgctgtacccgctcctgattagctcagttggtatcattgcttgtctgataaccacacttttcgccactgatttttttgagatcaaggctgttgatgaaattgagcctgccctcaagaagcaacttataatttccaccgttgtgatgacggttggcattgcacttgtcagttggttaggcctcccatattccttcacaatattcaactttggtgcccagaagactgtgtataactggcaacttttcttgtgtgtggcggttggtctttgggctggactaatcatcggatttgtgacagagtattacacaagcaacgcctacagtccctcatgtccctcacaccttgaatttcccttgtccagccctgtccaagacgttgctgattcctgcagaaccggagctgctactaatgtcatctttggccttgctctgggatacaaatctgtcattattcctatttttgctattgcttttagtattttcctcagcttcagccttgccgcaatgtacggtgtagctgtggctgcccttggaatgcttagcacaattgcaactggtcttgccattgatgcctatggccctatcagtgacaatgctggaggaattgctgagatggctggcatgagtcacagaattcgtgagagaactgatgctctggatgctgcaggaaacaccactgctgccatcgggaagggtttcgccattggctcggcagccttggtgtctcttgccctctttggtgcctttgtgagccgtgccgccatctccactgtcgatgttctgacacctaaagttttcattggactgattgttggtgctatgctcccatactggttctctgctatgaccatgaagagtgttggcagcgcagcgctcaagatggtggaggaagtccgtaggcagttcaactccatccctgggctcatggagggcacaaccaagcctgactacgcaacctgtgtgaagatctccactgatgcatccatcaaggagatgattcccccaggtgctcttgtcatgctcagccctctcattgttgggatcttctttggtgtcgagaccctctcaggactacttgctggtgctctcgtttctggtgttcagattgccatctctgcatcaaacactggtggtgcctgggacaatgcaaagaaatacattgaggctggagcttcagagcatgccaggacccttggtcccaaaggttccgatccccacaaggcggccgtcatcggtgacaccatcggagaccctctcaaggacacttcaggaccctctctcaacatcctcatcaagctcatggcggtcgaatccctcgttttcgcccccttcttcgccacccacggtggtatcctcttcaagttgttctaaaccggcgacgttgggtgtaacaaaggccatagttttgttggggatgagcaaaatatgtagactattttgtcatgatttgctccttgagttgatgactccattgtctacttgatttcccatttttgttctagttccaggttccaaccttgtgttttgatcccagaattttctctggtcctctttagcttttgtctccagctgcataagtcatcctgtggcacagtgaacaaggagcattggaaaatttgccattttctagcgataaaatgatgaggatgatgatgatgattgatgtcg

SEQ ID NO: 3200 - DNA, 582 bp, Oryza sativa
  unsure (1)..(582): unsure at all n locations
  Clone ID: PAT_MRT4530_35991C.1
acactatgcagttcgtccacgaggcccagagacggtgtgcttactcgcttcagcaccctcctcactctatggtaagcccacttgcaggaccgagttcctcttccgtgctctcccaatgatgttctcgcaatgctctccctctcccgagacagaggctcagaggctccagctnactagaggagtgagttcggtgcatgcactcccttccntccggagctaccacgacgatttatctgcggncagaatctcttcggtaggcttgcggtgcntgtctgctgctagctccattgcccncattgttttgctgctatgtactgtccggtctttccactaatgtgatcagctctctttatcccttacntgcatatcgtcgggcgtcacgtggtggagctccgcttttgttcctttagtgacggttcttgcgccgcttggtgtaatcatggtaataaaattttccctgtgtgaacttgttatccgctcaacttttcacacaacttccgatcnggagcctaagtgtaaggctgggtgctatgatggctactcattaattggttgcccctgccgttccgtggaactgtttgc

SEQ ID NO: 3201 - DNA, 562 bp, Oryza sativa
  Clone ID: PAT_MRT4530_36022C.1
ggcggtgaaattgttgctattaaaaaaatgaagaaaaaatattactcatgggaggagtgtgggaatcttcgagaagtaaagtctttgaggaggatgagtcatccaaatattgtaaaactcaaggaagtcataagggagaatgacactttgttctttgtttttgagtacatggagtgcaatttatatcagcttatgaagaacagaggaaagggttttactgaggcagaggttaggaactggtgcttccaggttttccatgctctggctcacatgcatcagcgtggctattttcaccgggacctcaaacctgaaaatttgctggtgacaaaaaatgtgatcaagatagcagattttggccttgctcgtgaggtttcttctgaaccaccatacacagaatatgtttccactcgctggtatcgggctcctgaagttttgcttcaggctaccttttacaactctgcagttgatatgtgggcaatgggtgctattattgctgaacttttcacgctgcgccctctttttcctggcgccaatgaagcagatgagatgtacaagatatgca

SEQ ID NO: 3202 - DNA, 2337 bp, Oryza sativa
  Clone ID: PAT_MRT4530_36922C.1
atggaaacaattccctgcctcatcctcttttcgtcactacagattctggcattctcttctgcatcaccagagcatacactgggtaccggctcattcttatcggtagaagaatatgagaaaccatttctcatctcacccagcaatactttctcctttggtttctacgaaacaggtgacaacgccttctccctctccatctggttcaccaatacagtcgaaaaaaccgttgtttgggcagcaaactcagaatcaccagtgaatggtcatggctccaagctatcctttactcaggagggtagcttagtcctcagcgatgagaagggcttcgttgtgtgggatagcaagacaatgctaggacaggattctcgagttgctctacttgatacaggcaatcttgtcatcactgattccaagggtagtgttgtgtggcaaagctttgattcacccactgataccttgctacctttgcagctccttaccaaggacaaaaggttggtgtctggttactatagcctctactatgacactgataatgtcctccggctcatatataatggaccagagatttcaagtccctattggccaaacccatctgagtcaatttttgattttggacgaactaactacaacagctccaggattggagtcctcgacaatactggtcatttcacgtcaagtgatggcctaaacatcattgcttctgactcaggtcttggaataaacagaaggctcacaattgatcaagatggcaatctcaagttgtacagcttaaataaagtggaaaaaagctggatagtcacatgggaggccatgccgcagcactgtgacgttcatggactatgtgggagaaatagcatatgtgagtattctcctggtcctcggtgttcctgtcttccaggttatgagatggctgatctagagaattggagcaaaggttgtcagccaatgttcacaaacaactacggccaagccatagggcaagtcatatttgtcgagatgcgtcatgttgaattttatggatatgatacgggatttaatatatccgtttcactggaagattgtgaggaattttgttctcaacaacgttcctgtgttgcctattcataccatgccggaagtggttattgctatactaaaggtatgctctacaacggccggaagactcaatccattactggaagcacatatttcaagctacccaaaacttgcaatatctcagaggtgaaacaacatggcttgacatgcagacattcacattctacatatgaaatgcatcgacaacacggaaagtggttgtatttctatacatgtgctgcaatatttggagggctagagttgttcttcacaacaacagcttgtttatttcttcgaagcaaacagaatattccaaagtcagtgatggatggttatgaattgatgactgagcacttcaggaaattctcatacagagaattgaaggaggctacaggaaattttaaggaagagcttggaagaggtggttctggagttgtttatagaggcgtacttgacagaaagaaagttgtgacagtgaaaagattaacaaatgcaacagaagctgaagaggagtttcaatcagaaataagtgtgattggcaggataaatcatgttaatttggtaaggacttggggctattgctcagaaggcaaacataaactattggtttatgattatgtggagaatgagtcactggacaagcatctctttgagagcatagatgcaaaaaaattacttcgatggaaccagaggttcaccatcgcattgggaacagcaaggggcttggcatacctccaccatgagtgccttgagtgggttgttcattgtgatgtgaagccagaaaacatactcttgacccaggactttgaagttaaaatagcagactttggcctagcgaagctatccaaaagggattgctcttgtttgcaattatcccatatgagaggaacagtaggatacatggctcctgaatgggcgttgaatttgcccattaacgcaaaggttgatgtttttagctatggaattgtgcttcttgaaattgtgatgggagctaggatttctagtcagacaacaacagaaggggagaaactggatttgacacaaattgtggaagcactaaagcaagttgtagcttgtggagatgttacacacatagtggatgctaagctgcatggacaatttaaccatctccaggccatggaaatggtgaagatttccttatcatgcataggagaaaggacaaagaggccaacaatggatgaaattaccaaagctctgatggcatgtggtgatgaagacaagtatgctgactgcacagaatag

SEQ ID NO: 3203 - DNA, 1593 bp, Oryza sativa
  Clone ID: PAT_MRT4530_36991C.1
cgacgacgcctccctcgtacgccggcgctctcgcagttgccgccgccgccgcgaacgcccaccgcccgcgctctggtcggtggatcgtgacgtgctgtggtggtctctgatctgctctgggggtgggtgggcgtctcgcggagtcgccgtgttcgtcgagggctcgatcggctcggggagagcgagtgagaagaggtgagggttggggggaggcacatccgcggcggcggagagatggcggatttccggacctccacgcatcgggagaggtggatcttccagacgaacgatctgatggatagatggggggcggcgaaccagcgggccacggagacgctcgttcagtatggaacgacgcggttgaaggtggaccctgttgatgggtcgctgtcatacccggaacctgcgcctgatcatgttgtagggagctcaggtgtaaagcctctgtcttgtgaagaggagcgattgatgcgggtattttatgagcaaaagattcaagaagtatgttcagcatttaagttccctcacaaaatccaggctaccgcaataatatatttcaagagattttatctgcaatggtctgtaatggaacatcacccaaagcatattatgttaacttgtatttattcttcttgcaaagtggaagaaaatcatgtttctgctgaggaacttggtaaaggaattcaacaggaccaccagattattctaaataacgagatgattgttctcaaatctttagattttgatctgattgtttatgctccgtatcgatctatcgaaggatttgttgatgacatggaggatttctgcagagcaggtaatggtgagcaccaacggttgcaggatttacgtcaaactgcgatatctcaggttgacaaaatgatgttgactgacgctcctcttctctacactcctggacagttggctctggctgctttgcacaaatccaatgatatgcacaagatccttaattttgaaaggtacttggaaagtgttttttcaaggcaacattctgattgtccaatcgaacaatttgttgggtcaatcaatatgatcaattatttggttgagcagcttaaaatacctactcctaaggacatgaggcatattgaccgcaagcttaagcattgtttggatccaagctcacaggatgagcataagaagaaagagaagaagtcgaagcacaaatcaaaaagggcagctaatgaagcccaacttgacagctagaaaacatacggttgggctgcaccgtgtaagaatcagttctttagtttgttgtggctccaattgatcaaaagagctactttcctgagcaggtgaggttccgttttagccgaggacaaccaattttgagatgaagcgagataatacccatgacctcgccttcttgtaatcttgtatgcctggaagccctagcaaactcctcgttgcaatggctactgtactttttttggggggtaatttatcccttgtcaaatgggaagaagcagcatacatcggatgattgcctccatatacgaaaatgacagctaactcagacttttgtcggttgcatttttctgtttaaaaaaaaaaaaaaaaaaaaaaaaaaaa

SEQ ID NO: 3204 - DNA, 234 bp, Oryza sativa
  unsure (1)..(234): unsure at all n locations
  Clone ID: PAT_MRT4530_37018C.1
ggcgagctctcgaccgccactactgtacacggcccanagcgagcctcctcctcctctgcaccaccggagatggcttccgccgtgctgccggagccntcgngccnaagaagaaggncaacgtccagttcgccttnggctncngcatcctngantccatgacctacatcctccnnggntacgatatnggggtnatgagcgangngtnggtgtacatcangaaggacttnaacatca

SEQ ID NO: 3205 - DNA, 144 bp, Oryza sativa
  Clone ID: PAT_MRT4530_37686C.1
atgaatgcaacgccctttgatgaaggtagtttgggagcagggaacgaggacatccagcttcgtcgacagacgctacgccatgactttcgcagccagcttggagaagctatgcaccaggctgatcggcctgtagtccttgagtag

SEQ ID NO: 3206 - DNA, 1562 bp, Oryza sativa
  Clone ID: PAT_MRT4530_37832C.1
ggggagagagccactagcagcagcagcgatcacaaattgtgccaattcacaaaccgccgcccccttccctttttaatagctgccttcgcctctcgtcccccgtccggcatcgccttgctgtctctgcgaatcgagagagagtcagataaggtcgttaattaggtttgtcaattcggctgcttgcggcgagagaagaggaggagggattagggatggacggggcgccggtggcggagttcaggccgacgatgacgcacggcggccggtacctgctctacgacatcttcgggaacaagttcgaggtgacgaacaagtaccagccgcccatcatgcccattggccgcggcgcctacgggatcgtctgctccgtgatgaactttgagacgagggagatggtggcgataaagaagatcgccaacgcgttcaacaacgacatggacgccaagcgcacgctccgggagatcaagctcctcaggcacctcgaccacgagaacatcataggcatcagggatgtgatcccgccgccgatccctcaggcgttcaacgacgtctacatcgccacggagctcatggacaccgacctccatcacatcatccgctccaaccaagaactgtcagaagagcactgccagtatttcctgtaccagatcctgcgggggctcaagtacatccactcggcgaacgtgatccaccgcgacctgaagccgagcaacctgctgctgaacgccaactgcgacctcaagatctgcgacttcgggctggcgcggccgtcgtcggagagcgacatgatgacggagtacgtggtcacccggtggtaccgcgcgccggagctgctgctcaactccaccgactactccgccgccatcgacgtctggtccgtcggctgcatcttcatggagctcatcaaccgccagccgctcttccccggcagggaccacatgcaccagatgcgcctcatcaccgaggtgatcgggacgccgacggacgacgagctggggttcatacggaacgaggacgcgaggaagtacatgaggcacctgccgcagtacccgcgccggacgttcgcgagcatgttcccgcgggtgcagcccgccgcgctcgacctcatcgagaggatgctcaccttcaacccgctgcagagaatcacagttgaggaggcgctcgatcatccttacctagagagattgcacgacatcgccgatgagcccatctgcctggagcccttctccttcgacttcgagcagaaggctctaaacgaggaccaaatgaagcagctgatcttcaacgaagcgatcgagatgaacccaaacatccggtactagattgaatcaccatggaaatgagatcccgtctatacctgctttgtacatatgatcaagattgagagccgggtagactgaacattgcatttgtttgtttgttgatgttcgaaacccacattctctgcaagttgtggctgctttgtatgatatatggtactatgttcgaataaaagggtttggaactttggattaaaaaaaaaaaaaaaaaaaaaaaaaaaaaaaaaaaaaaaaaaaaaaaaa

SEQ ID NO: 3207 - DNA, 275 bp, Oryza sativa
  Clone ID: PAT_MRT4530_37978C.1
tttgtttttttttttttttttttttgattatcgaaatttgactgccattaattggaactagagtgtaacaaactacatacatagacaaactccccgaatcatggccctaaacattttcaaatggaaaaatggacgccccttgaaaccatgacatttttaaacaacctaacacaggggctcgattaaaaaacaccagaaggtggcgacccatgactacagctagtccttatcatacgactacggttccgccttctttttgaggctggatgattcct

SEQ ID NO: 3208 - DNA, 2190 bp, Oryza sativa
  Clone ID: PAT_MRT4530_38425C.1
atggtgggcatcgacctcaacaccgtggaggaggaggaagacgaggaggagggcggcgccaccggcaccgtcacggcgcctgcggaggcgagggcggggggcgcggtgtgcctggagctgtggcacgcctgcgctggccccgtggcgccgctgccgcggaagggcagcgccgtcgtgtacctgccgcagggccacctcgagcacctcggggccgcgcccggctccggccccggcgccgcggtgccgccgcacgtgttctgccgcgtcgtcgacgtcagcctccacgcggacgccgcgacggacgaggtgtacgcgcaggtctcgttggtcgccgacaacgaggaagtggagaggcggatgcgggagggagaggacggcgcggcctgcgacggcgagggcgaggacgccgtgaagcggccggcccggattccccacatgttctgcaagacgctcacggcctccgacaccagcacgcacggcggcttctccgtgcctcgccgcgccgccgaggactgcttcccgccgctggactacagcctgcagaggccattccaggagctcgtggcaaaggatctgcacggcacggaatggaggttcagacatatctatcgaggccaaccacggaggcaccttttaaccactggatggagcgggtttatcaacaagaagaagctagtatctggggatgcagtgctattcctcagaggtgaagatggagagcttcgattgggagtgcgccgagctgctcagctaaaaaatgcatctccttttcctgcacttcataaccagatctcaaatactagtagtcttagtgaagttgcacatgctgtggccgtgaaaagtatttttcacatctactacaatcccaggttaagtcagtctgagttcattataccatattggaagtttatgagaagcttcagtcaacccttttctgttggaatgcgattcaaattgagatatgagagtgaggatgcttctgaaagaaggcgtactggaataataattggaagcagagaggcagatccaatgtggcatggttcgaagtggaaatgtttagtggtgaaatgggatgatgatgtggagtgccgtcggcctaatggggtatctccttgggagattgagcttagtggatcagtttcaggatctcatctgtccactccccattcaaaacggctgaaatcatgcttcccccaagttaatccagatattgtgcttccaaatggaagtgtttcttcagattttgcggagtctgccagattccacaaggtcttgcaaggtcaagaattgttgggtttaaaaactcgtgatggtactgttaatacagcttctcaggcgactgaggcaagaaattttcagtacactgatgaacgaagttgctctatcaacatgagtaacaatatcttaggggttccgagacttggggtgaaaactccaagtggaaaccctgggttttcctaccattgctcaggctttggggaatctcaaagattccaagaggtcttgcaaggtcaagaagtgtttcgtccttaccgaggagggactttgtccgatgcctgtataagaggttctggcttccgtcaacctgatggcaaccatgcacctggtgcagcatttaaatggcttgcaccacaaggatgtgatcatcatgggataaccacatcagttctgccgcaagcatcctctccatcatctgtcttaatgtttccacaaactagttcaaagatgcctggccttgaatacatatacggatgcctggatagaaatgagaatagccgacattttaagattggacctacacaagatatgacaagaactgatcaaacattacgactctggcctcatcttatttcaggcaaagtgctagatgagtgtacgagaaatgagaagctgcactctccagtcagtggtgctgagcatgaatcaaataacaagtgtcttaatacaaatggctgcaaaatctttggtatatcattgactgaaaaggcccaagcaggcgatgaagtggattgtggcaatgccagttatcattctcggctccagtctttaaaaccacagatgccaaaatcattgggcagcagttgtgccacgcatttccacaggctgtgctaccgcatccaggatgatgacaggggaaatgcagatgatacacgaaggatgcttgtcaagtttgttgtaatgcacttctaa

SEQ ID NO: 3209 - DNA, 2854 bp, Oryza sativa
  Clone ID: PAT_MRT4530_38426C.1
gccattcatggccatcaccaccatgtgtcgcctccccacctccgcctctcctcacccactccgctctccgctccattaaacccaagcgagggacctcgatcgcctcccctcctcgcttccctccccgtctctcctctttcgaccgcgttggaagcaagcgcggcggcggcgcggcgagctgccggtggggggttgcggctatggtgggcatcgacctcaacaccgtggaggaggaggaagacgaggaggagggcggcgccaccggcaccgtcacggcgcctgcggaggcgagggcggggggcgcggtgtgcctggagctgtggcacgcctgcgctggccccgtggcgccgctgccgcggaagggcagcgccgtcgtgtacctgccgcagggccacctcgagcacctcggggccgcgcccggctccggccccggcgccgcggtgccgccgcacgtgttctgccgcgtcgtcgacgtcagcctccacgcggacgccgcgacggacgaggtgtacgcgcaggtctcgttggtcgccgacaacgaggaagtggagaggcggatgcgggagggagaggacggcgcggcctgcgacggcgagggcgaggacgccgtgaagcggccggcccggattccccacatgttctgcaagacgctcacggcctccgacaccagcacgcacggcggcttctccgtgcctcgccgcgccgccgaggactgcttcccgccgctggactacagcctgcagaggccattccaggagctcgtggcaaaggatctgcacggcacggaatggaggttcagacatatctatcgaggccaaccacggaggcaccttttaaccactggatggagcgggtttatcaacaagaagaagctagtatctggggatgcagtgctattcctcagaggtgaagatggagagcttcgattgggagtgcgccgagctgctcagctaaaaaatgcatctccttttcctgcacttcataaccagatctcaaatactagtagtcttagtgaagttgcacatgctgtggccgtgaaaagtatttttcacatctactacaatcccaggttaagtcagtctgagttcattataccatattggaagtttatgagaagcttcagtcaacccttttctgttggaatgagattcaaattgagatatgagagtgaggatgcttctgaaagaaggcgtactggaataataattggaagcagagaggcagatccaatgtggcatggttcgaagtggaaatgtttagtggtgaaatgggatgatgatgtggagtgccgtcggcctaatggggtatctccttgggagattgagcttagtggatcagtttcaggatctcatctgtccactccccattcaaaacggctgaaatcatgctttccccaagttaatccagatattgtgcttccaaatggaagtgtttcttcagattttgcggagtctgccagattccacaaggtcttgcaaggtcaagaattgttgggtttaaaaactcgtgatggtactgttaatacagcttctcaggcgactgaagcaagaaattttcagtacactgatgaacgaagttgctctatcaacatgagtaacaatatcttaggggttccgagacttggggtgaaaactccaagtggaaaccctgggttttcctaccattgctcaggctttggggaatctcaaagattccaagaggtcttgcaaggtcaagaagtgtttcgtccttaccgaggagggactttgtccgatgcctgtataagaggttctggcttccgtcaacctgatggcaaccatgcacctggtgcagcatttaaatggcttgcaccacaaggatgtgatcatcatgggataaccacatcagttctgccgcaagcatcctctccatcatctgtcttaatgtttccacaaactagttcaaagatgcctggccttgaatacatatacggatgcctggatagaaatgagaatagccgacattttaagattggacctacacaagatatgacaagaactgatcaaacattacgactctggcctcatcttatttcaggcaaagtgctagatgagtgtacgagaaatgagaagctgcactctccagtcagtggtgctgagcatgaatcaaataacaagtgtcttaatacaaatggctgcaaaatctttggtatatcattgactgaaaaggcccaagcaggcgatgaagtggattgtggcaatgccagttatcattctcggctccagtctttaaaaccacagatgccaaaatcattgggcagcagttgtgccacggtccatgaacaaaggcctgttgttggcagggtcgttgatatttcagcagtgaatacgatgatctgatacatttactgtatccagggagtatgcttgcagaaatagggaccaacattagtatcatactcactggtgctgaggacacaacttccattctggctatctcgtccctctacgtgcttgttgcctcaacttcagcatttccacaggctgtgctaccgcatccaggatgatgacaggggaaatgcagatgatacacgaaggatgcttgtcaagtttgttgtaatgcacttctaagttctaagctttgaacctcttaacgttgctcctattttaagctcccgttgtaatcggcatttatgttgcctgacctacttgcatatttttcaatttgtccgttaagacagcccttttagagggcttgcttatgttagcaacccttaatttccaaattccaagtatggcgaccgttcgaggggtttgtttgctcctgggacgacatcggtacatgacatagaatccattggtgacaccagggcacatcagaattaaggtgtagggcg

SEQ ID NO: 3210 - DNA, 1729 bp, Oryza sativa
  Clone ID: PAT_MRT4530_38784C.1
gggtttttcataaaccctttctctgtggtgccagcagccgaacccaactgcaaaaggcgccatttttttcccctctttccctcgtcttcttcctccaaatccttcgccccctcctataaatccacctcgcgcaaatccaaatccaaatccaagctcggagaagagacctacctacctacctacctactctaggcgggagagatggtggggaagagcggggtggcggaggagggcggagcggcggcggcggcggcggtgaggaggtgggtggaggccggcggcgggaggctggtgatggacggcgggctggcgacggagctggaggccaacggcgccgacctgaacgacccgctctggagcgccaagtgcctcctctcctccccgcacctcgtccgcaaggtccatttagactacctagaagcaggtgcaaatatcataatcacagcgtcataccaggctacaattcaaggctttgaatccaagggattttcaaaagaacaaagtgaagacttgctcgcaaagagtgttgagattgcacgtgaagcgcgtgacatgtttctgaaggaacattcagatcgtcccatacaacatcctatcctggttgcagcttccattggaagttatggggcctatcttgctgacggctctgagtacagtggggattatggcgaagctggcacgttagaattcctgaaagattttcataagcgaaggctggaggttcttgcggaagcaggtcctgatttgatcgcctttgaaacaattcccaacaaattggaagctcaggcttacgttgaacttcttgacgaatgtaacatcagtatccctgcatggttctcatttaattcaaaagatggagttcacattgtgagtggagactcgttaattgaatgtgctactattgctaatgggtgttcgaaggttggtgcagttggaataaattgcacacctccaagatttatccatggcctgatactctccattcgaaaggtcacagataagccaattctgatatatcccaacagcggagaaagatatgatgctgagaaaaaggagtgggtggaatcaactggcgtgtcagacggtgattttgtttcctacgtaaacgaatggtgcaaagatggggctgtcctcattggcggctgctgcaggacaactccaaacaccatcaaggccataagtagatcacttaaccaacgccactcttcgctgcatttacctgtggcatagagttgcacgctccttcaggtgtgctactcatgctggtacctgaacctgatgaacatatcctggaggtccttactagcagcatgatgttctctgctgcaaatgagatggctctgcacttacacttgcgaataactgtgcgtttcgtctgagttcttaaagttgcccaatctggaggtacaacctaccaagaaggattagcaagcagaaaacagtgatagtgaactgttctactaagtaagtaacaagtgagtgaaaacaatctgcggcaaagttgatgaagcttgtaagctatcaagagttgttgtgcagacctgagcctgttataagagcctatgttgtgtactactactactgctgtactactactaccctgtgaactcttgttttgctatacaagtctataacaataagttttgtttgttaatggagaacttgaagctctctcgtgccgattcctgcagcccgaggagtccaagccttcggtacgcgtgcatcgacg

SEQ ID NO: 3211 - DNA, 647 bp, Oryza sativa
  Clone ID: PAT_MRT4530_38870C.1
acggcggcacggtcaccaccgcaccagtgccaccacccacggcgagccttcgccgcgagctcgccctctctccaaacctccccgcgcgcggaggcgtcgccggacagcccaacgctgccacccgcgaggcccccgccgccgccgtctcctccgcccggcgagtcgtcgtcgtctctccctccctcgcgggatacctagatgagcaattttgtcaggtggaagatttgcaggatgaagctagtcctaattttgtggaagaagttgttactttgttttttaaggactcgggcaggctaatgtcaaacattgagcaagctctggagaagtacccaagagatttcaacaggtgggatacatatatgcagcaactaaaaggcagctgttccagcatcggcgcttctaggatgaagaatgagtgcatgtcgttcagggatagttgtggccaaggaaatgttgaaggttgcatgaggtctttccagaaagtgaagcgggagcatgctgtcctgaggcagaaactagaatcctatttccagctgctaagacaagctggccccgctggagctgccactaggcctgtcatggctcatattggccatgcctctggttctgttctgccaaccctgtttctcttctctgaagcatgctga

SEQ ID NO: 3212 - DNA, 1194 bp, Oryza sativa
  Clone ID: PAT_MRT4530_38906C.1
atggccaccaccgaggggtgcctcgtcgccagcacgaaccgcggctgcaaggccatcgccgagtccggcggcgccgtcagcgtcgtcctccgcgacgggatgacgcgcgcccccgtcgcccgcctccccaccgctcgccgcgccgccgagctcaaggccttcttggaggattctgtcaacttcaataccctctccatggtcttcaataggtccagtagattcgcgaggctgcaaggggtacaatgtgccatggctgggaggaacctgtacatgagattcagctgctgcacgggggatgccatggggatgaatatggtctccaagggcgtgcagaatgtgctggattacctccaagatgacttccctgacatggatgttattagcatctcaggtaacttttgctctgacaagaagccagctgctgtgaattggatcgaagggcgcggtaaatctgtggtttgtgaggcagtaatcaaggaggatgtagtcaaaaaggtgctgaagaccaatgtgcaatcgttggtagagctcaacgtgatcaagaatcttgctggttcagctgttgctggggctcttgggggtttcaatgcccatgctagcaatattgtaactgcaatcttcatagccactgggcaggatcctgcccagaatgtggaaagctctcactgcatcacaatgttggaagctgtaaatgatggcagagaccttcacatctccgttactatgccatcaattgaggtgggcacagttgggggagggactcagctggcgtcacaggctgcttgcttggacctgctcggcgtgaaaggcgcgaacagggaatccccgggatcaaacgcgaggctcctggccaccgtggtggcaggtggtgtccttgccggggagctgtccctcctatctgcactcgccgcaggccagcttgtcaagagccacatgaaatacaacaggtccagcaaagacatgtccaagaggtcaagggctcatcaaacaaaagtgaaggacagtgaagtttacggtgacatcgtcatggctgctgatgctgatacaaacagttcttgttccgaggagagagctgcgctggctgctgcttcggatccttaccgttatgttgagaaacgaaagccaattcctgacccccaggatactggcctaatttatgggaagaagaaggatcctacaaaatctgacaactag

SEQ ID NO: 3213 - DNA, 1979 bp, Oryza sativa
  Clone ID: PAT_MRT4530_39157C.1
tgtaagcgtcgatgaaggcgcgcagcatgcgagcgaagaggaaggcgagccatcgcggacgaacagggagcagtcgcaagaagcgcttcctaaaaacgttattgctgccttctcctggtgtaggacgtcgaaggcagaggttccggagacttgctctcccgatcgccggtgcacgccggcgagcgggatggagtagtctacgagcgacggcgcagcacagagtaggaggcaaatcctagattgattttgcatgtgttgcgtgaaggcggcggctcggtttatatagagataggtcgcttgatcagggtgctcgcacgatctccactccgtgtaactgaatcggataagtcgcgcgtaacttatccggactccacgccgttttcacgcaccagatttttcggaatgtttccaaaataaaacaaatccgaatttcccgtagcaaaaaatcacaaaagcccacctcatgggatggcatgcatgaggagtttagtaccaccttgcttattctagaagagggggacctccgtgcacgacgtacgcatcgaatggtccgcaaaattggctcctcacccttgcgtagatgcagccttcttttgcagttttgttttgctgcgggaagttcggatttgttttgttttggaaatatttcgaaaaatccggtgcgtgaaaacggcgtggagtccggataggttacgcacgacttatccagttcggtcgaaatcaatctaggatttgcctcctactctgtactgcgtcttcgctcgtagactacttcatcccgctcgccggcgtgcaccggcgatcgggagagcaggtctccggaacctctgccttcgacgtcttgcaccgggagaaggcggcaataagatttttgggaagcgcttcgcgcgactgctccctgttcgtccgtgacggctcgccttcctctccgctcacgtgctgcacgtcttcatcgacgcccgcaaccacgagtagttcctgccgagcaaccggtctttccgccacctcgatgtgtgcttggcgacaagagatttgctattattgcagagagcttagagctccatcaacatggacaaaaatacagcaccggtatagttcatgaaaggtctgtttgctctcacacaaaactataaacagatccgggataacaatgtgggggtaaagtacggtctggatttcccaagaacagatccaggattttcttgatacaaatgctctcgaagctctatcacatcaagtagaaaatgaccgcttgcgcttctgaacatcaaactcaacatcaatgaggccggttataccagctttgatcttctgtcctggtcgtactgggcctacaccctcaggagtaccggtcagtataacatcaccctccattaatgtcatgatggaactgatataacttattagagatggtatcttgaatatcatatcacttgtagatcccttctgcctaagttcatcatcaacctttagccagagctctagatcatcaggattagctacatctgattttggaatcactgcactaattggagtgaaggtgtcctgtgctttacccaaagtccaaggaagacctgcagacttagccgcagactgaagttctcttgctgtcatgtccaaagcaagtgcataacctcctacgaagtccatggcggatgcttcggggacgtcgcgcgcgcgctgggagatgacaacggcaagctcgacctcgtggtgcagcgactcgaccggctccggcacctcgatggcggcgccggccacgcccgcgtggaggaacgacgaggtgggcttcaggaacagcaccggctccttggggacggggttcccgagctccttggcgtgggcgacgaagttgcggcccacccctacgatcttcgtgctggccgccaggagcctctgcgccgccgccgccatggccgccggaggagagctgcgagcggcggagggatgcgtcgatcgaggaggtggaggtggtggtg

SEQ ID NO: 3214 - DNA, 641 bp, Oryza sativa
  Clone ID: PAT_MRT4530_39492C.1
gtgtcctgtcactaatatgtctactggaggaggggatttgtcaagatcttcaaatgctcccgttgcttctggttcaccatccaattcagtctccaaaagtactggtggcagcccaccggcttctggaagtgcaaagggtgttccaccagctgtccaattgccgtcacctcaacaacaatcagccaagaatccagcatcgacgtctggagccaagtcagctcccacaaatcactatagtagtatgcctatgccatcgatccttggtcaacagccaaatgtgccgcctggttctaattcaggcagtaagcagcagtcgcacatgatgaaacagcagccatttccacaaggaggtcatttcttcatctccaatgcatacacaccacaagcccctggagctgctggaggtgttgctcttggcctttaccagaagcgctcagctgacaagacgcagcagcagcagcagccccatcagcagagcgccatgtcggctgcagccagcaataacatgaagactcatcatcctcccgctggcagttttatgcatcttgccgcagcatctcagtcttcgaggcggtgtgcctcactctcatatgtcagcggcacaattgacttttggggccccaatgtcaatgtctgtaaaa

SEQ ID NO: 3215 - DNA, 2670 bp, Oryza sativa
  unsure (1)..(2670): unsure at all n locations
  Clone ID: PAT_MRT4530_39564C.1
agatcacttaatgatcactctcctttcgctaaatcatgaccatccagaccagagcatggagaaagaaaaaccaagctgctactacaaacagatcatcatcaacgacagcgaacaaaggcgaatatcgagcattctcaacatacattagggtcgatcccttctatgcgtgcatgtatcgatcgtgcgtgcacgcatcataagccgctgacgcgggagcacgtccggcggacctcgccgtcggtgccggtgctgacgccgaggctgctgagcctggcgaacgaggccgcccagctggcgaagaagctgccctcgctccgagcgaacgcatctagcgtgggcttttttcaacctttcaattcaagatcttgagaagtcactgacgaacaatgtgaacttaaaattcttgtacagaaacattccgtaatttatacacagattatccagttgcgttgctaattacactggtacaacagaacgctatgaatgtgtcgatccaaacagcacatatattattatagcagagtggtgtcacagttcaaagtgcttctaagcgaaacgagcagaataattcaatttccaaggctggtagatctggattacaatttggcgtgacatagctcagaagcacagccaaaagcagatgaaccatcatcggttcatttatcagttgccagaacacaccgcaggcagccaccttcatgcagcaggtcaaacgccttgttgatgtcagtcaggttcatgctgtgagtaacgtactcgtccaccttgatttccttgttcaagtacttctcaacgagccatggaacttggcttcggctcttgaaaccgccgaaagctgttcccttccagacacggccagtgacgagctggaatggtcgtgtagagatttcttgcccagaagcagctacaccaacgatgacagaggttccccagcccttgtggcagcactccaatgcagacctcataacagaaacatttccaatgcattcaaagctgtagtccacaccaccgtctgtaaggtcaactatgacctgttggattggtttgtcatggtcctttgggttcacaaattctgtaaccccaaagttctttgcgacatcaaactttttgctatcaatgtcgatgccaataatccgagaagcaccagctgattttgccccctcagcaactgcaagtccaactgtgccaagtccaaaaatagcaacgatggaacctgcttcaacctttgcggtattccatactgctccgaggccagtagaaacaccgcagccaagcaggcaaactttgtctagaggtgcctctgggtttatctttgcggcatttccattgttgaaaaaagtgcactggctgcatttagatatgacaccgacacctgtagcggcacgaactttgacacagaggttggtctttccactcttgcaaaacttgcattctctgcattctgcttggtaacaaggaatgacatggtccccaggctgcacctcagttactccttccccaacactttcaacaattccagcagcttcatgaccaagaatgcaaggaaatagaccctcaggatccttgccgctccaggtgtagtggtcggtgtggcagagcgcggtgaagaggatcttgacacggacctcgccggcctgcggcggcgccacctgcacgtcctcgatcgtcatcggcttgttggcctcccatgccaccgccgctttgcaggtgatgacctggccctgggtcgaggaagccattttcaccccccctccttgcacgctctgtggtagatacggtggagaaaaggatggaaaaacagagagggcagtagatgtgtagccaagaacaagcagtgagaccttgagtgacttggccatctgcaacgcgttgtcgtttgcgtactgcattgagccgtctggaatgttttgtataccacgtgctagttgccatgagagaaatccgaaaacaagtccaactgcagctccaatatttgccttttctgctgtcaactcaaactcaagttctaaaaacttcaatttcctttttactttcatagcctctacttcagattgaactactggacgttttgatagcagcttaccggttttgctcattgtttcagcaatcttcttcagctctcccttgccgtattgtcccatggacgtaaacctccttccagctgacatcagccgcttgccaaatgtgccggtcaagtagggttccattgaaggaagttgcttgacaaggttgtttgatgtcgatgtgtcagccatctcccatgcctcgtcaagaacaggcccattggagagatcaaatgccgcatcattgagatcgaggcgaaggtcgcggggaagctgggacaggaatttgggcgggagaaccaagcaatccgcgagttcttgcaagaggggaaggacaggctcctcgtcggggttgtcaccgccggtagaagaggaggtaaccggctttggggagtcggaggagacggcgaatacagggggtgggtatctacatcgccggagatggaagcgggaggggcggaaggaggaggaggtggaggagacggcggcggcggcggcggcggcggcgaggagtgggcggcggaggacggccgtggccattcgaagactccccccccccccctcctgncacgctcggtggtagatgcgatggagcagagaagggaag

SEQ ID NO: 3216 - DNA, 881 bp, Oryza sativa
  unsure (1)..(881): unsure at all n locations
  Clone ID: PAT_MRT4530_39566C.1
attggtttgtcatggtcctttggggttcacaaatntctgtaacncccaaagtcttttgcgacatcanacttttttgctatcaatgtcgatgccaataatccgagaagcaccagctgattttgccccctcagcaactgcaagtccaactgtgccaagtccaaaaatagcaacgatggaacctgcttcaacctttgcggtattccatactgctccgaggccagtagaaacaccgcagccaagcaggcaaactttgtctagaggtgcctgtgggtttatctttgcgacactgacatcgtgcacaacagtatactggctgaatgtagatgttcccatgaaatgataaatgggttttccatttattgagaaacggctcttgcgatcattcatcatgacaccgacccctgtggcagcacgaactttgccacagaggttggtctttccactcttgcaaaacttgcattctctgcattctgcttggtaacaaggaatgacatggtccccaggctgcacctcagttactccttccccaacactttcaacaattccagcagcttcatgaccaagaatgcaaggaaatagaccctcaggatccttgccgctccaggtgtagtggtcggtgtggcagagcgcggtgaagaggatcttgacacggacctcgccggcctgcggcggcgccacctgcacgtcctcgatcgtcatcggcctgttggcctcccatgccaccgccgctttgcaggtgatgacctggccctgggtcgaggaagccatttcacccccccccccccccccccctccttgcacgctcggtggtagatgcggacgagaagagaagggaagaggatgtgattgcgaggtgagaggagaggatagggagggggaga

SEQ ID NO: 3217 - DNA, 309 bp, Oryza sativa
  Clone ID: PAT_MRT4530_39601C.1
cccacgcgtccgcccacgcgtccgaacccccccacctcgagctctagggtttcgcggatcgaggggcgccgcggctagggtttgggtggggggtgcctgcgcgatggccgctccggcggcggagtcggcggtggtgggggtgggggtggattcatcgacgagcgccgtcgttagggatggcttcacggagcttgagcggtagcaatagcttggttgcgatctggacgcgcatgcaccaggtactcatggagcacttaaggctcgctggagcgcctttatccctagcgcattgtagacgctctgtaacaa

SEQ ID NO: 3218 - DNA, 185 bp, Oryza sativa
  Clone ID: PAT_MRT4530_39942C.1
acggcacgaggcgcgagcagagcaagcagaccaagcagcagcagcgatagccgccgcagccacgacatactcccacctgctacctgctactacccgccagcaggcggtggcctcgctccaatgcggcctctacctataccggaggcagcccggcaggctcgccggcgggtcgtcggccccgagcg

SEQ ID NO: 3219 - DNA, 2592 bp, Oryza sativa
  Clone ID: PAT_MRT4530_39949C.1
caggggcacagcgggctgccggtgtcggtccccccggcggaggagcaggaaagactgccgtcgttttcgttctcctctgcttcgcctcggccacgctgcggccacctcctttctgccacggcaaaagcctcctcgggatgctccactgatcgtcttctacttactcctctttcttccagcttggccggcgtgtggctgattattccagaatttccattagcttaatcaccggatcaagaagaatgagagaaaggggggagaggctcttttctgtgggatggcatgattccgttttgtaggagcagcgcaccatttcagatttcttcctcctcctcttcttctttccgttgtgcttgctgcttttctctactaccttttccactgttgcgaagtcgggttggtgggtggttgattgattgttctttccttcctcgtgagggttcttgcttcttggcttcttggccgcttcttgagttggggctagctggttcttttgctgtctctgtcccgtcaaactgaagcgagcgagagattgaccgggtgggtgattcttcttcgaggagcttcttcttggagctcgtgagagtggagtgatcgaggtggtggtgtgagagcagtagacaggtttttcttggggagcttggaggtagccggagttgggggaggaggaggaggatggccgccgcgccgccgcccaaggccgacgagctgcagccgcacccgcccaaggaacagctcgccagcgtgtccttctgcatcaccagccctccgccatggcccgaggccattatattaggattccagcatttcattgttatgctgggcaccactgtcatcataccgagtgcacttgtacctcagatgggaggaggaaatgatgaaaaagctcgggtaattcagacgctgttgtttgttgccggaataaacaccttgttccaaacattcttcgggtctcgtctccccgttgtgatgggtggctcatacactttcgtcgcaccaaccatctcgatcattctggctggacgttacaacaatgaagcagaccctcgtgagaaattcttacggaccatgaggggaacacaaggtgctctcatcatcgcgtcgacgattcagatgatacttggtttcagtggtctctggcgcaatgttgttaggttgttgagtccattgtctgcggttcctcttatttcacttgttggatttgggctttatgagcttggttttccaggggtagctaagtgtgtggaaattggtcttccagaactcatcctacttgttgcattttctcagtatttgcctcaagtgttacattttgggaagcctatctttggccggtttggtgttcttttcaccgtttcgatagtgtggctttacgcgtacattctcacaattagcggtgcttacaagaatgctccaccaaagacacaggtgcattgccgtgttgatcgctcaggccttatttcaggagctccttggattagagttccttatccctttcagtggggagctccaacttttgatgctggtgaagcctttgcaatgatgatgacttcatttattgctcttgtggagacaactggagctttcattgctgcttcaaggtatgcaagcgcaactatgatacctccatcaatcattagtcggggcatcggttggcagggaatcagcatcttgattgattctttttttgggacggccaatggaacctcagtttcagtggagaatgttggtttactcgctttgacacatgttggcagcaggagagtagtgcaaatatctgctggtttcatgatcttctttgctatccttggaaaatttggagcacttttcgcatccattccattgcctatatttgcgggcatgtactgtattttcttcgcttatgtcggtgcctgtggtttgagtttccttcagttttgcaacctaaacagcttcaggaccaaattcatcttgggttttgctttcttcatggggatctcagttcctcagtacttcaatgagtacacagctgttgcaggttatggaccagtgcacactggtgccagatggttcaatgatatgataaacgtgccgttctcgtcgaagccgtttgtcgcgggtcttgtggcctacttcctcgacaacacgatcgagacgcacaataacacggtgaggaaggatagaggctaccattggtgggacaaattcaggagcttcaagaaagacgcgaggagcgaagaattctactcgttaccgttcaatctgaacaagttcttccctgctgtctgaatgatctagcaaatgtcacccaagcaaaaatggttcatgtctgaacataattctgctggccttcttcagtgttgctgtgcgtcagttttgtgtacttataataggcgaatcttactaattggacaacggagatgtgccttagaatgggaatatcatgtctatttttttgtcctacaatgatttatgtgtcattacctaggtctttctcttatcaagttgtcaatgacccaatgtacatgtggcttttctatcggatagtattagtatcacatttaacaaaaaaaaaaaaaaaaaaaaaaaaaaaaaaaaaaaaaaaaaggcgag

SEQ ID NO: 3220 - DNA, 2506 bp, Oryza sativa
  Clone ID: PAT_MRT4530_40043C.1
tctcccccaaccaaaccccaaagcatatcacaatcactcgggagggaagggccccttatttattcgcagtcctctcctcatcatcactcatctcccttccctgtcgattaccttctctccttcctctgttcctcctctcctccacacatccaggcaggcaacacaagaatcatccgggagagcgacatggccccggttgccgtgggcgacaccctccccgacggccagctggggtggttcgacggggaggacaagctgcagcaggtctccgtccacggcctcgccgccggcaagaaggtcgtcctcttcggcgtccccggtgccttcaccccgacctgcagcaatcagcatgtgccaggattcataaatcaggctgagcagctcaaagccaagggtgtagacgacatcttgcttgtcagtgttaacgacccctttgtcatgaaggcgtgggcaaagtcataccctgagaataagcatgtgaaattccttgccgatggtttgggaacatacaccaaggcacttggtcttgagcttgacctttcggagaaagggcttggtattcgttcgagacggtttgctctccttgctgacaacctcaaggttactgttgcaaacattgaggaaggtggccaattcacaatctctggtgctgaggagatcctcaaggcactgtaagagcttcagctcttaggaacggcagcgatcacttggacctatcgtgtcaatcttgtttaaatttgtctgcaaaatacttgtgcgaataaaattgtcgatgagctgcctagttgtgaggactttatgataatgtttgaatctgtatccactgttgaatcaagtagtaatgttcagtgctcatgttaagttataatcttcaaaaaaaatctccaaaaaaaaaaattttttttttttttttttttttcctttttagattgcaactgttattattataagccgaagctgtaggtgcactgggtgatgggtcaacaccagagaatcaagcataaagaaactgaacatgtggatgatcgagaattacagcagccacagtatcccagaagtccataacatcaggatataacgaccaatgttatctctcggacaccatcctgttcgtgctgataatgtttggacctcagttgataccgcgtcaaggtttactaacaaatgtgtaaactaccaaactatataccagcaatgtctaccaaaatctgacgtggaaatgatgcgaggaatatcaattgctccagaaaatgcataaccttgctagctctgattcagacatcatgcagagtaccttgatggttcctgctttaatctagcttatcagtaaataagaacttcgctgagcttttaccacctataatgaacagcggaggggtattcttgttggatgacagctgctttcacatcccacaacttaaccgcctaatctaatttaaaatttcaatgtacaacatcacataatatcagggcgtctgactccagcaactttgtcccattcctctggggagagcatgtcagccatgtacttctcttgaccacgccaaaggatcttgtcaatgacaccaaactcctttgccttcaaggaatccatataaaatggtcctctcatcaccttgtctattttctctggtggattccccgtgtgccttgctaaaagtctcactaaggtgttcctgttgtgcacaacctctttcgcccgaataacaacatcagatgcttgcatcattccatatgaagggatacgaggttgctgaatcatagctggcatgatagaatctttggcatgagggaacatatagcgttttcctttctttcctgctgcaagtacaagacaggcatgacctgccgcagctcctatacaaagtgtatggatcctaattttctcagttttcatccgcatcatggcatcatagatagcaaaaccttcactctccattccaactggttcaccatcatcacgagctgttcctgtggagttgatgtatatgtaaacaggttctttactattcatccactcaaggtacatcaactgcgcaacgacaagctctgtaactgctggcaccaacggcatgccaatgtaaacaattcggccatgaagaagcaatgatggcaagtcagggggaggccttctaggcctgtgctggctgtaagaactgctagatcgttccacctgcgcgggcgaggccatgagcttggcgttctggaagatctcgaggaacggcaggtggtcgtcgccgcggcgcccgccacctgccgccgcagcctggagctcctccggcgaggcggcggcgagggtggacaggaacgggtcggccctcgggttgaagagcgggttcgggctcccccccgacgccgcccgcgccaccagcgcggaggacgccgccgcgccaccccgcgcctggcggagcaaggtcggaggcagggagaggaacgaggaggaggccccggaggaaggtgcagtggagggcgtggggaggcggagcgacagggaggcggacgccat

SEQ ID NO: 3221 - DNA, 861 bp, Oryza sativa
  Clone ID: PAT_MRT4530_40136C.1
atgagcgggcgggggaggggggacccgctggtgctggggagggtggtgggggacgtggtggacccgttcgtgaggagggtggcgctgcgggtggcgtacggagcgcgggaggtggccaacggctgcgagctccgcccctccgccgtcgccgaccagccccgcgtcgccgtcggcggccccgacatgcgcaccttctacaccctggtgatggtggatccggacgcgccgagcccgagcgatccaaacctcagggagtacctgcactggctggtcaccgacatcccggctaccacaggagtctcttttgggacagaggtggtgtgctacgagagcccgcggccggtgctggggatccacaggctggtgttcctgctgttcgagcagctggggcggcagacggtgtacgcaccggggtggcgccagaacttcagcacccgcgacttcgccgagctctacaacctcggcctccctgtcgccgccgtctacttcaactgccagagggagtctggaaccggaggaagaagaatgtgagctagctctcccctctctatctctcactccctgaatttgggacaagtcctgaattttgcatgacaaatcctatactcggaacgatttgaaatggtaaaatttgatcatatgtatttttagctccctatcctctctctctgtacgttagttacataaatgctcccaccgattctaaatgtaatttatttatatttctctatttttctcgaaatttaagttgttataggacgttgaggaactttgtcccccatttttcctttcatacccttcattgttaagggaaatgctaccactctgatatatataaaaatgatgtaccattttcaatat

SEQ ID NO: 3222 - DNA, 1423 bp, Oryza sativa
  Clone ID: PAT_MRT4530_41010C.1
ggagagagagaactagtctcgagtttttttttttttttttttttcctaaccttttctctttttttatctgaatttaaattaggaatacatgaaaaacttcacatccaggacagagttgcaaggatgatacaattacaaatgcacataaagtactacgtttggatccagatccaaattcaagataaatacaggatatgactggtaatctagcattgaaccatgaccaacatatatgtcctcaatacaacaggcaattcaaaattgaacaataattaacagacttcttttcaaattaatagctgacatccttttctttcaaaatctggtcagaagcaagccgttgatccatgttagtggcaaggcaaagtctacgttgttccattgcatgtagcatatacactaaaacagagatgcacgagaagggtttttgcataataaaccatttttcatgacagtttactacactagtaacattcaagatatcaacatcagatagtggcttgatgcactgatttcttggcccaggtccaattactccaccaaccagatatatgttgtctcccaaaccaatcatcccaaaacctatcctgctttggaattcagatgcacacgacaccatcttatcagggaaattcacaccacgctgcttcataatgcaactattgctcagcacataaagctccccacgaaccattgccatcggaccttgcagccaagagtagtcctcaacagcccaagcattgccatcttcaagaatctgcactgttggtaggcctttgtgcaatacatgcatcttaccctttatgacaagtccagagcatgcagagctgtgtgcttgacgtaggtcagggagaggctcccacgtgtcagcttcagggttataaatctcagcctttgatattgatttgcggcaatttgtgaagcccccagcaacaattatgttcccatccagtgcacaacaggcaaacattgcgcgagctacaagcattggagccctctggacccataaacgacagagaggatcataagaccaaacctcattgcttgcaaagatcctgtcatggtctccagtaagtgggtcaactcgatcactgccaccaccaattacatagagcttgcctgcaaccgaggccactccaaaacgagcaatattcctaatctgagatggcatgacaggaagggttatccacttatctcgaagagggtcataaagctgccacatgttttcaggttcaaatgctaacacacataacaggtcttcagtcgcactaatctgattcctaactttggaaagctcaccatttcgaacagatgctctccaagaatggcagaccatttgaagaacaggatgggacaaaaatggcacccgtgcaaggcactgaagagcaacttcattagggagaccatcaattagtgttgacat

SEQ ID NO: 3223 - DNA, 446 bp, Oryza sativa
  Clone ID: PAT_MRT4530_41055C.1
cttctgtttggtaaagcgacaggcagaactaagtacagggggggatgtttgaaagcatcaggccggttgcaagagcgccaacgagctgctcccgcccagcgccagtttcgtgaagctgtcggacatgagccctaaacagtggagcgcattcctcgacaagctccaggagctgctcccaggtgccctgagcgcccggaagcacgctgccggtgtcgtcggccagcgctcgatgccgaggctgggcacgccttgccagttctgagagttgcagaagagaagcccaccgacccaagggtccacgaacgcgcttctgttcgagctctggtgtgcagcagacaagcaggtacggagtattatataatgcttgcagcaagtgctctgggcccgtggtggcagagagggttcccgaataagatcatccatggcatgtgagatgaggctgcggg

SEQ ID NO: 3224 - DNA, 239 bp, Oryza sativa
  unsure (1)..(239): unsure at all n locations
  Clone ID: PAT_MRT4530_41126C.1
actagtattggtanataattaaaactgcaaatccgtcatgcatgcatggtatgcccatcgatccanccatgattatntntagttanatgtagtaacaaactgcatgggngtgttgtgctcatcagtgttaattttggccgcccccctgttnataaacagtttttgatcgatganagctagctttngttttntttttaaaaaaaaaaaaaaaaaaaaaaaaaaaaaaaaaaaaaaaaaaa

SEQ ID NO: 3225 - DNA, 3136 bp, Oryza sativa
  Clone ID: PAT_MRT4530_41131C.1
ggcacgaggcaaagcaaagcagcgaatccggcttcactagtcttcttcccccccgccgccgcatcgatcccccttcccctcgtcttccttccctttcccccaatcagattgcttccagaagcctccttccccgcgaagcaaccaaccccttccggatcccgactccatccaaacccccatcccctcccctctcccctacgctcgaaaccctagggagatccatccacatgccgccccgatgaggtcgctccgccgcgtcctcctccagctcgtgctcctcgccggcgtcgccttccgcggggtccgcttcgacgacgccgccgacgccgccgccgccgcccaggggtcgtcagacctcttcgagctcccttcgccgtccccgactctcgcgctccccggcggcggggatgagggggcctcgacggagatcatcgccgcgccgtggccggggcgccacggcctgttcacgccgccgcggagcacgtcccagccggcgagagcggtggtccagccggccgccgacttcggctcccaactccagttttacgacaatggtacaattcaactagtggaccttctatcaaaattgcctcggtggcagttctccaccggaccccctctttcgaagcatatcactacttcgaaacctgatttgaactatgtcatataccttgatgggtcagaaacatcggaccttatagaagttcataatggcagtggtgtgagacttccctggaaactggaggagtttattgctgagactccatatatacgggattcttttgttacgattggatcaaaggtttcaactacttttgtggtcaatgctgatagcggtgagatcatttacaagcatagcttgccagtggccttgaacgaggtaggtggccccctggttgaggaaattccatccaagttagatgctgctagaagtggtacaagtgctaatatcatagtggttgtgagaactgattattctatcagtgcatcggatcttggggaacatttgttcaactggacaagaacttccttcactgcaaattactatgcgaggtatggccaccaagacatgcttgcccaatcgtcctgtctgcgaggaaatattccatgcattaggactgagggtccaccaattaaactttatttacctgattcaagttcagataatgcaattgtcttgagacctgtgaacgaagtttctgctgtggatgctctggaaccacttctacctccaaagaagttaccacaacctgctggcgagtctaatgtggccttggatagtgctcaaaaccagactgctgacattgccctaggtcattttgtgcctgctgacactgaattgaccaacagtgtcactaaattttcttacagatggctattccccacgtttctcatgttgttgatcatggcttgtctagtgaaattggccgatgcaagcaaatattgcaggcaatttgtgattcgatttttgaagccatttatgcgtgatgagaaattgatggacccaagaggcaaatcagagggaacatcaaaaagaaggaaggcgcggaagaaagatggacttatcaatagcactcagatcttttcagcatctgataaagaggggaatggaactggtggatcaactgaggcacaaagtaataaagcacatgattcaacaaatgtggaactccctaatggcctcaatgggcgtcagattggtaagctttgtgtttacagtaaagaaattggtaaagggagcaatggtacagttgtctttgaaggctcctatggtggtcgggaagttgctgtgaaacgtctgctgcgctctcacaatgatatagcctcgaaagagattgagaatctgattgcatctgatcaggatcctaatattgttcgaatgtatggttttgagcaggacaatgattttgtttatatctcccttgagaggtgtcgctgcagcttggctgatctaatccaactgcactcggtaccaccattttcaaatactaagggaacagacattgaactttggaggcaggatggacttccttcggcacaacttctaaagctgatgagagatgttgttgctggtattgtgcatttgcatagtttgggaattatacatcgtgatttgaagcctcagaatgttttgataagcaaggaaggacctctcagagcaaaactttcagatatgggtatcagtaagcgtttgcaggaggatatgacttctgttagtcatcatggcactggatttggaagctctggttggcaagcacctgaacagcttcgtcatggtcgtcagactcgagccatagatttatttagtttgggctgccttatattctattgcattactaaaggcaagcatccgtttggtgagtactatgaacgggacatgaaaatcataaacaatcaatttgatctcttcatagtggatcacataccagaagcagtgcatcttatttctcaactgttagatccagatccagagaagagaccaacggccgtgtatgtgatgcatcatcctttcttttggagccctgagttgtgcctttcatttctacgagataccagtgacagaattgagaaaaccagtgaaactgatctcatagatgctttggaaggcataaatgttgaagcatttggtaaaaattggggagagaaattagatgctgccctgcttgcagacatgggacgttatagaaaatatagttttgagtccactcgtgaccttctaagattgatcagaaacaaatcaggacattacagagaattttcagatgatctcaaggagctacttgggtcgctgccggagggatttgttcagtatttctcaagccgattcccaaagctgctaattaaagtctacgaggtcatgtccgagcattgcaaggacgaagaagctttcagcaaatatttccttggaagctcggcgtagctgtaacctgcaggaggggtgaaggccctgccctgcctagtgtgtacactaacactcttctagcaaaaatgtatgtacatgtgatttgtaccatatatcatagggtaaagaaagttcagcctgtacattgtattccacagaattgtgtattacttatagtaaatcaaatcttttacctgactaaaaaaaaaaaaaaaaaaagtttaaaaaaaaaaa

SEQ ID NO: 3226 - DNA, 2109 bp, Oryza sativa
  Clone ID: PAT_MRT4530_41161C.1
tcatggagcgaaaaggacgctgaatcgtgggaaaggtgtgtggtggccggtgcccgacgacggcgcctggcgatgggtggggagaaggtgagcagttgtagttgggacccgtgccacacccccgcacgtgcgcaagtccatgacgtgagcgctcccggtcattaggagccacgtcagctggcggcctccgccgttgagcttttccccataggcaggcgacaacgcggcagcagagcgctgcacgacctccgcctccccaatccgtcccgtctcctcgcccgccgccctcgactcccgtctcctcgcctgccgctggcgccgatctccatcctgctagcagaggtggcgccggcgtcctcctgctcccgccgcattcgcatcctaatccatcccatccggcctcggcctcgaatttcgtctcctcgcccgccgcttgcgccgatccccatcctgcgagcagaggtggcgcccggcgtcctccttcttccaccgcatcgtcgctcgccgctcatggatcctgagatctagacgtcaacgtgcttcctggaaagagagaggctcaggcatgagagcatacctctaaaataatgtccgtgcttacctgtgtgcttgataacatgggctcatcctgtagcagatctcattctttaagtgaggctgaaacaaccaaaaatgcaaaatctgcagacattgacaggcgaattttgcaagagacaaaagcagagcaacacatccacaagctcttacttcttggtgcgggagaatcagggaagtctacgatatttaaacagattaagctccttttccaaactggctttgatgaggcagaacttaggagctacacatcagttatccatgcaaacgtctatcagacaattaaagtatgcaatactggaaaagatactatatgaaggagcaaaagaactctcacaagtggaatcagattcctcaaagtatgttatatccccagataaccaggaaattggagaaaaactatcagatattgatggcaggttggattatccactgctgaacaaagaacttgtactcgatgtaaaaaggttatggcaagacccagccattcaggaaacttacttacgtggaagtattctgcaacttcctgattgtgcacaatacttcatggaaaatttggatcgattagctgaagcaggttatgtgccaacaaaggaggatgtgctttatgcaagagtacggacaaatggtgttgtacaaatacaatttagtcctgttggagaaaacaaaagaggtggagaggtatataggttgtatgatgtaggaggccagaggaatgagaggagaaagtggattcatctttttgaaggtgttaatgcggtaatcttttgtgctgccattagcgaatatgatcagatgctatttgaagatgagacaaaaaacagaatgatggagaccaaggaactctttgactgggttttaaagcaaagatgttttgagaaaacatcattcattctgtttctcaacaaatttgatatattcgagaagaaaatacaaaaggttcctttaagtgtgtgcgagtggtttaaagactaccagcctattgcacctgggaaacaggaggttgaacatgcatatgagtttgtcaagaagaagtttgaagagctctacttccagagcagcaagcctgaccgtgtggaccgcgtcttcaaaatctacagaactacggccctagaccagaaacttgtaaagaagacattcaagttgattgatgagagcatgagacgctccagggaaggaacttgattcagagctaagactaggttgtaagtcacacagggaaggtaattaggacggcgagaggaacaaagtttcacactgtcacagctttatctgttgtaattcttttacacgtggaccattgattgatcttttggttcttactgtgggctgttcaggtctgtaccctattttttgttctctagttagccattgtgcaaattttccttgaatcagattctctacctgttgtctatgtgtgttatcttggtctgttaatttgcatagcccacttgttcattaaaaaaggagatctttactacttacaaaaaaaaaatctagtgggaaagtggttgc

SEQ ID NO: 3227 - DNA, 1200 bp, Oryza sativa
  Clone ID: PAT_MRT4530_41323C.1
atggccgccgccgccgatgctcccccgcctcctccggaggtcgccccgcccgcgcccgcgcccgcccccgcgccggcgccatatcagccgccgcggctggcggtggccgacggagcgggaggtggcggcggcggcggcgggaagccgtgcaggcaccacgcgtacagccgcaagcagaagtcgctcggcctcctctgcaccaacttcgtggcgctgtacgaccgggaggacgtggagtcggtggggctggacgacgcggcgaggcggctgggcgtcgagaggcgccggatctacgacatcgtcaacgtgctcgagagcatcggggagatgtcactgagggcggtgtcaagcgtggcgtcaccgtcgctggatgaaacatctgctgctaatgtctcggatgatgaggatgatgacaagttagatgatgctgagggcgatgcggagagcgagaagctcagcctcagccagtccattgacaatccttctgataagcctgatgcacccccttgcaagcttcgatccgagcataggaaggagaagtcccttgggctgctcactcagaattttgtcaagctcttcctcaccatggagattgagacgatctcacttgatgaagccgcaaagcggctccttggagagggacatgcggcgaacaatatgagaaccaaagttcggcgattgtacgatattgccaatgtgctgtcttctttgaatcttattgagaagacacaacaggcggactcaagaaaacctgcattccggtggctgggccaggcaaaacggaatgaaggcgtcacggttgctttacccccaaccaagacgttgcctaacaagagagcatttggtactgatctgactaacattgacaataagaggggtaagttggactccacaatggagaacagaggcaagcccacgcaggatggtggcaacctattcaataatttgcagaggcaattagggcaagagaacaggagcgattttgtttatggccccttccaccctgctgttgcaaggaaacaagaacatggtaatcgcacagtacaagagaaggagaggaagagcattcaagactgggagaaccttgcttcttctttccgtccgcaatatcaaaatccaggactgaacgatctttttggccactacatggaagcatggaggtcatggtactcggatctcaggcgagacagagcatcataa

SEQ ID NO: 3228 - DNA, 1764 bp, Oryza sativa
  Clone ID: PAT_MRT4530_41649C.1
atgtcgtacgatcgcgtcacgaccttcgaggactcggagaaggcgggcgagtacggctacgtccgcaaggtttctggacctgtggtcgtggctgatggaatgggtggtgctgccatgtatgaacttgtccgagttggtaatgataacctcattggggaaattattcgtcttgagggtgattcagccaccattcaagtttatgaggaaacagctgggttgatggtcaatgatccagtgttgagaacaagaaagcctctttcagttgaattgggacctggtatccttggaaatatctttgatggaatccagcgccctctaaaaactattgctataaagtctggagatgtgtacataccacgtggtgtttcagtccctgctcttgacaaagatcagttgtgggattttgagccaaagaagctaggtgttggagatgccatcactggtggagatctatatgctactgtgtttgagaatacgctgatgaaacatcatgttgcccttcctcctggttctatggggaaaattagttacattgcaccagctggccagtatagcttgcagacatggcctgtccggtcaccaaggcctgtttcatcaaagcttgctgctgacacgcctcttctaacaggacagcgtgtacttgatgcactatttccctcagttcttggaggaacttgtgctattcctggagcatttggttgtggaaaaactgtcattagtcaggcactttcaaagtactccaattctgaagctgtggtttatgtgggctgcggggaaagaggaaacgagatggctgaggtccttatggacttcccacaattgacaatgacattgcctgatggacgtgaagagtctgtcatgaaaagaactacacttgttgctaacacatccaacatgcctgttgctgctcgtgaagcctccatttatacaggaattacaattgctgaatacttccgtgacatgggctataatgtcagtatgatggctgattctacttctcggtgggctgaagctttgcgtgagatttcaggacgtctggctgaaatgcctgcggatagtggttaccctgcatatttggctgcacgtttggcatccttttacgaacgtgctggtaaggtgaaatgtctcggcagtccagatcggacaggcagtgtcacaattgttggtgctgtctctccacctggaggtgatttttcagatcctgttacctctgcaactcttagtattgtgcaggtcttttggggattggataagaagctggctcaaagaaagcatttcccatctgtcaattggctcatctcttactcaaaatactcaaaggctctggaatccttctatgagaagtttgatcaagatttcattgatattagaacaaaaagctcgcttgttggtaaagatgcactggcagaatctgataagattacattggaaacagccaagctactaagggaagattacttggcacagaatgcatttaccccatatgacaagttctgtccattctacaagtctgtttggatgatgcgcaacattattcatttcaatacattagcaaatcaggctgtggagcgtgcagctaatgctgatggacaaaaaataacatacagtgtcataaagcatcgtatgggtgatctattttatcgcctagtatctcaaaagtttgaggaccctgcagagggtgaagatgtcctagtcgcaaaattccagaaattgtatgatgacctcacaaccggattccgcaacctagaagatgaagctaggtga

SEQ ID NO: 3229 - DNA, 776 bp, Oryza sativa
  Clone ID: PAT_MRT4530_41651C.1
tctccctcttcgcttctcctctcccccccgtgatctgaccgccggcgacgaccccctcccaccacccgccgccgccgccgcgcccccgcccccgccggcgacgaccaccatgtcgtacgatcgcgtcacgaccttcgaggactcggagaaggagagcgagtacggctacgtccgcaaggtttgggggcctgtggtcgtggctgatggaatgggtggtgctgccatgtatgaacttgtccgagttggtaatgataacctcattggggaaattattcgtcttgagggtgattcagccaccattcaagtttatgaggaaacagctgggttgatggtcaatgatccagtgttgagaacaagaaagcctctttcagttgaattgggacctggtatccttggaaatatctttgatggaatccagcgccctctaaaaactattgctataaagtctggagatgtgtacataccacgtggtgtttcagtccctgctcttgacaaagatcagttgtgggattttgagccaaagaagctaggtgttggagatgccatcactggtggagatctatatgctactgtgtttgagaatacgctgatgaaacatcatgttgcccttcctcctggttctatggggaaaattaggtacattgcaccagctggccagtatagcttgcaggatacagctctggaactgggattccagggcctcaaaaagcaatttactatgctccagacatggcctgtccggtcaccaaggcctgtttcatcaaagcttgctgctg

SEQ ID NO: 3230 - DNA, 276 bp, Oryza sativa
  Clone ID: PAT_MRT4530_41696C.1
atggagagcaccgagctgaaagtggagatggtggcactgcatgagaagagggtacgaaaatgcctgtccaaagtgaaaggggtggagagggtggaggtggaggggagcctgcagaaggtggtggtgaccgggtacgcgaaccggagcaagatcctcaaggcgctcaggagggtggggctcagggcggagccatggtcgccgaggaacgagctgctcagcgcctacgccgccggcagcctcatggcggccaacaactactaccacaccttcttctga

SEQ ID NO: 3231 - DNA, 2019 bp, Oryza sativa
  Clone ID: PAT_MRT4530_41750C.1
tttccttcctctcctcggggtttttgttcacaaacgagcggctcgcctgcgccgcgtggattccccttcccgccgatccggcgatggattcggcggcgagagcctcgcagtcggcggcgccgccgccgcccggcgccggggtccgcgtccgcgccccgctggtagagtctgtctcatgctactgcagattagatactggtctgaaaactgttgttgatgctagaaagtttgttcctggagcaaagatgtgtatgcaacctgatgtcaaacccaacaagtgcaaatcaaggggctctcgtaaggagaggagccgaactcaagcaccacttttgcctggtcttcctgatgaccttgctattgcttgtctcatacgggttcctcgagtggaacatcccaatcttcggatagtttgcaaaagatggaaccgtctcttatctgggaattactattattccttgcgcaagagaaacgggatggcggaagaatgggtttatgtctttaaaagggaccgtgaaggaaagatatcctggcatgcctttgacccactgcaccagctatggaagtcacttccaccagttccagcagaatattcagaagcattaggctttggctgtgctgttctgagtggttgctatctgtacttatttggcggtaaggatcctctgaggggctctatgaggcgtgttgtattttacaatgctcggacaaacaaatggcaccgagctccagatatgttacggaaacgacacttttttggttcttgtgtcataaacaattgcttgtatgttgctggtggggagtgtgaaggaatacaaaggacactcccgtctgctgaagtttatgatccaaataggaacagatgggcctgcgttgctgaaatgaacaatgggatggtacctttcattggagttgtatatgatggcaagtggttcctgaaagggcttgattcccatcgccaagtgacgagtgaagtctacctaccatcatccaatttatggtcaaccattgatgatgaaatggttaccggctggcggaacccaagcattaccttcaacggaaagctctattcatctgattgtcgagatggctgcaagcttagggtgtatgatccaaacacaggaacatgggcaaaattcatggacagcaagcaccacctgggcagctcgcgcgcctttgaagctgcagcgttggttacattaaatgggaagctttgcatcgtccgcaacaacatgagcatcaccctggttgacatctccgacccaacgatgagcattgagactgacagtgcacgcatgtgggagactgttgctcggaagggccagcacaggtcattcgtggcaaacctgtggtcgaccatcgcaggaaggaacctgaagagtcacattatccattgtcaggttttgcaggtttgaggtcagcctgttgtgaatctgaacataagcagactagcagaaacaatccctccattgaaaggtcaattagattccataccgaaattgtggcagaagaagctcattgcccaaacagatctttgttcattagattaccagaaaacaccaattcagtattctggaaatttgaagctactcataaggtaggagatggatgccgaaaacttttgtgcaaactggaaactgagaagagaacttccttaatagttgcggtgataggggggagaatatgcatcggtggataacatttcactaagttggaatatccatcttcagcctctcactgtcactgatcactgtacttatctatgttgtatcatgccctcttggcatactgcttagtgtgcttaatgttggctctatgttgtagcggcagattagacttgagagtagagaagtaataagcctattggttactgtacttgaaaaatccgtatgtcctggtatcatgtgctgtaaatcttcgtaattacccctccaactctccaagcatttcattgcaccatcctgtctctatttaattttaatgtttagatgatttgagctgcaaaaaaaaaaaaaaaaaaaa

SEQ ID NO: 3232 - DNA, 2377 bp, Oryza sativa
  Clone ID: PAT_MRT4530_42077C.1
ggcagcctccatgccgtgccgcctgcctctgcgcatctggctggctatcttacctcccttttctgcgccgcgtcctcctctctctcctttcccctagggctctagctccaccgcctctcggccaccgccgctccccgccgccgccgccgacgacgcgcgagggagtgtggtgaggactgatgaacttctaaacattgggtatggatggatgtgactgcatcgagccactatggccaactgatgagctcctcatcaagtatcagtacatctcggacttcttcatagccctcgcatatttctcgatcccgttggaactaatttatttcgtgaagaagtcatccttcttcccatacagatgggttttgatccagtttggtgcatttatagtcctatgtggagcgactcatctcataaacctgtggactttcaccacacacacaaagactgttgctatggtcatgacagtcgcaaaggtttcaacggctgttgtgtcctgtgcgacagctttgatgcttgtacatattatccctgacttgctgagcgtgaaaacaagggaattgtttctgaagaataaagctgaacagcttgatagggagatgggcttgattaggacacaggaagagactgggaggcatgttaggatgcttacccatgaaatcagaagcactcttgatagacatacgattttgaagactacacttgttgagctaggagggaccttgggcctggaagaatgtgccctatggatgccatcaagaagcggttcaagtcttcagctttctcatactctccgccaccagattactgttgggtcaactgtatcaattaatcttcctgttgtcaatcaagtgttcagtagcaacagagcaattataataccccacacatctcctttggcacggatccgacctcttgcagggagatatgttccaccagaagtggctgcagtgcgagttcctcttctacatctttcaaactttcaaataaatgattggccagagctttcagcaaagagctatgcaatcatggttctgatgcttccatctgatagcgcaagaaaatggcatgtgcatgagttggagcttgttgaggtcgtggctgatcaggttgcagttgcactttctcatgcagctattcttgaagagtccatgcgtgcgcgtgatctgctaatggagcaaaatgttgctctggatttagctcgacgtgaggctgaaatggctatccgtgctcgtaatgatttcctggctgttatgaatcatgaaatgagaacaccaatgaatgcaataatagccctttcgtccttacttttggaaaccgaacttactcctgagcagcgcttgatggtggaaacagtcttgaaaagcagcaatcttttagcaacactcatcaatgatgtgttagatctttccaaacttgaggatggtagccttgaattggagattaaagcattcaatcttcatgctgttttcaaggaggtaatgagtttcatcaagccaatcgcagccatcaagagactgtctgtgtcagttatgttggcaccagacttgccattatgtgccatcggtgatgaaaagaggctaatgcaaactattttgaatatctctggcaatgctgttaagtttacaaaggagggccacatcacacttgtagcttctgttgtgaaggctgactctttaagagaattcagaaccccagattttcacccaactgcaagcgatgacaatttttatttgaaagttcagattaaagatacgggctgtggcattagccctcaggatctacctcaagtatttacaaagtttgctcaatctcagcctggaggaaacagaggatacagtggtagtggtcttggccttgccatttgcaagaggtttgttactttgatgggagggcacatctggttggatagcgaaggaacaggaagaggctgcacagtaacgtttgtcatccagcttggcatatgcgataatacgaatgcatatcagcagaagctgattcctctagtctggccaagcagtggggatgctgattttgttggtccggtgccaaatgctcctaatgaagagaaaggtcaggcttctctgaaatctcggtatcagagaagtatatgagctactgtaaattgatcgacggcattgtatcaagtagggcctggttagtttgtctctaattttgtgcctagccttgtgatagctggaatatatttgtacaaataatgtacagcagatgggactgcataatgcagctatgcacctgggtacaactctaacttgcgtagtgtcctgtcagcgaaatgtgtattctgggctgttcgtgtgaccatcaaaaaaaaaaaaaaaaaaaaagaaaaaaaaaaaaaaaaaaaaaaaaaaaaaaa

SEQ ID NO: 3233 - DNA, 3797 bp, Oryza sativa
  Clone ID: PAT_MRT4530_42120C.1
gatctcaacaaaactttggatatatagaatgaaccatcgtgtcaaacaatacttacacgaaagctaggcagccctcctggagtaaacatagtaaagaagggctgccagggccaaatagttgcatccagcagttttgacaggacataatcctccttttcaaaaaaaaaaaaaaggccagcttccacaagaacttcagtgatttaggaagcttttcttgctgaattaatgcttccttaacatgtttttcattatcgacattgtaaccaatttcttttgtccgtattcctggatggaatcgatttttactccaaaatttccacataccaaaatctcaatgggatgagatttcggaatgctattcacagctcaaggaccacacacataaactacatgacttacatggcaaaatcggcatctccatcaagtatggaaatgctagtgtttgtttgctgtctttgtatcgtccactggttttcttcatatattaatgataaacagatgggggcttggtgtcactgtgcccgtatatccagttgtttcagagcagacctcatgtcatcagtgccataaccctcaattccaatgatgtttgggctatcaagtgcaacaacatcttgtaaaggataccgcctaacagaatggattctatttgcagatgtgttgaattcacccttaaggatgaccgtcttatgaagacctccaaacaattcttcgtaatctgaatcaccagtttcaccaacaagaaccaccacattttgcaactctatgccccagcgaacagataagtaccttagagccttagaccgtgatgcgtggattggaattacagatagtctggtagcaccatggttatacagagcgtgacaacggagtgactgaattctcatcaacttttgcagctcctttaaaggaggtaaatgatttggattgaccactttaaatgcaagacagtatgttgaagagtgctctggatcttcgaagataacttgtttttcaatcctccctcttctttctaccacggaagaagcccacttcactagatatttccttaaaccttctcctccccaatgatactctatatgtgattggtaactacgatctaatgcaaatgtaacacgggagttgcttggtgtatcaccagtacatgaaggataatacaaatcacttccactattgcatatgaaagcatcgaaatcagtaggaagcatgccagcagacattaatagagaatgtatctcccctattgtcagggaagttgacaacacaaaacctgtcgatcctgacaaattttctttacgtgcagcctcgatagaatttctgacaatgcgaatcagatcttccttactgacagaatctacagcaataacagtgacatgcttccttcccttaataggtgccttaatccggtcttcattgcttgcaaaagcaggatgccttgggccaagagttgatatccttgacaagtaattcttgcaatgttcaggccaagaaaactgatgtatatttttcagcccattctctcggcattttgaccaaagttgtttttcagaaaggagtttatagagtgcatctgcaattgcatgctgatcatggggatcaacaaggagaccattgtccagcacctggtgaatttcaacaggagctccattttttgttgcaattacaggcaaaccatgcatggcagcctctatcaaggtgacaccgaactgttcaaagtaaggcacatttacaaaagcaccctttgttctcactgctaaacggtaaatatcaggaacttccgagtgtttgtgacgctttgggtatgccacttgaccatacaaatcatattcatcaatcaatgtaagtactgatgtcaaaacagctgcactcatattatgcatcttggaaatagcctcacggtttcccattatcaatgttagattagcatgctccctaagtgttcggcactcaccaaacgcatgcccaaaagtagtaatatgcgtttcaggatacatgcgagccattgccagaaccaaagatttcctagggtttttaaagaaccccataatcttcctcgcaagcaaatcctcagaacagtcagataaattaccctgctcttctacatccatcctagtgccagctataacacttgcagatacaacaaccgtacgagccatatagcgaccatagcagttagcaccacgcttgactcttgcacggagtttccttgcaagtatgacctcaaaaccgtcatacaaattccattgctcttctatctcttgcctagtgcttgctataactatttcagatgcatcaagagccaactcctctgcctcaattctacacattattttgtatgtcatgtttatttgctcccttgtctgtctcccttgcttgagaagctcttccaacttatctttcccaagaaaatgccctgtaaagaccatgggaacattaagtgctcctgacagtagagcagcagcaactcctgcactagcataatgaccatgaatcacagcaggccacgccggatgcccacagctgatttcttcacctatggcccttgacatcttcactatatgactgagggcgccatcaacaaattcttgaatgaaaggccagagatgttccttagctagatatttgtcttttggtccaaatggtattcggatgatatatgcaccactattctctcctctttcctgcttaaaattcttgaagcttgttgatgccaaaggttccactggttcaccatagctacgatcaaaatttggcgctaagatctgtcttgtaaaaagatcaacccggtaaactccaggacatgagctcaatgctttagcaagttccacaacatacttgacctgtccgccagtatctgaatcacggccaagctccatgttctcaccacggaccaggccatgaaggctgatcaacactatgtacagcttgtcaactgaactgatcctaggtgtgttcccagttgtgctgtcaccataggcaacagaaggatcaccagcatcctctcccttctcaccttcaaagagatcttccgacatatctgaagtagtctcaacccgtggcctctctgtctctagacggcgtttcaacaagcgattggcttcctccttctccaactccttcttcttcctggcgaggttccagatcctccacgtcatgttctccagcctcgtgttcttctcctgcgggctccgcatcgcgttcgcgcggagccatgtcttgtagaggtcggtctcgtcgtagccggtgatgacctcctcgacgaagtaccgcgcgggggagaagtggccgcgctcgcggaggaggagcgaggggcggtcccccgctccgcctcccccacccaccgccgaggccgaggccgaggcggcggcgcccttgccggcgtcgaggatggcatccaggtagctgttgatccagttgtcgttgccgtacattactcaaaaaagactgtttgcactcccaatcgggagcttgggcattatcaagacctaattggcccagacacacactctcacaatgcggataaggagcttcatggttttagatggtgatggtaatgatgttccaagcatgggggatattgttcatatagtagtaaggtggcaactcgctcacagacaacagggaacacactcaactacaactatcagtgaagtgagcggctcaggaagaaaacctctcaatcaataaggaactggcagagcacgacatggtacactgcgcggtcctcagattcgcggtggtgcaaccatgcatgggcctaaaccacgaagtcatgcgattaagttgcagaagaaagt

SEQ ID NO: 3234 - DNA, 1344 bp, Oryza sativa
  Clone ID: PAT_MRT4530_42195C.1
ccggccgggagccagggcaaatctgatcgatcaagataatcgagcaaaatccatcagagttctaacattcgcgcgtgaatttcgaggttaatttttgaagcttaggatcaatggcttcccaccaggaccaggctagctaccgcgccggcgagaccaaggcccacaccgaggagaaggcggggcaggtgatgggggcgagcaaggacaaggcgagcgaggcgaaggacagggcgtcggaggcggcggggcacgccgccggcaaggggcaggataccaaggaggcgacgaaggagaaggcgcaggcggcgaaggagagggcgtcggagacggcgcaggcggcgaaggacaagacctccagcacgtcgcaggcggcgagggacaaagccgccgagagcaaggaccagaccggcggcttcctcggcgagaagaccgagcaggccaagcagaaggccgccgagaccgctggcgccgccaagcagaagaccgccgagacggcgcagtacaccaaggactctgccatcgccggcaaggacaagaccggcagcgtcctccaacaggcgagtgagcaggtgaagagcacggtggtcggcgccaaggacgcggtgatgagcacgctggggatgaccgaagacgaggccggcaccgacgacggcgccaacaaggacacctctgccaccgccgccgccacggagacgacggcgagggatcactagacgccgtgaatgatttccctttgggtctatttatgtatgttttcacttcaaattcggtgcaagtttgaatttgtttttgtgtcgttttgagtctgtatcgatgctgtatgaagtggtggtcgtcgcaggggaggatttctgacgggtgtgggtgatgtgtactgatgatgttcagttgttttcgtcagagtttctcgtctgtgttctgtttattatggcgtaacaataataaaagtttgggcctaaagcccgcatttgtggtttaaaaaaaaaaaaaaaaaaaaatggtgccattcctgaagttagcattcccatcatcattattcgatatccgcaacagtcgcacgccgtgttatctatttagcactttgcccgtatgtaaattgtatataattattttccttttgtgcatatcgctcatgtaatgtaggtgtactgggttctccaggagctctcctgaggataaggagaggtttcatttttaatatgtgcccccctttactcaagtgagaattgtacatggaagctccatatgaacattgtagacacgcctttattgatgtacatagcaatatcaatggaataaataatagaaggatttgacgcgagactagttctctctcactgcagc

SEQ ID NO: 3235 - DNA, 3416 bp, Oryza sativa
  Clone ID: PAT_MRT4530_4273C.1
agatccacccagcccccgagccgctcgccctcgccctcgccctccggccttggatggtggtggtggtggtggtgggcggagctgcttggatatgcgcttcctcttcgagagcgatgctggctgaaagcgacttgggagaaaatgttgttgagctgatgcaacgttactttcccaccgatatgattcggaggattcgcatgctttctggtaacttgatcaagaaagttgtaatgcctcctggtgcgatctctttggatgatgtggatatagatcaagtcagtgttgattacgtcctcaattgtgctaagaaaggtgaagcacttgaccttggagatgccatccggctttttcatgacagccttgactacccttacgtgaataacagtggaactgtggaggaattctttttacttacaaaaccagagtactctggaccagctccagcgagagaaccaccccctgtccctgctattgcaccatcacctgttgtgataccggcaccaattgtggatccaccaccagttgctgtgcactcaccagtctctaccacaaatttatcaaaatcacaatcatttgattctccaactgagaaggagttaaccatagatgacattgaagattttgaggatgaagaagatgaattcgatagccgaagggcttctagaagacatcaaagtgatgccaatgatttatcattgcggttaccactatttgaaacaggtataacagatgatgacctccgtgaaacagcatatgaaattcttgttgctgctgctggtgcttcagggggacttatagttccacagaaagaaaagaagaaagagaagagaaacaaattaatgaggaaactcggacgtagtaagagtgagagtactcaatcccaaactcagcggcaaccaggtttggttggtttgcttgaaaccatgcgagcacaacttgagataacagaatccatggatattagaactagacaaggattgctcaatgctatggtaggcaaagttggaaaacggatggacaatctcttgattccattggaactactatgctgtatctcaagagccgagttttcagacatgaaagcatatcttcgttggcagaagagacagctaaacatgctggaggagggccttataaaccatcctgttgttggatttggagagttaggtcgaaaggtcaatgagctacgaaacctcttcagaaagattgaagaatctgagtccttgcaaccatctgctgtggaggttcaacgcactgaatgcctaagatcactgagagaagttgctacttctctctctgaaagacctgcacggggtgatcttactggtgagatacactatcagttgcaggaagtggaagaaatcctggagctcctaaaatcaacttggcggatactaggcattacagagacgattcatgatacatgttatgcatgggtattatttagacagtttgtttttacaggtgagcaaggactcttgaaagttgtgattgagcatttgaggaagatacctttgaaggaacagcgtggtccacaggaaagattacacttgaaaagtttgcgtagttctgttgatgctgaggatagctttcaagacttcacatttttccaatctttcctatctcccgttcagaaatgggtggacaagaaattgaatgattatcacctacacttctcagagggccctagcatgatggctgatattgtaacagtggcaatgcttattaggagaattcttggtgaagaaaataacaagggaatggagtcgcctgatcgagatcagattgaccgttacatcacttcttctgtcaaaagtgctttcgtaaagatggcacactcagtagaggctaaagcagacacatcacatgaacatgttttagcatctctagctgaggagacaaagaagcttctgaagaaagatacaactgtgttttcatcggttttgtcaaagtggcacccacagtctgcagttgtttctgcttcacttctccataaactttatggaagcaaattgaaaccgtttcttgagcacgcggagcatcttacggaggatgtggtttctgtatttccggcagccgatgctttggagcagtacataatgtctgtgatggcttctgttgtgggagatgatggtttggacagcatatgcagacaaaagctagctccttatcagattgaaagtaaatctggcacgttgatattacgctgggtaaatgggcagcttgagagaattgaaacttgggttaaaagagctgctgaacaagagacttgggatcctatatcccctcaacaacgccatggggcttctattgtcgaagtctacagaatcatagaagaggtccccatgagaactggagaactaaatagcctctgccgtggttttgacaaggcatttcaagtttacacacaacttgttacaggaccgatagttgatagagaagatttaattccacctgtccctgttcttactcgatataaaaaggagcttggaatcaaggctttcgtaaaaaaggaaatacatgaagttagaacagttgacgagaggaaagcaagtgaaataatacaacttactatgccaaagctttgtgtacggcttaacagcctatattatggtatcagccagctaagcaagctggaggacagcataaatgagcggtgggctaggaggaaaagtgagagcattaacatcagacgatcaatgagtgaaaaatcaaagagtgctgtctcgagtcagaagaatcaatttgatggcagcagaaaagaaatcaatgctgcaattgatcggatatgtgagtttacagggctaaaggttatcttctgggacctacagcagccatttattgataatttgtacaaaaacaatgtttctcaagctcgactggatgctattatggaagtacttgatacggtgcttaatcagctttgtaatgtcattgtggagcaactacgggatcgtgtggttacagggcttctacaagcatctctggatggcctactccgtgtgatattggatggaggtcctacgcgtgtcttctctccaagtgatgccactcttttggaagaagatcttgaaattctgaaggaattttttatatctggtggagatggcctacctcgtggaactgtcgagaatttggtctcacgtgttcgccctgtaatagatctgatcaagcaagagacacgtgtgctcatcgatgacctacgagaagttactcagggcgctaaaaccaatggaatgcgtcttggccttgcgacctggaaatcgtgtccagtatccgctcccctgcttccgtttgctattgttccgcactcaaatcagctattcaaggttttgcccagcttgacccgtagtaaagtatcagccgtgtttattaagcagtatagggttagatacgatttactcgctccagattag

SEQ ID NO: 3236 - DNA, 3324 bp, Oryza sativa
  Clone ID: PAT_MRT4530_4275C.1
atgctttctggtaacttgatcaagaaagttgtaatgcctcctggtgcgatctctttggatgatgtggatatagatcaagtcagtgttgattacgtcctcaattgtgctaagaaaggtgaagcacttgaccttggagatgccatccggctttttcatgacagccttgactacccttacgtgaataacagtggaactgtggaggaattctttttacttacaaaaccagagtactctggaccagctccagcgagagaaccaccccctgtccctgctattgcaccatcacctgttgtgataccggcaccaattgtggatccaccaccagttgctgtgcactcaccagtctctaccacaaatttatcaaaatcacaatcatttgattctccaactgagaaggagttaaccatagatgacattgaagattttgaggatgaagaagatgaattcgatagccgaagggcttctagaagacatcaaagtgatgccaatgatttatcattgcggttaccactatttgaaacaggtaatagtgatgactgttatgtcattatgaagtcttcatgctggtatggctacatacattgggtcaagaaagttattgacaacggaaactgtgctgtttttccaggtataacagatgatgacctccgtgaaacagcatatgaaattcttgttgctgctgctggtgcttcagggggacttatagttccacagaaagaaaagaagaaagagaagagaaacaaattaatgaggaaactcggacgtagtaagagtgagagtactcaatcccaaactcagcggcaaccaggtttggttggtttgcttgaaaccatgcgagcacaacttgagataacagaatccatggatattagaactagacaaggattgctcaatgctatggtaggcaaagttggaaaacggatggacaatctcttgattccattggaactactatgctgtatctcaagagccgagttttcagacatgaaagcatatcttcgttggcagaagagacagctaaacatgctggaggagggccttataaaccatcctgttgttggatttggagagttaggtcgaaaggtcaatgagctacgaaacctcttcagaaagattgaagaatctgagtccttgcaaccatctgctgtggaggttcaacgcactgaatgcctaagatcactgagagaagttgctacttctctctctgaaagacctgcacggggtgatcttactggtgagatacactatcagttgcaggaagtggaagaaatcctggagctcctaaaatcaacttggcggatactaggcattacagagacgattcatgatacatgttatgcatgggtattatttagacagtttgtttttacaggtgagcaaggactcttgaaagttgtgattgagcatttgaggaagatacctttgaaggaacagcgtggtccacaggaaagattacacttgaaaagtttgcgtagttctgttgatgctgaggatagctttcaagacttcacatttttccaatctttcctatctcccgttcagaaatgggtggacaagaaattgaatgattatcacctacacttctcagagggccctagcatgatggctgatattgtaacagtggcaatgcttattaggagaattcttggtgaagaaaataacaagggaatggagtcgcctgatcgagatcagattgaccgttacatcacttcttctgtcaaaagtgctttcgtaaagatggcacactcagtagaggctaaagcagacacatcacatgaacatgttttagcatctctagctgaggagacaaagaagcttctgaagaaagatacaactgtgttttcatcggttttgtcaaagtggcacccacagtctgcagttgtttctgcttcacttctccataaactttatggaagcaaattgaaaccgtttcttgagcacgcggagcatcttacggaggatgtggtttctgtatttccggcagccgatgctttggagcagtacataatgtctgtgatggcttctgttgtgggagatgatggtttggacagcatatgcagacaaaagctagctccttatcagattgaaagtaaatctggcacgttgatattacgctgggtaaatgggcagcttgagagaattgaaacttgggttaaaagagctgctgaacaagagacttgggatcctatatcccctcaacaacgccatggggcttctattgtcgaagtctacagaatcatagaagaggtccccatgagaactggagaactaaatagcctctgccgtggttttgacaaggcatttcaagtttacacacaacttgttacaggaccgatagttgatagagaagatttaattccacctgtccctgttcttactcgatataaaaaggagcttggaatcaaggctttcgtaaaaaaggaaatacatgaagttagaacagttgacgagaggaaagcaagtgaaataatacaacttactatgccaaagctttgtgtacggcttaacagcctatattatggtatcagccagctaagcaagctggaggacagcataaatgagcggtgggctaggaggaaaagtgagagcattaacatcagacgatcaatgagtgaaaaatcaaagagtgctgtctcgagtcagaagaatcaatttgatggcagcagaaaagaaatcaatgctgcaattgatcggatatgtgagtttacagggctaaaggttatcttctgggacctacagcagccatttattgataatttgtacaaaaacaatgtttctcaagctcgactggatgctattatggaagtacttgatacggtgcttaatcagctttgtaatgtcattgtggagcaactacgggatcgtgtggttacagggcttctacaagcatctctggatggcctactccgtgtgatattggatggaggtcctacgcgtgtcttctctccaagtgatgccactcttttggaagaagatcttgaaattctgaaggaattttttatatctggtggagatggcctacctcgtggaactgtcgagaatttggtctcacgtgttcgccctgtaatagatctgatcaagcaagagacacgtgtgctcatcgatgacctacgagaagttactcagggcgctaaaaccaatggaatgcgtcttggccttgcgacctggaaatcgtgtccagtatccgctcccctgcttccgtttgctattgttccgcactcaaatcagctattcaaggttttgcccagcttgacccgtagtaaagtatcagccgtgtttattaagcagtatagggttagatacgatttactcgctccagattag

SEQ ID NO: 3237 - DNA, 1862 bp, Oryza sativa
  Clone ID: PAT_MRT4530_4336C.1
cggcacgtgcgtcccacgagggtcccaccgtcccctcggcttatcccccctcctccccggcctccctcccgccaaggccgccggagcccgtcgccggaggcagctgcagggaaggacgccgtcgccggacacatgcggggttgggcttcccagatagcttgtctcttgctgcactaagctcttccaattttatggcagctcccaagcccattgctcggcttatttcccatgtcattcttgatttagatggtaccctcttaaacacagactgtgttgtaagtcaagtgctgaaaccatttctagtcaaaaatgggaaaaagtgggacagcaagaaagctcataaattagttggaaagacaccttatgaggcagcagctgttgttttagaagattatggactcccttactcaacagaagaatttctctcaatgcttactccaatgttcaatgagcaatggtgcaacataaaagctcttcctggagctaatcggttgataaaacatttgaagagtaatggagtaccagctgctttggcttccaactcaccaagatcaaacattgacgcaaaaatttcctgccatcaaggatggaaagagtcgttctccgcaattgttggtggtgatgaagtagagaaggggaagccatccccagatatatttttggaagctgcaaaacgaatgaatacaaatcctccaaattgcttagtaatcgaggactccttaccaggtgttgcagctggaaaagctgcaggaatgcatgtcatagctgtaccttcagtccccaaaaggactgctgaattcagttctgctgatgaggtgatcaattccctccttgacgtaaagcctgaaaaatggggattgccaccatttagtgattggatcgatgataccttaccaatagaaccatggtttattggtggacctgtgattaaaggatttggccgtggttctaaagtactaggaattccaacagccaacttacctgcagaaaacttctccgacgtactatcagagcatacatcaggggtatactttggctgggctggactttcaacgcgaggtatatttaagatggtcatgagcattggctggaacccttattttgataacacggagaagactattgaaccatggttgcttcacgattttggtgaagacttttacggagaggagctgcgccttgttattgttggttacatacgacccgaggccaactttccttcacttgagagcttgatagagaggattcacgaggatgcaaggatatcagataaggccctgaatttaccattatacgccaagtataaagactcgccgtacctaagaaattccttgaaggaggacaattctgctaacgggaaccagtcagtgatagattccaagtgattcaacgttgtgaagtgaaagacatgaagaattctctttcgcagcgttgttgatgcagaaagagcactactgttcttgtgcttgtactgctgcattatgttccatgaatacttggaacatgctcttgactacaatgagaataccagtaagggtctatgttcgtcagaaagttgagttagaagcagccaactactatcttctcaaatggtcacctactcctagaatggaatgcacaagatgtctgaaaatttgcacgtgtgttgtggctctgaccatgtgaagcttaggctgtctatctaacgttctgaattaacttttctaatatgcattgagattggtatttcacaaaaaaaaaaaaaaacagacgccagacgatcctcctcccttctagaattggattctttttggatggaggggtagaaagcaaataaagctcggttattgttggttaaaaaaaaaaaaaaaaaaaaaaaaaaa

SEQ ID NO: 3238 - DNA, 1286 bp, Oryza sativa
  Clone ID: PAT_MRT4530_43475C.1
cctcctcgctcgccacaatctctctcccggcttcgttcctcctctcgccccgcgactcccgctctgctcctcctcgtcgccgccgccgccgccgccgccgccgccgccgccgctgtgtgtacgactacgacggcgaagagccaggcggggaggaccgatccgccggaggaggaggaggagggagtgggggggcggggagatgggggagggggggcgatgacagcgggcgcggctcggcgcgggcgggatgcggacgatctgcgacgtgtgcgagagcgcgccggcggtgctcttctgcgtggccgacgaggccgcgctctgccggtcctgcgacgagaaggtgcatatgtgtaacaagcttgctaggcggcacgtgagagttgggcttgcagaccctaataaagttcaacgctgtgatatatgtgaaaatgcccccgccttcttctattgcgagatagatggtacatcactttgccttagttgtgatatgactgttcatgttggtgggaaacgaacccatggaagatacctgctcctaaggcaacgggttgaagtaggagataaaccaggtcatatggatgatgttgctatgcaacagaaagatcctgaaaaccggacggatcaaaagaaggcccctcactcagtaacaaaggagcaaatggcaaaccatcataatgtgtctgatgatccagcctcagatggcaactgcgatgaccagggtaacatcgattccaaaatgattgatcttaatatgagacccgtccgtactcatggacaaggttcaaactcacagactcagggcgtggatgttagcgtcaacaatcatgattctccaggagtggtgccaacatgtaatttcgaacgagaagccaacaaataaataccgtaacaccaggatgtacatttcttcggttgctgctatatagcagtagctctccgggaggttggattagctttggtcttcagccaggcagaatatgtgttattacatggtcctcttgtgtcgctagtagtatgattctagtagagctgaagttgaacgagttcatgtcaactcggcatgccatatgccgtggacgctatttatcgtcgtgtactcgtgttgtggttgtaagactggtgtcacatgggccatacgggaagcacagtgggctgtcacttgtgcttttgtggattgctgctgtgcgctattagaaactgttcaaaagattaatagacccatcattttttttcggtgtaaaaaaaaaaaaaaaaaaaaaaaaaaaaaaaaaaaaaaaacccaaaaa

SEQ ID NO: 3239 - DNA, 5622 bp, Oryza sativa
  Clone ID: PAT_MRT4530_43893C.1
atggcggccgaccccgccgtagcgtccgccgtggcggcgatctccgccgtgatggactggcgctcctcccccgacgcccgctccgccgccttcgcgtacctcgaatcggttaagacaggagatgtccgggcattggcgaacacatcatttttattggtccgaaaggaccagtcttcagaggtccgactgcatggtttcaaaatgttgcagcacttggtgagattgagatgggaggaactcagtgttgcagaacgaaatgaatttgctaatttgactgttaatttgatacctgaggttgttggtcctcatgaggagtgggctttgaagagtcaaacggctgcattagtagcagaggtagttagaagggagggagttgctttgtggaatactttactcccatctattgtttcgttgtcaaacaatggtcctattgaggctgagttagttgccatgattctgaggtggcttccagaggatatcactgttcacaatgaggatttagaaggtgatagacgtagggcattgttacgtggtcttactgagtcgttgccacaaatcctgccgctgttatattctctacttgagaaacactttgtagctgctttgagcgcgcacacgaatcagcaaatggagttggctaaacaacatgttgggacaataactgctgtgctgaatgctgccaatgcatatgctgaatgggctcctgtgacagatctcgccaaatatggtttaattcatgggtcttgcatactagctgatgtagcaaggactttgcacttcctacaacagatgctggaatattatcaacactacaagatcacgcttcatttccaatctttattattttggctggtggtcttgagagaaccatcaaaagctaagtctgttgcacgtgtttctagtgacacccctgctgccggtaattctgcatctactggtggtggttcaactgaaagggagaagaaaggggtgtcagtattaatcactgatgaaatgtacagtacaattttggatgttacgttcaaaagaatgcttaaaaaaagtacgagtgcatcttcagggctgttagaactatggagtgaagagctagaggggaagagtgacttctgcaactaccgtgccaagctgctggatctcataaaagtcattgcatctcaaaggcctggtattacagcaacaagcattgtacagagaataaacattgtatttggagatgctaatgaagcaacgaaatcatcccaggatcttgatgcaatggaaggtgcgcagctggggctggaagcagttgttagtgctatattcgatggctcatctgattattcaaagattgaccaggacacaaaattccaaattcacaggatctttgaaggcttacttcagcagcttctttctttaaagtggtcacaaccaaatcttgctgttattcatggtcactatttggattctttgggtcctttcttgagacattacccagatgcagttgcctgtattgtgaataagctttttgaaatattaacatctctccccatcacaattcaggacccttcaaataatttccgtcaagctagactgcagatctgctcatcattcattcgtatatcaagagctgctgataaagcacttctgcctcacatgaagtgtaacagtgtgaatttctttatgaccattgtaaagacatttaagtgcaagcaggtcgtgacaacttggtatcagagccactcaccatggcttccgatactgagtgagttctttgtatcatgggtagcaaatgtgtacatgaacaaaaacattgctgatacaatggcttatcttcaaggagagggtcgcttactacgtgctgagcataaccacctctgtgaagcgtttcttgtcatggcatcctctgcagggattcaacagcaacaggaagtcctggcttggttactagaacctatcaacaaaatgtggacgcaagtggaatggcaaaatgcatacttgtctgacccatctggcttgacacacatgtttgctgacagccaatttatgtggtcaatttatcacaacatcacattatttgagaaggcactcaagaggggtgggtccaaaaaatctgcatcagctccacaagcactggccacaacagtgctgttgcgatgcatacatatgctttgggccgagcccttttctcagtctctggcaggagaagtcaaagcggcaaaaagcatgactgtggcggagcagaccagccttcttggggagacaaataaactcaccaaaggccaggttgcatctgctgatggattgttggatgttcaaagggagggagagtctaaggaaaacaccataaggaactggttacgcgggatccgtgacagtgggtacaatgttataggactatcggctagtcttggggatccatttttccgatgcatagagggttcctccatcactgctgctcttatggagaacgtgcaagctatggaatttcggcatttgcgccaacttatccaccttgttattattcctttggttaaatattgccctcctgaactgtggcggatgtggatatcgaaccttttacagccattatttgtccattgtcagcaagctcttgatttctcttggtccagtcttcttcgtgagggccgggctaaggttcctgataattttggtaatctttctgggtcagatctgaaggtagaggtaatggaagagaaattgcttagagacttgactcgtgaagtatgttccgttctttgggttttagcatcaccaggcttgaatagtggtcttccatccttagaacaacttggacctgccaaccggattaattcttctcttaaggatctggagttgtttgtttccagctctatcactggatttcttatgcttaatgtctccactgctgttcctgcattgaggataactgttgaagtgttcagttggacagatagtgaagcagtcacaaaaattattcctttttgtggtgcattgattcaccttgctgttgcaacaaatcgggctgagttgagtcagtttgttgcgaaagatctattttcttccatattacatggcttatctgttgagttgaattccattacgagttcagaacttgttggactttgtcgagaaatatatatctatctctcagatagagatcccgcacctagacagaacacaactggaagagaggaagaggataagaaggtgacaggaattggaacatcgaaatcgaatctctgccctgcccgtcacccaagcgctgagctggtgcttggcaccgaggtgccgcctctaatggtgatttttagaacactgccaagtagcgctaagcctgccacaaaacaaaaggtagcacccaagaaaactgatgtaagagccattttgcggcccttgaccgtaattaattgccaaaaaaaagacatacaactacgattcagtacagacaatatgaaaagagttgatatggcatcagcgatactgctcagtattgcaatcatggcacaactatcatctatatcagctcagccggctcctggatgccagtcccattgcggtgatatggaaatcccatacccatttggcattggcacagagtgtgctatcgaaccgggcttcgtaatctattgcaacaagactgctgatggatctatgaaaccattccttattaatgttgaggtcctaaatatttcgttgctccatggtcaaactagggcactaaatgccctgtcgacatattgctacaatgatgtaacaaagtcaatggaatctagccgatggtcacttgacttttcaacatggccataccggttctctaatctgcacaataagtttgtagtcattggttgcaacactctttcatacatctacaatggagagtatacgacagcatgtgcatcagtctgcgcaaaagcccctacaaatgactcatgcgatggtgttggctgctgccaaaataacatagccaagggattaaatagttataacgtcacgttcttcactgtgtacaatgattcgtcgaatttgcagtctaacccatgtagctacgcagcactggtggaaacagacacgtttaggttcaaaactgagtacgtaactactatgaagttcaatgagacatacaatggacagcagccggtggtactagactgggcaattgggaaggttggatgcaaggaggcaaacatgacttcttacgcatgccgtagcaaacatagcgagtgtgtagattcgatcaatggacctgggtatctatgtaactgcactcttgggtatcatggaaatccatacatcactgatggatgcatagatgtcaatgaatgtgagcaaaatcaaagcccatgcccaaaaggtgcaacttgtcgcaatacagaaggatggtaccattgttcttgccctgtgggaagaaagttggcaaaggaaacaaacacttgcaacccagacatcagcctgatcataggtgtcagcattggctccattgttctagtgattatcattttcttcgtgcgtataatttttgagagaagaaagcttacagatgtcaagaaaaaatacatccaggaacatggagggctgctattatttgagaagatgaaatcagaccagggacttgcatttaaggtgttcactcaagcagaactagagcaagcaacaaacaagtttgagaaaagccagattcttggacatggaggacatggcacagtgtacaagggaataactaaggataacattacagtggcaattaaaaaatgtgcactaattgatgatagacataagaaggaattcggtaaagaaatgttaatactttcacagattaaccacaagaacattgttaagctactgggttgctgtcttgaggtggatgtcccgatgctagtgtatgagttcattccaaatggaacattatttgatcttattcatggcaagaaccgtactcttcatatccctttcagttctctcctaagaattgttaatgaggcagctgaagggcttgcatttttacattcctacgcaaatccaccaattttgcatggtgacgtgaaaacatccaatatccttcttgatgagaattacatggcaaaggtatcagattttggcgcctccatattagcaccaaatgatgaagcgcagttcgtgacaatggttcaaggaacatgtggatatctggatcctgaatatctacaaacatgccagttgacagagaagagtgatgtgtatagctttggtgtggtcatcttggagatccttactgggcagatgccattgaaacttgaaggttctgagctacagaaaagcttgtcatcaagcttcctattggcaatgaaggagaataatcttgaggccatgctagatagccaaattaaaggtcatgagagcatggaactgctcagtggacttgctgagctagcgaagcaatgcttggacatgtgcagtgagaataggccatcaatgaaagacgtagctgaggagattagcagactaagaaaactttcgaaacatccttggatacagcgtgatagtgagacagagggctatctcagtggaccatcaaccagtaactttgaaattgagcaaagcactgagtacacaaggaaggacgaacaaatgcccataaacccaagcacttcgtattttatccggtga

SEQ ID NO: 3240 - DNA, 974 bp, Oryza sativa
  Clone ID: PAT_MRT4530_44272C.1
cccaggccgacgcacaaacccaaaaacccaaagcttagccaagctactagctagctcctcacttcttccagcttcttacactaatacagctcgagccacttcgtcttctcctctcttgcagcatagtttaagtttgagataggattggcgatagatatgaggccgactggtcgtcgttcttctccgccggtggctgctgctcttgccctgcttctcctcctcgtcctcttcttcttctcccactgcgcctcagctgctcgcccactgccagcatcagcagcagcagagctagtgcttcaggatggcgccaccggcaatggcgacgaggtttccgagttgatgggagcagctgaggaggaagcagcaggattatgcgaggaggggaacgaggagtgcgtggagaggaggatgcttcgcgacgcccacctcgactacatctacacgcagaagaggaacaggccttgaaatcttgaatcataatctccaagtcgatacaaggaggaattaatcagtagtaaacctacataaattaatctactatctgcagcctgttttcaactgcatgtatcagtgtattagtcgatctaggataatattttgcatgtgtactcaagtaaactgtcgtctgtataaccccgttatgtacatggttgtatttctttctccaaagtgttatcgaactctctgttgatctctgatacatctgtatgtgtagcatcagagaaaagatcgagcacttgtgggttatgatctgacgatcgagtgtatgaacagtgctaatggtgtagtaagtttttgcttaattgtcttggacttctcatggtgtgaaatgttcgaacaagcagaacatattccctatatcttccttggtagctggtgcttggtactactaccagcacaaatgttaccagtatgcatgtttcataaagagaaggtataatggattataaatatataaacttgcatttgttttc

SEQ ID NO: 3241 - DNA, 1661 bp, Oryza sativa
  Clone ID: PAT_MRT4530_44581C.1
gttgtggtggtgatggtgaggagcgagttgtagaggaggaggggcaccgatcaaccgggaagctggcggccgggaagtggtgggagcggccagatgacacggccatggccgggatggaccctggcgggggcggcgccggcgccggcagctcacggtacttccaccatctgctccgaccgcagcagccgtcgccgctgtcaccgctgtcgccgacatcccatgtcaagatggagcactccaagatgtcacccgacaagagccccgtgggcgagggagatcacgcgggagggagtggaagcggcggcgtcggcggtgaccaccagccgtcgtcgtcggccatggtgcccgtcgagggtggcagcggcagcgccggcggtagtggctcgggtgggccgacgcggcgcccgcgcgggcgcccgcccgggtccaagaacaagccgaagccgcccatcatcgtgacgcgcgacagcccgaacgcgctgcactcgcacgtgctcgaggtcgccggcggcgccgacgtcgtcgactgcgtggccgagtacgcccgccgccgagggcgcggcgtgtgcgtgctgagcggcggcggcgccgtcgtcaacgtggcgctgcggcagccgggcgcgtcgccgccgggcagcatggtggccacgctgcggggccggttcgagatcctatctctcacgggcacggtcctgccgcctcccgcgccacccggcgcgagcggcctcaccgtgttcctctccggcggccagggccaggtgatcggcggcagcgtggtgggcccgctggtcgccgcggggcccgtcgtcctgatggcggcctcattcgcgaacgccgtgtacgagcggctgccgctggagggcgaggaagaggaggtcgccgcgcccgccgccggaggcgaagcacaagatcaagtggcacaatcagctggacccccagggcagcaaccggcggcgtcacagtcctccggcgtgacaggaggcgacggcaccggcggcgccggtggcatgtcgctctacaacctcgccgggaatgtgggaggctatcagctccccggagacaacttcggaggttggagcggcgccggcgccggcggagtcaggccaccgttctgacccatgtcttagcatccagttcaaaaattctccaaattaagaatcgcgcagtgcagaagccatagcaatccaatgcagatatgcaagctaagctaatggtacaaaattgcgacatgcatgttggattgttgattggacgatcgacaggcctttgtactgggtgcaacatacgtatgcatctatcatgcatgcgttgcaaattaagatttcaattcatattcatgaggaggtttatcatatacacatattttaacatctgtgggggcaagaagaagctagaggagagttgcaagagcaagctcggaataaaccaaaggtcagtgagattatccaatgttttgtgtttaattctaccaagtgtttttttttttcatttttttctcttttgcattctctaatatggtactatcctattctagtttgtatcttttgatcggtagaaccatgtttctgaaaaactcttgtccccctgccccgcctcccacacatgtgcaacaccagaactgtcttatggtcaaaaaaaaaaaaaaaaaaactcgagactag

SEQ ID NO: 3242 - DNA, 702 bp, Oryza sativa
  Clone ID: PAT_MRT4530_44878C.1
gacctctcccctctcctcgttcctctccgcgccgccgccgccgaaggggagcagcctcggcaggcgaacgacacgggagggtgagacaagacccataaggaccaacgcgtaccacaagcggtatcgagcgctagcttaagagacggaggcacggcaagactgactacaggaccagcactaagctcaccatccgagataacatcatagtcaacacaccgaggttccggttcgctgtgagatttacacatcaagagcatatcacggctcatatgggctatgctaccattgctggtgacatggggatggctggtgcctacttccatgagctgtctcgcgtatggtcttgaagctggactcaccaactatgcggcagcttattgcactggacttgctttcggctcgccgagtgctcaagctcctggggtaggaccaagagttcaagggctatatggacgccgctggggaggactactaggttgaaccagctgatgaaaggcggactttccgtgctctcttggatggtggccttattaagacagccactggccaccgagtctttggtgccctcacgggagctacggatggtggactggacatttctcacagtgacaagagggacgctgggttcaagatggacgagaagcagctcgatgtctgctttcaccgcatgaacatctacagcgggcacgtggctgactacat

SEQ ID NO: 3243 - DNA, 2550 bp, Oryza sativa
  Clone ID: PAT_MRT4530_44906C.1
atggtttctcggtcctactccaacctgctggacctggccaccggcgcggcggaccaagcgccggcgccggcggcgctcggcgcgctccggcggcggctgccgcgggtggtgaccaccgcggggctcatcgacgactccccgctgtccccctcgacgccgtccccgtcgccggggcgcgcaccatcgtggtcgccaaccaccttcctatccgggctcaccgcccggcgtcgccgtcggagccgtggaccttttctgggacgaggacttccttcttcggcaccttcagcactcgtgctcctcccccgccatggagttcatctacatcggctgcctccgcgacgacattccgctggccgaccaggacgccgtcgcgcaggcgctcctcgagtcgtacaactgcgtgccggcgttcctgccccccgacatcgcgagcgctactaccatggcttctgcaagcagcatctgtggccgctgttccactacatgctgccgctctcccccgacctcggcggccgcttcgaccgcgcgctgtggcagtcgtacgtgtcggcgaacaagatcttcgcggacaaggtgctcgaggtgatcaacccggacgacgacttcgtgtgggtgcacgactaccacctcatggtgctcccaaccttcctccgcaagcgcttcaaccgcatcaagctcggtttcttcctccactcgccgttcccctcgtcggagatctacaagacgctccccgtccgggaggagctcctgcgcgcgctgctcaactccgacctcatcggcttccacaccttcgactacgcgcgccacttcctctcctgctgcggccggatgctggggctctcctacgagtccaagcgtggccacatctgcttggagtactacggccggacggtgagcatcaagatcctcccggtgggggtgaacatggggcagctcaagacggtgctcgcgttgccggagacggaggcgaaggtggcagagctgatggcgacttactccgggaaggggagggtcgtcatgctgggcgtcgacgacatggacatcttcaaggggatcagcctcaagctgctcgccatggaggagctgctgcggcagcaccccgagtggcgcggcaagctggtgctcgtccaggacgtcgacgaggtgaagggggagacgtacgccatggtgcggcggatcaacgaggcgtacggcgcgcccgggtacgagccggtggtgctcatcgacgagccgctccagttctacgagcgcgtggcgtactacgtcgtcgccgaggtgtgcctggtgaccggggtccgcgacggcatgaacctgatcccctacgagtacatcgtgtccaggcagggcaacgaggcgctcgacaggatgctgcagccgagcaagccggaggagaagaagagcatgctggtggtgtccgagttcatcgggtgctcgccgtcactgagcggcgcggtgagggtgaacccgtggaacatcgaggccgtggcggacgccatggagagcgcgctcgtgctgccggagaaggagaagcggatgcgccacgacaagcactaccgctacgtggacacccacgacgtgggctactgggcgaccagcttcctgcaggacctcgagaggacgtgcaaggatcacgcgcagcggcggtgctggggcatcggcttcgggctgcggttcagggtggtgtcgcttgacctcagcttcaggaagctcgccatggagcacattgtcatggcgtaccggagggcgaagacgcgcgccatcctgctcgactacgacggcacgctcatgccgcaggcgatcaacaagagcccgagcgccaattccgtcgaaacgctgaccagcttgtgcagggacaagagcaacaaggttttcctctgcagcgggttcgagaagggaacactccatgactggttcccctgcgagaaccttggcttggcggctgagcacggttacttcctgaggtcatcgagggatgcagagtgggagatttccattccccccgcggactgcagctggaagcagatcgcggagccggtgatgtgcctgtacagggagaccacggacggctcgatcatcgagaacagggagacggtgctcgtctggaactacgaggacgcagaccctgacttcggttcatgccaagccaaggagctcgtcgaccacctcgagagcgtgctcgccaacgagcccgtctcggtgaagagcaccggccattccgttgaggtcaagccacagggcgtgagcaagggcctggtggcgcggcggctgctggcgagcatgcaggagaggggcatgtgcaccgacttcgtgctgtgcatcggggacgaccgctccgacgaggaaatgttccagatgatcacaagctccacctgcggcgagtcgctggcggccacggcggaggtcttcgcctgcaccgtcggccgcaagccgagcaaggccaagtactacctcgacgacacggcggaggtcgtcaggctgatgcagggcttggcctccgtctccaacgagctggctcgggcggcgagccccccggaggacgacgacgaatga

SEQ ID NO: 3244 - DNA, 2868 bp, Oryza sativa
  Clone ID: PAT_MRT4530_44907C.1
atggtttctcggtcctactccaacctgctggacctggccaccggcgcggcggaccaggcgccggcgccggcggcgctcggcgcgctccggcggcggctgccgcgggtggtgaccaccgcggggctcatcgacgactccccgctgtccccctcgacgccgtccccgtcgccgcggccgcgcaccatcgtggtcgccaaccacctccctatccgggctcaccgcccggcgtcgccgtcggagccgtggaccttctcctgggacgaggactccctcctccgccacctccagcactcgtcctcctcccccgccatggagttcatctacatcggctgcctccgcgacgacatcccgctggccgaccaggacgccgtcgcgcaggcgctcctcgagtcgtacaactgcgtgccggcgttcctgccccccgacatcgccgagcgctactaccatggcttctgcaagcagcatctgtggccgctgttccactacatgctgccgctctcccccgacctcggcggccgcttcgaccgcgcgctgtggcagtcgtacgtgtcggcgaacaagatcttcgcggacaaggtgctcgaggtgatcaacccggacgacgacttcgtgtgggtgcacgactaccacctcatggtgctcccaaccttcctccgcaagcgcttcaaccgcatcaagctcggcttcttcctccactcgccgttcccctcgtcggagatctacaagacgctccccgtccgggaggagctcctgcgcgcgctgctcaactccgacctcatcggcttccacaccttcgactacgcgcgccacttcctctcctgctgcggccggatgctggggctctcctacgagtccaagcgtggccacatctgcttggagtactacggccggacggtgagcatcaagatcctcccggtgggggtgaacatggggcagctcaagacggtgctcgcgttgccggagacggaggcgaaggtggcagagctgatggcgacttactccgggaaggggagggtcgtcatgctgggcgtcgacgacatggacatcttcaaggggatcagcctcaagctgctcgccatggaggagctgctgcggcagcaccccgagtggcgcggcaagctggtgctcgtccaggtcgcgaacccggcgcgcggccgcggcaaggacgtcgacgaggtgaagggggagacgtacgccatggtgcggcggatcaacgaggcgtacggcgcgcccgggtacgagccggtggtgctcatcgacgagccgctccagttctacgagcgcgtggcgtactacgtcgtcgccgaggtgtgcctggtgaccgcggtccgcgacggcatgaacctgatcccctacgagtacatcgtgtccaggcagggcaacgaggcgctcgacaggatgctgcagccgagcaagccggaggagaagaagagcatgctggtggtgtccgagttcatcgggtgctcgccgtcgctgagcggcgcggtgagggtgaacccgtggaacatcgaggccgtggcggacgccatggagagcgcgctcgtgctgccggagaaggagaagcggatgcgccacgacaagcactaccgctacgtggacacccacgacgtgggctactgggcgaccagcttcctgcaggacctcgagaggacgtgcaaggatcacgcgcagcggcggtgctggggcatcggcttcgggctgcggttcagggtggtgtcgcttgacctcagcttcaggaagctcgccatggagcacattgtcatggcgtaccggagggcgaagacgcgcgccatcctgctcgactacgacggcacgctcatgccgcaggcgatcaacaagagcccgagcgccaattccgtcgaaacgctgaccagcttgtgcagggacaagagcaacaaggttttcctctgcagcgggttcgagaagggaacactccatgactggttcccctgcgagaaccttggcttggcggctgagcacggttacttcctgaggtcatcgagggatgcagagtgggagatttccattccccccgcggactgcagctggaagcagatcgcggagccggtgatgtgcctgtacagggagaccacggacggctcgatcatcgagaacagggagacggtgctcgtctggaactacgaggacgcagaccctgacttcggttcatgccaagccaaggagctcgtcgaccacctcgagagcgtgctcgccaacgagcccgtctcggtgaagagcaccggccattccgttgaggtcaagccacagggcgtgagcaagggcctggtggcgcggcggctgctggcgagcatgcaggagaggggcatgtgcaccgacttcgtgctgtgcatcggggacgaccgctccgacgaggaaatgttccagatgatcacaagctccacctgcggcgagtcgctggcggccacggcggaggtcttcgcctgcaccgtcggccgcaagccgagcaaggccaagtactacctcgacgacacggcggaggtcgtcaggctgatgcagggcttggcctccgtctccaacgagctggctcgggcggcgagccccccggaggacgacgacgaatgagcacccatagggcgcgcgaggcgtgccatggaaaggattaggcagtgcggtgcaccggagagcctcgtttagttccccccggtttgagcgtttgatgggtcgtagttgctagttaggtgtacatgatttcctatgattcttcagggtattgtaccgtacggagtagtgatttagtccttggttagagcatcatgaattggtttgtcatcagtaagagagtattattgatctagtaaagctcgggttaccgcaacaattataaaaataccccaccccccccccccc

SEQ ID NO: 3245 - DNA, 433 bp, Oryza sativa
  Clone ID: PAT_MRT4530_44970C.1
gtggaatggcggtagcatatatcacgccaagtgattatttgttttggttccggtcacacacagctaaagagataaagtggggtggtgcaaagcatcatccagaggataaggatgatggacaacgaatgcatccacgatcatcgttcaaggcatttcttgaagttgtgaagagtaggagcttaccatgggagaatgcggagatggatgcaatacattccttgcagctcatattgcgggactctttcagagattctgcagagggcacaagtaactcaaaagccatagtgaatggccaggttcagcttgaggagctagaattacggggaatagatgagcttagctcggtagcaaaggagatggttcggttgatcgagacagcaacagtacccatctttgcagtagatactgatggatgtataaatggttggaatgc

SEQ ID NO: 3246 - DNA, 863 bp, Oryza sativa
  Clone ID: PAT_MRT4530_45342C.1
ccgcccgcccgtccgcccctcttcttctccttcgactttgttcgactcccctccttcccggcagaggagaggagaggagaggagaggactcatccatcatcatcaatcaacgccatgacgagctcctcatctccttcccgaaaggcgctgagcaagatcgcttgcaatcggctgcagaaggagctcgccgagtggcaggtcagccctccctccgggttcaagtacagggtctccgataacctccaaaggtgggtaatcgaggtcaccggagcggcgggcacgctctacgccggcgagacataccagctgcaggtcgacttccctgagcattatcccatggaggcgcctcaggtcatttttctcaacccggcgccgatgcatccacacatttacagcaacgggcacatctgtttagatatactgtatgattcttggtcacctgcaatgactgtcagttcggtctgcatcagcattttgtcaatgttgtcaagttcaccagcaaagcaacgccctcaagacaatgaccgctatgttaggaattgccgcaatgggaggtcgccgaaggagaccagatggtggttccatgatgacaaagtgtaagaggaactagttggcacttttgccattcagtaatcgtaataccttgaaatctcttgcaaggggaaaatgagatgaatgtaggcttactgttaagcatcactctattggaccaccaagcttaactgctgggttggtttgtacatgagctgcctgcacacatgtcaagtcatgaatataatattaccataaatgattatacagaataagcaagtgtaccatgctgattctctgatacgatcgagcacaaaaagaatagcgtattg

SEQ ID NO: 3247 - DNA, 1103 bp, Oryza sativa
  Clone ID: PAT_MRT4530_45422C.1
tttttttttttttttttttttcgcctgaacattactccaatccaactccaatagaaaacttataagctcctggcagagcatgattccggtaagtttttgcttctacctcataaaacctgcataagaacatgtatttctttctggattatttccgtgaaaaggttaaagcaacaattctttattttctaaggacgttgcccaacgatttatactctacaacttatgaattgttttcatgtcgatggcctcctccagagtcccttgctcaacatgatcccaccatctcatgaggaagttgtcaacaaccagcctaaaccaaggggacagcttaatgccgccttcaccagcatctgccttcttgagcaactccttcagctcatcacgattcacgtacttgacgtcggccacttcttcaggattcgggctgagctccacatcacgaaccatgaataggaggtagtccagttcatgttcgccccattttccatcagatggagccttgtaaagcatcctcccaagaggaatgaattggtcaacaggtagttcttcagcttgtattcccagttcatcgaatagcttccgctgtgctgcatttctgacccctaggcttttatcttcaatgagctcggactcgcggtatagagggtggctacagcaagtgtttgtccagacaagtggaaatgtcacttttgtagcagacctttgctgaagtaacaattcatatttggagttgaaaagaaaaacactgaacgctctgtggaggacatgaccagaatttatcttttccatgagatggcagttatacttggaatcatggccaatgacgttgtcctgttcgtccactaaaatacactcgtcctcgaacatgagccgctgctggacggcgtccatcccggcgtcggcggcttccgcggtgccggccttccccatcaccgcggcggtggcggcgaaggaggacgaggacgacgacaggccgcggagggcgaggccccgcccaaacggggaccgagggcgggcggaggagcgcgcgacgccgaggccgagggacgcggaggcggtcgagagcagcgcgagggagcgcgccgccgccgccatcggagggg

SEQ ID NO: 3248 - DNA, 3519 bp, Oryza sativa
  Clone ID: PAT_MRT4530_4549C.1
atggcggataatggtaatgcaaagccaggtggtgggggatctggagcttatacaatcaacctagataacttcagtaagcggctgaaggtgttctatgaccattggaaagagcataattctgatctatggggttcttctaacgctattgcaattgctactccacctccgtctgaagatcttcgttatttgaagtcgtcagctctggacgtctggctacttggatatgaatttccagaaaccataattgtcttcatgcacaagcaaatacatttcttatgcagtcaaaagaaagcaaatctcattggcaccctcaagaaggcttcaaatgatgctgttggtgctgatattgtcttgcacgtgaaagctaagaatgacagtggtgttggcttaatggaggacatagtgcgtgctgtctgtgctcagtcaaaatcagatgacccaattgttggtcacatcgcaaaagaggcacctgaggagaaggtgattgatgaagagaggaaagtgacacactcttcattgatggatgagacagaaaaggctattcttgatcctcttaaggtcaaagtgaagttgaaggctgaaaatgttgacatatgctatcctcctgtatttcaaagtggagggaagtttgacctcaagccaggtgcctcaagcaatgatgattatctttactatgactctgcaagtgttatcatatgtgcaattggggccagatatggaaattattgctccaatatggccagaacatttctgatagatgctactcctgcacagagcaaggcgtatgaaactcttatgaaagctcatgaagctgctctagaagcattgaagccagggaatcggatgagtgcggtttatcaggctgcagttgacgttattgagaagaatgcccctgaactactccctaatctaacgaagtctgctggtacaggaattggtcttgaattccgagagtctggcttaaacttgaatcccaagaatgaccgtatcataaaagcaggaatggttttcaatgtctcccttggtttgcttaatcttcaagcagaaacaaagagtgagaagacaaaacaatactctcttttgttggctgatacatgtttagtgccattggagaacttaacagcatcatgctccaagcttcttaaggatgttgcttattcgtttaatgacgaggatgaagttcttcctgtcaaaaaggtggaggttaatgcaaaggaggcattgccaccaacaaaggccacacttaggtcagacaaccaggagatgtccaaggaagagctccggagacaacaccaggctgaacttgctcgccaaaagaatgaagagactgctagaaggcttgctggggttggctctggttctggtgatgggcgtggtccctcaaggtcatcaaatgagcttgttgcatataagaatgttaatgatgttccatatgcaagagagttggtcatacaagtagatcagaagaatgaagctgtcctcttacctattcatggcagcatggttcctttccatgtttctactgttaagagtgtcacaagtcaccaagacaaccgcacttgcactatccgcatcttcttcaatgtgcctggcatgccattctcaaacgatagcaatctgaagtcgcaaggggctatctacttgaaggagatcacgttccgctcgaaagatccacgacatagcagtgaagttgttccgcaaatcaaaacgttgaggcggcaagttgcttcaagggagtcagagagagctgaaagagccacccttgttactcaggagaaactccagttggcaagcaacagaaacaagccagtgagactttctgatgtgtggataaggcctgcatttggtggacgtgggcggaagcttacaggaactcttgagtcccatgtcaatggttttagatattctacttcaagggctgatgagcgtgtggatatcatgtatgggaatgtaaagcatgccttcttccagccagcagaaaaagaaattattacactccttcatttccatttgcacaatcatattatggttggaaacaagaagacaaaggatgttcaattttatgttgaggtgatggatgttgttcagactcttggtgggaataggagatcagctcttgatcctgatgaaattgaagaagagcagcgtgagagggaccgaaagaatagaataaacatggatttccagaactttgtgaacaaggttaatgatcactggtcgcagccacaattcaaggggctggatcttgagtttgatgtccctcttagagagcttggattccatgcccggcgacgacggcgccggctaccggtgcggcggtgcgacgtctgccacttcgacctgcgcacgtgctgcgcgctcccgccggccaccctggagaacgacatgttcgaggtcagcgcgttcgcgttcctcgccgagccgccggcggcgcccgccgccgcgggcggcaggatctgcgacgcctgcggcgacggcgtgcgcggcttcgtctaccactccgacgacccccgacctcgacctccacccatgctgcgcgttcctgcgcaggcgcgtcgtggtgcaggacggccgccacttcgagctccgcaagcgcgcgcagccgcgccggcctgtgcggcgagaggagcggccgccgccgcaacttctgggcgtaccggacctacgacgacgacggcgaacccgtgtacctgcacatcgcgtgcgtcaaggacggacaccgcgggcggtgcgcggcggcggtgtggcggcgagatcgtgctggtgagctcgtcgccggcgatggacggcgtgctgcagagcgtgccccggaggaggacgccgcggagcggcgggttcgagaggttttgcaagattgttaacgtcgtcgtgagcgtcatcatcgcggtcatattcgggagtcccatggcgatgataagcgcggttgcagggcccgatgggaggagccgagctgctgcgtcggcgccgtcgtcgtcgtcgtcgcccgtcgtcgtcgtcggcgccgtcgtcatcgtcgtcgctcgtcgtggacgtgggagaggagggagccgcaggcgcgcggacgtggggagaggaggggagctggcggcacgcggtcgtcgtcgtcgccgaggagggagccggccggcggcggaggtggggagccagcggcgcgcggacgttggagaggagggagccggctggtggcgcatggacgtggggagaggaggggagccggcgtcgcggtcgtcgtcgtcgccggcgcatggaggcggcgtcgcggtcgtcgtcgtcgttggcggcggaggtgggaagccggtggcgcgtggacgttggagaggagggagccggccggcggcgcgcggacgtagggagaggaggggagccggccggcgtcgcggcgtcgcggcgtcgcggtcgtcgtcgtcgccggcggcggaggtggggagccgaggagggagccagccgcagcggagtcaaacgtggggcacggatatctacggctacacttattttgggacggagataatatctccttag

SEQ ID NO: 3249 - DNA, 3358 bp, Oryza sativa
  Clone ID: PAT_MRT4530_4550C.1
atggcggataatggtaatgcaaagccaggtggtgggggatctggagcttatacaatcaacctagataacttcagtaagcggctgaaggtgttctatgaccattggaaagagcataattctgatctatggggttcttctaacgctattgcaattgctactccacctccgtctgaagatcttcgttatttgaagtcgtcagctctggacgtctggctacttggatatgaatttccagaaaccataattgtcttcatgcacaagcaaatacatttcttatgcagtcaaaagaaagcaaatctcattggcaccctcaagaaggctgcaaatgatgctgttggtgctgatattgtcttgcatgtgaaagctaagaatgacagtggtgttggcttaatggaggacatagtgcgtgctgtctgtgctcagtcaaaatcagatgacccaattgttggtcacatcgcaaaagaggcacctgaggagaaggtgattgatgaagggagaaaagtgacgccttcttcatctatgcatgagacagaaaagactattcgtgatcctgttaaggttgaagtgaagttgaaggctgagaatgttgccatatgctatcctcctgtatttcaaagtggagggaagtttgacctcaagccaggtgcctcaagcaatgatgattatctttactatgactctgcaagtgttatcatatgtgcaattggggccagatatggaaattattgctccaatatggccagaacatttctgatagatgctactcctacacagatcaaggcgtatgaaactcttatgaaagctcatgaagctgctctagaagcattgaagccagggaatcggatgagtgcggtttatcaggctgcagttgacgttattgagaagaatgcccctgaactacttcgtaatctaacgaagtctgctggtacaggaattggtcttgaattccgagagtctggcttaaacttgaatcccaagaatgaccgtatcataaaagcaggaatggttttcaatgtctcccttggtttgcataatcttcaagcagaaaaaaagagtgagaagacaaaacaatactctcttttgttggctgatacatgtttagtgctattggagaacttaacagcatcatgctccaagcttgttaaggatgttgcttattcgtttaatgacgaggatgaagttcttcctgtcaaaaaggtggaggttaatgcaaaggaggcattgccaccaacaaaggccacacttaggtcagacaaccaggagatgtccaaggaagagctccggagacaacaccaggctgaacttgctcgtcaaaagaatgaagagactgctagaaggcttgctggggttggctctggttctggtgatgggcgtggtccctcaaggtcatcaaatgagcttgttgcatataagaatgttaatgatgttccatatgcaagagagttggtcatacaagtagatcagaagaatgaagctgtcctcttacctatttatggcagcatggttcctttccatgtttctactgttaagagtgtcacaagtcaccaagacaaccgcacttgcactatccgcatcttcttcaatgtgcctggcatgccattctcaaacgatagcaatctgaagtcgcaaggggctatctacttgaaggagatcacgttccgctcgaaagatccacgacatagcagtgaagttgttcagcaaatcaaaacgttgaggcggcaagttgcttcaagggagtcagagagagctgaaagagccacccttgttactcaggagaaactccagttgacaagcaacagaaacaagccagtgagactttctgatgtgtggataaggcctgcatttggtggacgtgggcggaagcttacaggaactcttgagtcccatgtcaatggttttagatattctacttcaagggctgatgagcgtgtggatatcatgtatgggaatgtaaagcatgccttcttccagccagcagaaaaagaaatgattacactccttcatttccatttgcacaatcatattatggttggaaacaagaagacaaaggatgttcaattttatgttgaggtgatggatgttgttcagactcttggtgggaataggagatcagctcttgatcctgatgaaattgaagaagagcagcgtgagagggaccgaaagaatagaataaacatggatttccagaactttgtgaacaaggttaatgatcactggtcgcagccacaattcaaggggctggatcttgagtttgatgtccctcttagagagcttggattccatggtgttccatataaagcttcagctttcatcattccaacttcgacttgtttggttgaactaatagagacacccttcctggtggtgaccctgagtgagatagagattgttaatttggagagggtgggctttgggacaaagaactttgacatggctatcgtgttcaaggatttcaagaaggatgttcttcgcattgattccataccatcaacatcacttgatgcaataaaggagtggcttgacacgactgacctcaagtactatgagagcaggctgaaccttaactggcgtcctattctgaaaactatcatcgatgatcctcagaaattcattgatgacggtggctgggaattcttgaatatggaagcaagtgattcagaaacagaggaaacagaggaatctgatcagggctacgagccttctgatgctgagcctgagtctgaatcagaagatgaagattctgacagcgagtccttggtggaatcagatgaggatgatgaggacgattctgaagaagactctgaggaagagaagggtaagacctgggaggagctggaacgggaggcaagcaatgcagacagggagaatggtgcggagtcggacagcgaagaagagaggaggcggcgcaaggtgaagaccttcagcaagtcccgtccaccaccggagcgcagcagcttcaagggaggaccctcaaagaagccgaagttcaggtaaatctaacggtgcttcgccaggcctggctgcttcctgaatgcgcgccctttttgaggggcatggtgtgcttggctgtaagcagaagcgctcctagctgtttctctagatcattacgacactttgtttccgtagtagcgtactgcagttagctgaaagggcggtcggactttggtgaactccatagttgatgaaatgaactgtaaagactcttgccatctaggggaaacccaagttgattcattagttgtatcctcattgatgtaatgttttgtttcctgggtagaatgttgacctccagaatgtataatatttatgttggcggacgtatcttgtgcagatggcaatgctgcagcctcagttgtgt

SEQ ID NO: 3250 - DNA, 1709 bp, Oryza sativa
  Clone ID: PAT_MRT4530_45989C.1
ggagatagcaaccccacgcgtcagaagacgcagcatgcgagcaagcaagagcggttttagccatcaaagccgaaagccatccgggcattcgctctcccctcgctgctagctagctttgcttgctaatctagagctaagcaccaaatggtcctgattgttcttctcgcttctgaattgttgtgacctgtaactacaaaggcatagttaggtagatatagaaagagggggggagaggggccggaggccggagcggcgggggcggcggcgagatgaagctccacttcgtgctcaggttcctgttcggccccgtgccggtgtacttctcggcgctggccatcctcatcctgctgacgaacgcgcagtacttcgggctggtgggcgtcaccgttccccgcgcgacgaagctggcgtcgtcggcgccggtggtgagcgtgatgaagtactgcgacatcttccgcggcgagtgggtgccggactccgacgcgccctactacaaccacaagacgtgttacatgatccaggagcaccagaactgcctcaagtacggccgccccgacctcgaattcctcaagtggcggtggcgcccctccggctgcgagctgccccgcttcgaccccgtgcagttcctacagttcaaccgtcacaagtcgctcgccttcgtcggtgactcgctggctcgcaaccacatgcaatccctgctctgcctcctctcccaggtggcgtatcccaaagacatgtcggcgaacccgacgactcagaacaaggtgtaccactacagggggtacaacttcaccgtcagcatgttctggtcgccgttcctggtgaaggcgcgtgagcccgaccacgacgggccggcgcacacgggccactggagcctgtacctcgacgagcccgaccagtcgtgggtgtccgagatctcgcggttcgactacgtgctggtgtccgccgccaactggttctccaggccgtcgctcttctacgagaagcggcggctggtcgggtgcagcttctgcagcaggcagtacggcgtgccggacctgacgctctactactcgcagcgccgggcgtggcgcgtggcgctgaaggcgatcaacgacctggagagcctccgcgggcgggtgatcgtgcggatgctgtcgccgatgtcgcacttcgagaacgggacgtgggaccagggcggcaactgcaagcggacgcagccgctccggagcaacgagacggtgatggaggggcgggacctgcacttctacacggcgcagatggaggagtaccgcgccgcggagaaggtcgcggaggccaagggccggcggatgatgctcatggacgccacggcggcgatgctgatgcggcccgacggccaccccagccggtacggccacctgccgaaccagaaggtgcagctctacaacgactgcatccactggtgcctgccaggccccatcgacatctggaacgacatgctcttccagatgctcctcgtctaacgcgatcgatcgccaattcgccatcggtaaatgcgacttctactgcacagacaggattgctcttgctgttgtttcaaagcagttttgacaaggatttattcgaacttccccaatagattctttttttctctctcttttcccttcatttcctttcatttttcgtttatgctgacgcgaatttttaatggatcgtcaccggaaagagtgaacgaaagtgtgcctccg

SEQ ID NO: 3251 - DNA, 1626 bp, Oryza sativa
  unsure (1)..(1626): unsure at all n locations
  Clone ID: PAT_MRT4530_45999C.1
cggaattacccggnngtcgacccacgccgnntccggtctctctcaccaacaaacacgtacgactttgaacgcaaagtcttggcgccactcgatcgatcactctctgctcatcaggtgtttgtggaaagtgcagagatgggggagaacggtgtggtggcgagcaagctgtgctacccggcggcggccatggaggtggtcgccgccgagctcggccacacggccggctccaagctgtacgacgacgacggccgcctcaagcgcaccgggacgatgtggacggcgagcgcgcacatcatcacggcggtgatcggctccggcgtgctgtcgctggggtgggcgatcgcgcagctgggttgggtggccggccccgccgtcatgctgctcttctcgttcgtcacctactacacctccgcgctgctcgccgactgctaccgctccggcgacgagagcaccggcaagcgcaactacacctacatggacgccgtgaacgccaacctgagtggcatcaaggtccaggtctgcgggttcctgcagtacgccaacatcgtcggcgtcgccatcggctacaccattgccgcctccattagcatgctggcgatcaagcgggcgaactgcttccacgtcgaggggcacggcgacccgtgcaacatctcgagcacgccgtacatgatcatcttcggcgtggcggagatcttcttctcgcagatcccggacttcgaccagatctcgtggctgtccatcctcgccgccgtcatgtcgttcacctactccaccatcgggctcggcctcggcgtcgtgcaggtggtggccaacggcggcgtcaaggggagcctcaccgggatcagcatcggcgtggtgacgcccatggacaaggtgtggcggagcctgcaggcgttcggcgacatcgccttcgcctactcctactccctcatcctcatcgagatccaggacaccatccgggcgccgccgccgtcggagtcgagggtgatgcggcgcgccaccgtggtgagcgtcgccgtcaccacgctcttctacatgctctgcggctgcacggggtacgcggcgttcggcgacgccgcgccgggcaacctcctcaccgggttcggcttctacgagcccttctggctcctcgacgttgccaacgccgccatcgtcgtccacctcgtcggcgcctaccaggtctactgccagccgctgttcgccttcgtcgagaagtgggcgcagcagcggtggccgaaatcatggtacatcaccaaggatatcgacgtgccgctctccctctccggcggcggcggcggcggcggaaggtgctacaagctgaacctgttcaggctgacatggaggtcggcgttcgtggtggcgacgacggtggtgtcgatgctgctgccgttcttcaacgacgtggtggggttcctcggcgcggtggggttctggccgctcaccgtctacttcccggtggagatgtacatcgtgcagaagaggataccgaggtggagcacgcggtgggtgtgcctgcagctgctcagcctcgcctgcctcgccatcaccgtcgcctccgccgccggctccatcgccggaatcctctccgacctcaaggtctacaagccgttcgccaccacctactaa

SEQ ID NO: 3252 - DNA, 985 bp, Oryza sativa
  Clone ID: PAT_MRT4530_46101C.1
ctagccgcacacgcgagcggagccagaggaggagacggtagcggcacacgcgagcggagccccagctggagacggacccacccggctccaccacggctccagctctctccactctcactccccgattcgccggcgagcaggcggcggcggcggaggcaccatagctcaaggcttcctctccgctccgcaggtaccaagatgaaggtcaagattcttcagtggcattcggtggcttcttggacatgggacgcccaggatgaaacctgtggtatatgcaggatggcattcgacggctgctgccctgattgtaagttccccggcgacgattgcccgctcatctggggctcctgcaaccacgctttccatctccactgcatactgaagtggggtcaattctcaaacatccagaccaaagatgaaggtcaagattcttcagtggcattcggtggcttcttggacatgggacgcccaggatgaaacctgtggtatatgcaggatggcattcgacggctgctgccctgattgtaagttccccggcgacgattgcccgctcatctggggctcctgcaaccacgctttccatctccactgcatactcaagtgggtcaattctcaaacatccacaccactttgcccaatgtgccgtagggagtggcaattcaagggctaatggcatcaaccaaagatgattaattgtgttcgtgtagactagtacaaaagcaatcatgtaacatctagcaggttgtgtatattttttccctgtaattcctaacttcatcaaagcatctctccctttgaggagcaactgatagaccctaaccatgtgaccccatggatcagtggcatggaattcctttggtgttttcaggttgcttgaatttctgggaagcttcctgttaggctgtgcctggtcacctggccttgctgccttgcatatgataagctgtatcccagtgaggcttgactcggagtaaactagtgccat

SEQ ID NO: 3253 - DNA, 1324 bp, Oryza sativa
  Clone ID: PAT_MRT4530_46195C.1
ccggccggagacacgcgacgggcgctcattggctggggtggggccttcctagcggccccgggcgtctccccgcgtgggcctccccccaaaatttccgacgccagagcgcgaggagacgcacacagagacttggcatttgtagagtttttagatttatagatagcaaagatgtcggcacaggcggagctttcccgtgaggagaatgtgtacatggccaagctcgctgagcaagccgagaggtacgaggagatggtcgaattcatggagaaggtggccaagacggttgactctgaggagctcaccgtggaggagcgcaacctcctgtctgttgcatacaagaatgtgattggagcccgccgtgcgtcatggcgcattatctcctccattgagcagaaggaggaaagccgtggtaacgaggaccgtgtcacactcatcaaggactaccgtggcaagatcgagactgagctcaccaagatttgcgacggcattctcaagctgcttgaatcccaccttgtcccctcttccactgcccctgagtccaaggtcttctacctcaaaatgaagggtgactactacaggtaccttgccgaatttaagaccggggctgagaggaaggatgctgctgagaataccatggtggcatacaaggctgctcaggacattgctttggctgagctgcctcctactcatccaattaggcttgggctagctcttaacttctcagtgttctactatgagatcctcaactcgcctgatcgtgcttgcaacctcgcaaagcaggcttttgatgaggccatctcggagctggacaccctgagcgaggagtcctacaaggacagcactttgatcatgcaactcctccgtgataacctgaccctgtggacttcagacatctcggaggacaccgcggaagagatcagggaagctccgaagcgcgactccagcgaggggcagtaaagccggctttatgtgccctagaagcttgtagctagtgctttgctactgtgtaatgacacctatgtggctgtgattgttgtcgggaaatctggggctcccccgtatgtgaggttgctagcgatggttttgcagtctcgcctttaagctactcgtagcagagcaggtgggggtctgtggagccaggcctggttgggggtgggggagcctcttgaactgcttggtggcacttcctgtttttctgtttgcctttttattggtgtttattgttatggtcaatcctgtgtctaaaaaaaaaaaaaaaaaaaaaagaaaaaaaaaatatagaaaaaactccaacatacccatccctccagcccggggatccact

SEQ ID NO: 3254 - DNA, 368 bp, Oryza sativa
  Clone ID: PAT_MRT4530_46419C.1
ttgatttgtcggacggcggcggcacccctgcgagggaactaactagataggccggccattgagacggcggccggggacaggtacacccgcgggggcgggacgcgctccacagcgtgctgcgcggacaggtccatgctcgcagcaactacaggcccaaggcctggagaccgtcgagcacgttctacggcaagtcgtggagggttaacacggggaggtgcgctgcgtgtgggaggcattgcaaggaagcaagccggacggggctagcacccgagcgagatctgggacagcatggaggagtttctgaccaaggagacgccggataacaacctcatcaggctgctgatcagcatgggggaggcgatgaggac

SEQ ID NO: 3255 - DNA, 221 bp, Oryza sativa
  Clone ID: PAT_MRT4530_4653C.1
ccggaaaaagccaaggttccataaatattgctccacttgtccaaagcccagaaaaaaatccattggtccatgacccggagagggccatcccccccacttatttggccccccaaagggcaaggctgcaaaaaaaatcaagcaacccaagctgaactcacggccccacctgtcagcctttaactggccgaggcccgagactcttgttaaaaacaggaaccccc

SEQ ID NO: 3256 - DNA, 2709 bp, Oryza sativa
  Clone ID: PAT_MRT4530_46959C.1
gtacagcggtatagagagagagacacagagagagagagagagagagcagcagcaggtagcaggtcgaggagggtttgtggccatggcgatcctgtcggatgtggccaccgaggtgctgatcccgatcgccgccatcatcgggatcgggttctccatcgcgcagtgggtgctggtcgcccgggtcaagctggcgccgtcgcagccgggagcgtcgaggagcaaggacgggtacggcgactcgctgatcgaggaggaggaagggctcaacgaccacaacgtcgtcgccaagtgcgccgagatacagaacgccatcgctgaaggagcaacatcgttccttttcaccgaataccaatacgttggcgttttcatgtcgatattcgcggtggtgatcttcctcttcctcggctccgtcgagggattcagcacaaagacccacccctgcacatacagcaaggacaaggagtgtaagcctgctctgttcaatgccctgttcagcaccgtctccttcctgcttggagccatcacctcagtggtttctggcttcctcgggatgaagattgcgacttacgcaaatgcgcggaccaccctggaggcgaggaagggtgttggcaaggccttcatcaccgcgttccgttcgggagcggtgatgggattcttgctggcatcaaatgggcttctggtgctttacattgccataaacttgttcaagatgtactatggcgatgattgggagggtctctttgagtccatcactggctatggccttggtggatcctcaatggctctgtttggaagggtgggtggaggtatctacaccaaggcggctgacgtcggtgctgatcttgttggcaaagttgaaaggaacatccctgaagatgatcctcggaaccctgctgtgattgctgacaatgttggagacaacgttggtgatattgctggaatgggatcagatctgttcgggtcgtacgctgaatcttcctgtgctgcccttgttgttgcttccatttcttcctttgggatcaaccatgatttcactgggatgtgctacccgctgctggtcagctccatgggcatcattgtctgcttgatcaccactctctttgccactgacttcttcgagatcaaggccgtgaaagaaatcgaaccgtcactaaagaagcagctcatcatttctacggctctgatgactgttggtattgcactggtcagttggttggcgctcccatacaaattcaccatcttcaattttggtgaacagaaggaagtcactaactgggggttgttcttgtgtgtttcgatcggtctatgggctggtctgatcatcggatacgtgacagagtactacactagcaatgcatacagccctgttcaggatgtcgcagatgcttgcagaactggtgctgccaccaatgtcatatttgggcttgctctaggatacaagtctgttattatcccaattttcgctatcgcgcttggtatctacgtcagcttcaccattgctgcgatgtacggcatagcagtggctgcccttggcatgctgagcacaattgccactggactgtccattgatgcttatggtccgatcagcgacaacgccggtggtattgctgagatggcagggatgagccacagaatccgcgagagaaccgacgctcttgacgctgctggaaacacaaccgctgctattggaaagggttttgccattgggtcagcagcactggtgtcccttgcactgttcggcgccttcgtcagcagagccggggtgaaggtggtcgacgtcctgtcccccaaggtgatcatcggattgatcgtcggagcaatgctcccgtactggttctccgccatgacgatgaagagcgtcggcagcgcggcgctgaagatggtggaggaggtccggcggcagttcaacaccatccccgggctgatggagggcacaggcaagccggactacgccaactgcgtcaagatctccaccgacgcctccatcaagcagatgatccctcccggcgccctcgtcatgctcacgccgctcatcgtcggcaccctcttcggcgtccagaccctctccggcgtcctcgccggcgccctcgtctccggcgtacaggtcgccatctctgcgtcgaacaccggtggcgcatgggacaacgcaaagaaatacatcgaggctggggcgagtgagcacgcgaggtcgctggggcccaagggatcggactgccacaaggcggcggtgatcggcgacaccattggcgacccgctcaaggacacgtcgggcccgtcgctgaacatcctcatcaagctcatggccgtcgagtcgctggtgttcgcgccattcttcgccacgcacggaggaattctattcaagctcttctaggagagagagatttaaaattcgatcgaatttgaggacggacggagattttcgaataataactagaccacgggatcatgtgggctgaaaaaaaggaacctctgcaaataatgttgctttggtggtagtgggacactatctctacgatttaattttgtctcatgtaggttttgtaatttgtttttaacttgctgcgtcgttttcagtttctgtctgcctgagccctgaggcatcgtgaacttcttttagctgatgtacggcttgtataaagtgaccagatggttttcatctgcagtttatgtgcatatttttgtcatcttaacattgtcgcgcccgatgat

SEQ ID NO: 3257 - DNA, 1081 bp, Oryza sativa
  Clone ID: PAT_MRT4530_47006C.1
gccaagacgacgacgacttgggaattcatttgcatcggcaacgacgatgaagctcgccgtggtcgccgtcgcggcgctcctcctcgccgccggcgtcgcctccgccgatgaattcgacttcttctacctcgtccagcagtggcctggctcgttctgcgacacgcaggctgggtgctgcttcccggacaccggcaagccggcggcggagttcggcatccacggcctgtggcccaactacgccaagtgccgtcccgccgccggcgccgtcgccgacgacgacgacggcgtggtggagatggtggtcgacggcggcgccgccgtcgagcgccaccaccggcggcggcagaagtgctggccggagtactgcgacgacggcaacaagctgcggccgtgggagatcaaggacctcgtggcggagctcgatgcgaactggccgacgctgtcgtgcaagggcggcaagagcttcgagttctggagctacgagtggaagaagcacggcacctgctcgggcatgggccagcacggctacttcgcggcggcgctggagctcaagaagcggcacgacctcgccgccgtcctcgccggcgccggcatcgtcccctccgacgacgagagctactccctcggcagcatccgcgacgccatcgccgccgccacgggcgcggtgcccaacctcgagtgcaaccgcgacgccgccggcgagacgcagctgttccaggtgtaccagtgcgtcgaccgctccgggaagaagctcgtcgactgccaactcccgatgcagggcaagtgccgcgacaaggtcaagctgcccacgttctagctagctagctcccccgtcgccatcgtcgccggcgagagctcgccgtcgccggcatggcggcgcgccggcggctggctggtcttggatgtctgatggatgtcacgtgcgtttgcgttgttgcgtggtgcggttttcagattacgagagattcgaggatttgtccagttggattgctacatgtgtacgttacatttggcactatctgctgacttgctgaacagttgaataataacatatcaagttttaccagttgaaaaaaaaaaa

SEQ ID NO: 3258 - DNA, 661 bp, Oryza sativa
  Clone ID: PAT_MRT4530_47125C.1
attcggctcgagcatttggtgagaacatggtgatgtctgagctagtggagtgctgcaaggagttggatgaagtgcatcatgctttggccgggcataagaaggaggcagcatggcggttaagcagggtggagctgcagttggagtctgagaaggccgggcgaaggagggagaagatggaggaaatcgaagcgaaaatcaaagctctgagggaggagcaaacggctgcattggatagaattgaagcagaatatagggagcagttggcagggctgagaagagatgctgaaagcaaggagcaaaagttggctgaacaatgggctgcaaaacacttgcgacttactaagtttctagaacaggtagggtgcagatcaaggctcactgaaccaaatggaagatagagtgacatcaatcattcacaaattgggaaaatctagtttgcttttacttattattatgtcttgaatttatatgatatgaactttatagtcatagtagttttgttcctgtcatttttctaaaatatgttgttacatatggttattgatatcatccctatcttttcatacaacttgaggacttgcattagcggttgagttatgtttaaatataacatcctttatgaaaaaaaaaaaaaaaggacaggccgccaaatagtgagctc

SEQ ID NO: 3259 - DNA, 1251 bp, Oryza sativa
  Clone ID: PAT_MRT4530_47568C.1
tttttttttttttgtttttcgattcatcgtttttctctcagttagtaccacgattcttcaacgactcaagttccaacaaatgcaagaacctcgcgggcattacagacgaaaaaaaccccgtaaaaacttcatccatatgcacccaccatcaataagtccaaccaaaacgaaacctaagagcttacgcaatctttatctcttctagttcctgctggttaaagcgaccatccttcttgtgtttttttttcaagaaaatcatcgaaaggatgatacttttatatagaacacaggtaacgaattacagagcaactaatccccctgtccatcatacacaagtgcaccttcttagttttagcatcggtacaagcacaattaagcatctaattcagatcctactagagatcaacgcaacacctaggcatcctagaacactactactactacacaacatatcatccatccatccactgcatccacatccaccgccgccgccatcgccgggaagcgtcagaatctagttgtcatcgtcgccggccgccgccttggcgctgccgccggccttcttggggaggagcaggttgtggatgttgggcatgacgcctccgctggcgattgtgaccgtgccgagcaggcgggatagctcctcgtcgttgcggacggcgagctggatgtggcggggcactatgcgggtcttcttgttgtccctcgccgcgttcccggcgagctcaagaacctcagcggcgaggtactcgaggacggcggcgaggtagaccggggcgccggcgccgaccctctcggcgtacttgccggccttcaagaaccgggcgatcctgcccacggggaactggagcccggccttggagctccgcgacatggccttcttggcggcgcccgagccgatcgccttccctctcccggccatggctaaaccaaaccaaatcaaccaaccaaaccctccggtagtagtacggaatccgcgggcgaggcgacgaagcaacagcagcagaaaaatctgtggagaaagtgcggcgacgcagcgagcgagcgagcgagcaatcagtatgtgggctgatccgggccgggtcccccctccaccccgttgattcccctgtcgtgtggagcggggcagtgttcttggttcaggcagtggcgttgttgttagtggtggtgatgatgataaggtggagtagcatttgagaggagagcatgcgagtgagtgagtgcgaccccacgcgtccgcccacgcgtccg

SEQ ID NO: 3260 - DNA, 329 bp, Oryza sativa
  Clone ID: PAT_MRT4530_47854C.1
ttgttgtttttttttttttttttttttttttttttttttttttttgaccataacaataaacaccaataaaaaggcaaacagaaaaacaggaagtgccaccaagcagttcaagaggctcccccacccccaaccaggcctggttccacagacccccacctgtttttgtacgagtagcttaaaggggagactgtaaaaccattgttagcaaccttacatacgggggagccccaaatttcccggcaacaattacagccccataggggtcattacacagtagcaaaggacttgcttcaagcttttagggcacataaaggcgggtttactggccc

SEQ ID NO: 3261 - DNA, 2910 bp, Oryza sativa
  Clone ID: PAT_MRT4530_47879C.1
cggcacgaggacttgtgctgtctatttgtcaaaaatgtacactatacaatgtaaataggaaatttaagaggtttggagatcttgtgttgcctggcatcatcctgccatataaatactagattcttgtgaagcagcaaattatcacgacctgtggatctcacccatatatgtgaaaataggaattggtgtatttgtatctgactctgggggataactaggtgttgatatatgtcatctagcaagaggttcaagctggacctccatcacaccagaaggacttgattctgaattcctgtctgtactgtcaggatgcaaaagatcaactgaatcgtcttcctcggtgttacctaacacccagtgccctctagagcttgtgtcgccgctcctccgtttgacctctttatactccaagtaaagtgttataactatagcagaaagcacccacagcatcaaggcccaagtgagctcctctacattctcgctatcatacctatggcctaaatgcttcattccagtgaaaagtgccacaattccgactatgattgccgacctgcctgtgataacatgaaggtattcccagaggacacgattccaggatgaagcctccccattagctggtctcttgggccggaagtaggcatttagtggctgaagacctgccaacagcagagccgtgacaccaaatttaacatgcactgagctgacataaaaacctctgagttcagctgcagcgaaaaggacaccaaggaacattatagcaattcctgagtattgcagatagacatgtatttggtaccacccgtcacctttcaagttcttcaaataccgggcagccagtattccaccaggaagcaagatgccccaggcaacaaacatcataaacccatgaacagccagaacaggacgcaagtcctgttctgcctcagcagaacctctcaacaaaagcacacgtatggggcgactgcttgtgatagaatgcatgttactatctgtaagactgttacctgaccagcttgcacccatagcccaaacgaccttaaggggcgtggttggatcaataatgttcttacactctacccttccactacaggaaggcctaagaggacgagtaaactcaaatgtaataatgccattttctgacctacacctgacgtaggttaagttctcagatgttgggtggatgcccgctgcactctttccatcaatccagtaactcttgactcgcccaactccatcattgccaacccagccaacataagcataactgttcagcatgccactcccgaacccaacagcaaggtacccacttttcttctcacctcgagctgctatagatatagaatcatgggacagagtccagaacagagtaacctgctgatcatccaaaaggacgctgctattatacatgtcactaaggcctccatcaacaacttgaactttccaacccatcttcggttcatacaatgactggtagtagactagatcaggtgtattccgatcaggcagccaaagcagctctgtaggagttgctggtacaccatgagcatcccggctgccagcatatatgacctctgttttattccgcagtgtagcattccccccaattggatccgacgtgatgtaaagtgcaacatcatgcccagcctgcactgagaacttcactggcacacctctctcaaccttcagcagaggagcctccttcttgttgatgtaaatcaccttgtcagggtttggtgggtttgggtagcggacggctggagcagatgtcaccaccaggggtgtctttgcatccgcgatgatcctctcctgatcctccttgttgtcagcatccaatggtccgttgcagctgtccaccgtttccgacaaattcacccttgcaaacccataggttgtgtccctcggccccccatggttctgcgggaggtagtgtggcctcagagtatccggcggccgcagcttcccaatggcccagacaaccgccatctcctccgtggcactcaccagcacatcatacttggtatccccagtgtcaagcttcctctgatacctcacgaaagacactccatcccgccggtgaccgtacaccagcaatgaatcattcttcccctcatcataaaccttgtcagggcacacaccagataccggcgattcatcggtccccagcgtgcactcgctgtagtcggttatgtagtagtcctcggcgaatggcataccttcctcggtgaatccggcgacggcaacatcggaatggatcatggcgggagaattggccttgggatcagcccacccgaacgccatgtagtactcggagcccacggcggcctcgaggccgatctcgactgtgccggcggaggcattgagcgtccaacggagacggtacttgttctcggcgagagggaggcagttgtcgaacatggtgggaacaggctccggcgacggcgagggcgaggcgacgccggaatcatcggtggcgttggaggcggaggcggaggcggagacggggaggaagacgtggccgaggtcggaggaagtgtcggggtcgaagagcgcgaggaggggcgggagcggggcggagaaggggagcaggagggtggcgttgcggaaggtggagttgagcgggtggggcgagaaggcgcggcccgcggcgaggtcggcgagggagtccccccgcgccgcccagaagcgcgcggagggggaggccgcgaggaggtcgaagcgggtgaggcgcagcgcgcaggagtcgtcgtcggcgaggcggaccgtgccgcggagctggtgctgcagcatggtgaagtccgcggcgaagggcgcggtgtggttggcgtgcgggcacacggcggccgacgacgacgccaccagggccccgatcgcgaccgcgagtacggcgaggcggagggcggcggcggccat

SEQ ID NO: 3262 - DNA, 1041 bp, Oryza sativa
  Clone ID: PAT_MRT4530_48062C.1
gtcgacccacgcgtccgtccccttctccttctctttcccctcggcggcggcggcggcttctcccttctcttctctctctcgcatcgcctactcgttcgttttccctcgaggaggagcagaggcggcggcggcggcggcggagcggacatggctgaggtggaggcagcgccgattgcggcggcggagaccccggaggtggcggcggcggagggagcggcggcggcgaaggcgccgcacaagctgcataggcagtgggcgttctggtacgacatccagtccaagcccaagcccggcgccgcgtgggggacctcgctccgcaaggcctacaccttcgacaccgtcgaggagttctggggcttgtatgatcagattttccgtccaagcaaggtgacagtaaatgctgattttcatttattcaaggctggtgtagaaccaaagtgggaagacccagagtgtgcaaatgggggcaaatggactgtgccatgtagcaggaagaccacccttgagaacatgtggcttgaaacgctgatggctctgattggagagcagtttgatgaaagtgaggaaatttgtggagttgttgctagtgtccgccagagaggagacaagcttgcattgtggactaggactgccagcaatgaagccgttcaggtaaacattggcaagaaatggaaggagattgttgactacaatgataagatggtctacagcttccatgatgacgccaagagggagaaaccaagcagaggtggacggtacaacgtgtaagtcaccgcaaaacgttgcagcttggatagtggccatcgagtggtgtgccgataccggcgcctgttctttacagcctcagctagtgttgttgtccgaggcaatttttccgacctattgtgttgctttcctctctgatagcttatggtaaaagatacaaagatgttgaggagtttgtacgccacttaattttgctcgtaacatacattgacaatcaagaggagccatggcattgcgatctgcttaaaaaaaaaaaaaaaaaaaaaaaaaaaaaaa

SEQ ID NO: 3263 - DNA, 965 bp, Oryza sativa
  unsure (1)..(965): unsure at all n locations
  Clone ID: PAT_MRT4530_48097C.1
cccaagcgtccgcagaaactaccatcaataacaggactcctgcacttcatacatggccactgccagctctataaacaagaggtttagcctcgccggtgccacggcgcttgtcaccggtggcagcaaaggcatcggccgcgccatcgtggaagagctggcgagcttcggcgcgacggtgcacacctgcgctcggaaccaggcggagctgagcagatgccaggaggagtggacggccaagggcctcgccgtcaccgtctccgtctgcgacgtggcggtgcgcgccgacagggaggcgctcgccggcagggtgtccgccatgttcgacggcaagctcagcatcctggtgaacaacgctgggacggcgtacctgaagccggcggcggacctgacgccggaggagacgtcgaggttgatgacgaccaacttcgagtcgtgcttccacctgagccagctgttctaccctctcctcaaggactccggaagaggcagtatcgttaatatctcgtccgtcgcttctgtcctcgcgttccattctcttcctatctactcggctgccaaaggagcaatgaaccaagtcacaaggaacctggcttgtgagtgggcgagcgatgggatcagagtcaattccgttgcaccgggctacatccaggcgcctctcctggctgccttcgtggccggcaacgatttcgcacaggttgagttcaaccgtcttcctttgggccgtctcggtaaacctgaggacatctcgtcgttggtggcgttcctgtgcatgcctgcggcctcctacatcactggccagattatatgcgtcgatgggggccgtttgccggccgtcaccttgaagtattcaaaacagccccaaacgaggncgacaaagattacttgcacaaaccttgtagatggcataaaaatcgagccggtacggatgaaacctattgggagggcttcaactggagaccacaaag

SEQ ID NO: 3264 - DNA, 833 bp, Oryza sativa
  Clone ID: PAT_MRT4530_48394C.1
cagtctgttcctcgtttcttcaaccactcaagtgccaaacacagcaagatcatcgccgggattacatctgagataaatagccaaaaatttcaccatattcacagccatcaatcaggccaccaaaacaaaccaagaactaagcaatttttttcttgtttcttcctactgcttaacgcaacaacacaccttggtccaaaataaacagctaaatatcctactagtgcataagacaagatgacgaatgcaggcggcggcggcggcggaggaggaggaagggggctcagttgtcgtcgtcgtcggcgtgggacgccttggatgacccggccttcttggggaggaggtgctggtggatgttgggcatgacgccgccgctggcgatggtggcgccgccgagcagcttggtgagctcctcgtcgttgcgcaccgcgagctggatgtggcgcggcacaatgcgggtcttcttgttgtccctcgccgcgttcccggcgagctccagcacctcggcggcgaggtactcgaggacggcggcgaggtagacgggagcgccggcgccgacgcgctcggcgtacttgccggccttgaggaacctggcgatcctcccgacggggaactgcagcccggccttggagctcctcgacgtcgccttcttcgcggccccggcgccgatcgccttcccgcgtcccgccatatcactcgccgacgagaggagaggagaggcgcacgcgctacacaaggaagaagaagaagaagccggcggcgagaaggggcagcggcagcggcggcggcgctaggtcaagaggcggcggcggcgtggattcgcgcccacgcgtccg

SEQ ID NO: 3265 - DNA, 590 bp, Oryza sativa
  Clone ID: PAT_MRT4530_49221C.1
cgccagcatggactcggccgggttcttcaccttcgtggtcgcgaggcgcaaggaggtggacgcgctccgcgccgagctccccgacgcgctcaagcgctgcgtcgatccggcgaggttcgccatggacgcggtctccgaggtgttccccatcgacaagcgggcggtgaggtcccccaccgacctggcgtgggcgtgcgtgctcatcctggaggcggtggtgccgtcgctggccgatccggacccggagatcggggcggcgcgccccatggtgccgcaggcggcgcgcgagagggcgcgcgggatggcgagggagtggaaggacgcggccgagaagaagggcggggtggagggcgccaagccaccggatgcgcacgcgttcctgcagcacgtcgcgacattcgcagtcgcagagaaggaggacaaggagctctacaggaggatcgtcgtgagcttctcgtggcggaggcagatgccgcgtctcgctatcacactcggcctcgaggatgagatggatgatatcattgaagagcttatcactaaggggcagcaacttgatgctgtgaactttgcatatgaggctggtcttcagg

SEQ ID NO: 3266 - DNA, 1133 bp, Oryza sativa
  unsure (1)..(1133): unsure at all n locations
  Clone ID: PAT_MRT4530_49446C.1
attcggctcgagcatgcagaagagatcggcgcgnnncatnngcctcnatcatttcaaaggagnccgaaggcactctcctgggcatgggtaaccctctcctcgacatctccgccgtcgtcgatgaagacttcttaaaaaaatatgatatcacctcgaacaatgcgattcttgcggaggacaagcacaagcctatgtatcaagaattggctgagaaatataatgtggagtacattgctggaggtgccactcagaattcaatcaaggttgctcaatggatgctccaagttcctggtgcaacaagttacatgggtggcataggaaaggataagtttggggaagagatgaagaagaactcaaagcttgctggtgtaaatgttcactattatgaagatgaaactacacctactggaacttgtgctgtttgtatagttggtggtgaaaggtctcttgtggcgaacttagcagctgccaattgctacaagtctgatcatttgaagagaccagaaaattgggcactagttgaaaaggccaagtatatttatattgccggctttttcctcactgtatcaccagattccatccagttagttgctgagcattctgctgcaaataacaagatcttctcaatgaacctttctgctccttttatctgtgagtttttcagggatgtacaggagaaagctctaccgtatacggactttgttttcggaaatgagactgaagcaagaacattttctaaagttcatggctgggagactgataatgtcgaggagatagctgtaaagatttcccaatggccaaaggcatcaggaacacacaaaaggataacagttatcacacagggtgcggatcctatttgtgttgctgaggatgggaaggtgaaaaagttccctgtgaaacttttgcctaaagagaaactagttgatacaaatggagcaggagatgcatttgttggaggatttctttctcaattggttcaggagaagcccattgaagaatgtgtgagagctggctgttatgcagcaanatgttatcatccaaaaggtctggcgtgtacggtacccagaagaacgcctgattttctattgaggtgtttctcctcggtgtcgtgttccccattatagaaagttttg

SEQ ID NO: 3267 - DNA, 296 bp, Oryza sativa
  Clone ID: PAT_MRT4530_49943C.1
cggcacgaggggtcacgtggagaaacaaaatctgtggctggtgattcttcaacgcataacactgtcgagggtgagagaaagaaatcagcagctgcaaagtatccaggtgattcacagcagcattcactttccttctccaggcaagataacaagtcttatgtgcctcctttccttagtggaagcactaatgatagctcatcccgcaccttgagcctggttgggtcagaagcttcaaatggcttcagtctaggaggcaaatcaggaaatacatcggccccggcagctacatcagcggc

SEQ ID NO: 3268 - DNA, 1607 bp, Oryza sativa
  Clone ID: PAT_MRT4530_49986C.1
ctagaagccattcatctccagaaggtaagttcgcctcttcatcagcgccttcacagcaaacttgaatggtccatcaaatgctccggagacaaatgcatccgtttccttgcggctagtatgaccgccattgcttccctcgggtgagggcttgatagcgaccaacgttgcaccttgcaacgcaatgccgccaggaagctcaagatatggagcgtatttgagcttcatgttgcatgctggaacctgagtcctgttagaacatgctgaggccgacaactggttctccctaaattccttaagctgctccgctcccatggacaatgtgccctggccatcagcatcggtcagtaccaagcttgtaagagtgggatgatccttgataattgaccgaagaagataatgtctcgttgatgccgcaatcagagagctgattgtccacacgacgcggagtttcaaccctccattggtatagaaggattccggcatgcttccattgtcctccgaatacagctcatgctctgcaccaacaggcttgcggtcgacctgagtacccccaagaatcacacaattctgaagcgtactcccatactccgctcgccatttcaggagaactccctcctcagtccccacatcccccgagggcagctccacccgcagattccggatgtgcgtgaagttccggagcacctgcgccggcgagtgctgcgcgagctgcgggaacagcggccgcccagcaccgttcgggccgcgcatgctgtggaacggcttgatgatcgtgaacagcatcatcttgaggaaatgcgagaggatgttcctcggcttcggcgaggacaggttaagcgcgtcctcagcttcgccgtcgaccgtcacgacgcggtcgatcttgacatagacatcatggacgaggggcacgagcccgtagaaccgcttcgacacggcggagcaccggccgagcgagcgcacatcctcgacattgttgaggatcaccagcacaagcgagtccggcagccggtcgaattggtcggcctccagcaccgggtcggcatggattcgagccattggaaaccgcccgaaatggagaaatggccctaaccccccccccccccccctcccccccgcgcgaggttgcagagaaatggagcactaatctttgcaacagaaatgccacgaacagaagctgctgctcctcctcgaccttgtcctctccgaatggctcacgcaaccatctcagacaccgcgccaccaccaaatcaaccgcgagggccaacctttcgccgcccacacgcgtccggatccgacgccgacgagcaaccgtacggtaccgaaatcgcgaaatcgggagaagggtcgcgccgttttctcaccggaatcgagagtccccccctccacgcgcagctcctctccgaccagccggagatgccgaaagagcttcgatcttggaggccggtgggggcgaatcggacgggattagggtttagggagaggggaattggggatgagatgttcttgttcttgcctctccttttctttcgttttcgcgaagaagaagaagagagtttctctgggcgaagtgcttctcttcctcgtggccgattcctgcagcccgggga

SEQ ID NO: 3269 - DNA, 559 bp, Oryza sativa
  Clone ID: PAT_MRT4530_50367C.1
gcacgagggcatgtcacagagacagaacagattagtgaaatgatgaggcctccagcagcaaggggtgaaagaaagcggaaagtaatggccagtgtcgatacacatgatcatggaaacactgagttgcctgacagcaatgagaatgctgatgaatcactcaggtcaccagagaatggtgagaggctagccagtggatcaggctgtgttgattctaatggtgatgttgaaaaaaagaagatgccattggcaagttgcagctctggatccaaaaagcagaaaagaagggttgaagctacaagcccggccgaacatggtgaggacgcgccatctgctccaaagttggtggagaacagcagtagctcaaagaagaaaggtaaaaagaagccagctgctccagaggctgtcacggatgcagttgttgtagatgaaccagctcctgtcttgccagaagtaaatgtggtagtggtagaacctgagaaaccaaagaaaaaatatgtaccaatcacaccaactatccacactgggttttcattctctattgtgcatcttctaactgctg

SEQ ID NO: 3270 - DNA, 2086 bp, Oryza sativa
  Clone ID: PAT_MRT4530_50542C.1
gcacaagcgacgagattttcgcccccgcttcggattaaaaccctagccggctaaacctgctccgctcccccccgccgccgccggcgccgccgccaccaccactgccggagagagagagagctgcctgggaggagcagcctcggtgcgcgcgcgcgcgctaatcccctcctccactctccgtcgccgccgccgccgcagccatgatctgcgcaatctccggcgaggtgccggatgagccggtggtgtcgaagaagtccgggcttctcttcgagcggcggctcgtcgagcgctacatcgaggaccatgggaagtgcccagtcaccaaggaggagctcaccatggacgacatcgtggcggtgaagaccaacaaggttgtgaagcccagacaattgcaggctgcaagcattcccggactcctggggatgttccaaaatgagtgggatgctatcatgctttctagttttgctttggagcagcagcttcatacagcaagacaagaacttagtcatgcgctatatcagcatgatgctgcctgccgtgttatagctagattaaagaaagaacgagatgaagccagagcacttttggctcaagctgagagacagattcctgcatcgatggcaggagctgcacctacagctgttgtctccaacgggaaaagagcatttgaagatgaagttggaccagacgggaagaagattcgtcctggtatcaaccctgtgatgattgatgaactaacagagtgtaataccatgctctctgcgcatcgtaagaaacgacaggttcctccaactttggcatcaattgatgcaattgagagatatacccagatctccagtcatccacttcacaagacaaacaaaccaggcatcttatctatggatattcatccttcaaaggacattattgcaactggtggcattgatacaaacgcagtgctttttgacaggccatccggtcaaatcttgtgcacacttactggtcactcaaagaagataaccagtttgaaatttgttcctcgggatgagctctttgtaactggatcagcagataagactgttaaaatttggcaaggaagcgaggagggaaattacaattgcatccatacattgaaagatcacactgccgaggttgaagctgttacagtccatgcgactcagaagtactttgtgactgcttccaaggataatacttggtgcttctacgatattccatcaggatcttgcctcacacaggttggcgagtcttcaggacaagagggatatacatctgcatctttccacccagatggtcttatcctggggacagggaccactgaagctgttgtcaaaatttgggatgtgaagacgcagtcaaatgttgcaaagtttgaggggcatgttggaccagtgactgctatgtccttctctgaaaatggttacttccttgcgactgctgctctcgatggagtcaagctttgggatcttcgaaaattaagaaactttaggacgatatcaccttatgactcagacacgccaacaaattctgtggaatttgactttagcggaagttatctagctgttggtggttcagatacaagggtttaccaagtagcaaatgttaagcttgaatggaatcttgtcaagaccttaccagatttgtcaggcacagggaaagtgacaaacgtcaagtttggcaccgatgcgaagtacattgccgtaggttctatggatcgtaacctacggatatttgggcatccgggagaagatgatcaaatggacgacgcaaagccatcggaagagtgatgaaaccaattgtacttcatttggcctgcgtaaattgctccctgtttgtgtgttttgacggtggatgagctggctgagattggaggcacataacaacgggagacgagaagttccttgcaggagcaatttggtgggctttggtcgatgtaaacaaatttgacattgttattgtatttgtaggccttactacctaatgaggatacggtttgttttggagatgaatacaatgctgaagtgctcgacttgcggacatgccaatgaaatctagaatgtgtttaaatttgtggttacgtaatgtcccc

SEQ ID NO: 3271 - DNA, 341 bp, Oryza sativa
  Clone ID: PAT_MRT4530_5060C.1
gtgttgcgggcatgggcatgggagaggttgcagaggacatatacacctaagatgggaccgtggacctaaagggcggcccgggcaccaggatgaacaccggcacctggcatgcctgccgctacattctatgtaacgagtgctgcaagaggctgggctactatggcatgagcaccaacctggtgatctacatgaagacgcgggtcggtcaggagagcgccattgtcgacaacaatgtcaccaactggtcggtgactagatacatgactcgccttgacagtgccttgttggctgatgcctacatgggcaggttatggaccattgccagctctatgagcatctac

SEQ ID NO: 3272 - DNA, 1503 bp, Oryza sativa
  Clone ID: PAT_MRT4530_50714C.1
gtggatccccgggctgaggaatcggcagaggcgtcgctttctaattttttcttttctcccaccctctctctctctccggtctccactccctccgctcctccgctcctcgcctcttttacccgctcttccccccgatctccccggactcccacagccgcagcgaacaaatcccgcgcgggttgggaagagcgagctcgtgaggagagcagagggaaagcgcgagggggaaggaggaggaaaggtgcacaaggtcagactaagtttgcgttgaagaacaaaggagaggaaaaatgtcgcctgctgaggcatcgcgtgaggagaatgtgtacatggcaaagcttgccgagcaggctgagcgttacgaggaaatggtcgaattcatggagaaggtggcaaagaccactgatgttggtgagctcaccgttgaggagcggaacctgctttctgtggcttacaagaacgtgattggtgctcggagggcatcgtggaggatcatctcttctattgagcagaaggaggagagccgtgggaatgaggcatatgttgcatcaattaaggagtaccgtagcaggattgaaactgagctcagcaagatctgtgatggtatccttaagcttctggattcccaccttgtcccatctgccactgctgcagagtccaaggtgttctacctgaaaatgaagggtgactaccacaggtaccttgctgagtttaagtcaggagctgagaggaaggaagcagctgagaacactcttgtggcatacaagtctgcccaggatattgcactcgctgacctgcctacaactcacccgataaggcttggacttgcactgaacttctcagtgttctactatgagatactgaactcaccagaccgtgcttgcaaccttgcaaagcaggcgttcgacgatgctattgctgaactggacactcttggcgaggagtcttacaaggacagcaccttgatcatgcaacttcttcgtgacaatctgactctctggacctctgacaatgcggaggatggtggtgacgagatcaaggaagcagcgaagcctgaaggagagggccactaatctgtcctgaagtctatttctgagtccatttactcagctacctgctgtattactggatcataagatgtactaggatcaattgctatgtggaatcataagattagggctgcgtatgtcaaaatgtgtcgagctgaagtacccagtggacacagtttatgtgcactacattgcttccgtgacttatttactagttaattagcaactttcaaccacttcctgtatttgcagcacattattagtatcgctgtattagcgttttccatgggctggttatgattgagaatacaggccaggcattgcatgtcctttatttgtaagctcgatgtggacacgttggaattcgtgcttttcttattgtcatgagagttgagatgatgtttggattggcggcatcctgtccgtccaagggtcaatgttatttttgaaggtt

SEQ ID NO: 3273 - DNA, 1623 bp, Oryza sativa
  Clone ID: PAT_MRT4530_50741C.1
cccttgccgtccagattttcgctcacctgttcccctcctccgccctctccccaactcgccattttccccgtcttccacagtgacaaccaccaccccacgctttccccttcctcctcgcgatccagcagcgggagagatggatcggccgccgccggatcagcagcggcagaagcaggcgccgctcttctcgccgtaccagatgccccgcttccgcctcaaccaccgggtggtgctggcgccgatgacgcggtgcagggcgatcggcggggtgcccggcccggcgctggcggagtactacgcgcagcggaccacccagggtggcctgctcatctccgagggcaccgtcgtctcgcccgctggcccggggtttcctcatgtccctgggatatacaatcaagagcagactgatgcatggaagaaggtggtggatgctgttcatgccaagggaggcatctttttctgccagttatggcatgtaggcagagcttctcaccaagtataccagccaaacggtgctgcaccaatatcctcaactgataagccaatatcagcaagatggagaatactgatgcctgatggctcctatggcaagtatcctaaacctaggcgcctggcagcatcggaaatacctgaaattgtcgaacaatatcgtcaagccgccattaatgccattgaagcaggttttgatggcattgagatccatggtgctcatggctatatcattgatcaattcctaaaggatggaatcaatgaccgcactgacgagtatggtggctcactttccaaccgctgccggttcctacttgaggtaactagggctgtggtttctgccattggagcagaccgagtcgcggtgaggatatcaccagccattgatcaccttgacgcctatgattcagaccccattaagctcggcatggccgttgttgagcggctgaatgctctccagcagcagtcagggcggctcgcctacctccacgtcacgcagccacggtacaccgcctacgggcagaccgagtctgggcagcatggcagtgccgaggaggagagccgcctgatgcgcaccctccggggcacgtaccagggcacattcatgtgcagtggcggctacacgcgggagcttgggttggaagcagtggagagcggcgatgccgacctggtgtcgtacgggcggctcttcatatcaaacccggacctggtcgagcggttcaggctgaacgccgggctgaacaagtacgtgcgtaagacattctacacgcccgatcctgtcgtgggttacacggactatccgttcctcggacagcctaagtcgcggatgtaaatgtactgcgggataagtaaatcaaggatacgattgtgtattgtaaggaaaataaagggcaacggtgaggtgatttagcttatttttgggacctaatttgacggtaatttattctttcaccaaatctgatatgatccattgctgattcagtagctactctagcctatgtaaaccttgggtcatcagcacagattgtatctatatgtgtattgcataatgtttcatatcagttgtctagcagatttatgcatcgtaccagttagtaactgttattttgatgggaaaaaaaaaaaaaaaaaaaa

SEQ ID NO: 3274 - DNA, 2021 bp, Oryza sativa
  Clone ID: PAT_MRT4530_50815C.1
cccacgcgtccgcccacgcgtccggtagcaaaagaaccgactcatctttttcctctcacttcctccgtttacttcacaatctttagattgtttaactacaaatgatcaccaacagaattcaatccgcagctaccttttgttttcctttctagtttctacccatacgataccaactcggttcttttgctacctcttaatctgtttacagagcaatctataatgcataattaactacaaataaacaaccaatggaataaatcagcacctacaacctcacacaatgtcacagctcttcttccattgctgcccacgcgtccgttcgttcgctgattcgctctcgtccccttccctctcctctctcgctcgctcctcttccgcggcgcgcgcgccggcgactcgccgcgtcgggccggccgacaaccgccgcgagggagaagccccctccccttggggggcacccatgacgtcgtgcgggtgcctggtgctcgagaaggtggaggaccacggcggcgaggcggcggggagggggagagggaggctcgcgcagggtggcggcggcggcggcggtggctgcggatcgtgcgcgggggagtggaggagccggtcggagaccatgttccccatctacgtgatggggagctcgcgggccagctccgccgcggcggcgcggggcatagtcgacgccgccggggaccccatatgggaggccgtcaagtcggaggccaagtctgaggcagagaaggaacctattttaagtagcttcttgtacgccagcgtactatctcatgactgtctcgagagggcgttgagtttcgtccttgcaaacaggctcgaagatccaacattgcttgcaactcagttaatagacattttcaatgatgttatgatgaacaacaaagatatacgccgttctattcgccttgatgctcaggcctttaaagacagagatcctgcctgtgcacaatacagttgggcattgttgtacctcaagggttaccattccgtgcaatcctataggatagctcatgtattatggaatcaaggtcgtaaagttctggcattggcactgcagagccgtatcagtgaggtttttgcagtggatatacacccagcggccagaattggagagggaatattgttggatcatggaacgggtctagttattggtgaaactgccattgttggaaactgggtttcattaatgcagggtgttacacttggtggtactggcaaggaaaatggagatagacaccccaagattggtcagggggctcttcttggagctggtgctactatcctcggcaacataaacgtaggcgaaggtgccatgattgctgctggttcccttgttttaaaggatgtacctccccacagtatggcagtaggaaaccctgcaaaggtagttgggtataaagataaggaagacccttctttaactatgaaacatgatgccagaagagattattttgagcatgttgccgttagtttttcagatgacaaagctaatggaagtgttgtgaagtaaaaaaaggttcgatgatgtttggctggcagttcaaaggaatagcatatgtttcgacatttcttcccagaggacagcactgggtatctgattatgcaagggtgcttctcttttttgcccaggtacccatggtcctgaagctccccagttatattttctcgtggcctttggaccgctgtaataatgtgatgtttatttttctggttactttgtaaggactatgtactggtagtggagaccagtacatagttgctactggtagtagagaccagcagcaactatgtacttcagaatacaagctttcttttttgaatcccagtagcatcagcgtagtgcttaagacttagtgcaagctttcttttctgaatcagtagcgtgaagtatattctacagtactagcctattaggtaaagatgtttttcttttgatgtactaacccatcagaaaaaaaatgttacatctggatgggataataaaaaaggaggcaattgttaaattc

SEQ ID NO: 3275 - DNA, 404 bp, Oryza sativa
  Clone ID: PAT_MRT4530_5101C.1
cccacgcgtccggcatcaagctgtcgcttacactacatactatgtcacagaagaggagaaggaaggggttgccaaaaagctcgatgaagctaaagcctgggtgaaaccatggatggtcttcaaggagctgcatgagttcacgcctgccaatgcctgtgcaaatgcctaaggcccatgtggtttactatgtgtatcaagttatcaagaagatggggaataatttggtgtggatcttgctattggacatgataattatccacatggtaatatgggttggatatcaggatctcacacgataatttgggctggatatatagctaccaaagacattacctatggcgtatttcaacgtggattagtactaagcaagaatgattgcctggtgtatttactacaaatattgc

SEQ ID NO: 3276 - DNA, 376 bp, Oryza sativa
  Clone ID: PAT_MRT4530_51172C.1
atagagggcagagacacctatgatacgtcattatatcacgtttcaagcataaacaggtcacggcaatattatagaccttcaagcgctcgctacatgcgaatgacaaacactacagcgtagcagaacacccatcctgcatgtggatatactactttgttggatatctggacaggagtgctcagatcaaactgcgttacggctgttgagaccttatggcatatgacttgcatggcaatgaacaaggaacgcaatcgagtgcgtgtgatccagaaatggttgccactgtttgcaaaggctcatctgagcagctgcagtggcagcatttttagaccagatagctattctttgctgttcgccacccagactaacaactggt

SEQ ID NO: 3277 - DNA, 775 bp, Oryza sativa
  Clone ID: PAT_MRT4530_513C.1
cacgcgtccgtgagcctcgaagaaataatcccccggtagggagcatatcgctcctccgctgctgtctcgcgcgagcgtccgccgcctcgtctcggtgaagaatcgccgcctcccaccctctgcgagcgccgccgccctccccaactccggcgacgactattcccaagggtgcagtggaagtgtaaacagtttctgtggaaggacagaaaaggcattcatttgctaaatggcatcaaagcttcaagccttttggaaccatcctgctggccctaaaactattcatttctgggctccaacatttaaatggggtatcagtattgccaatgttgcggactttgctaagcctcctgaaaagatatcctatcctcagcaagtcgctgtggcttgcactggagtcatttggtctcgctacagtatggttatcacaccgaaaaactggaatcttttcagcgttaatgttgcaatggctggtacaggcttgtatcagctttctcgtaaaataaggaaagattacttttctgatgagaaggatgctgctgcatcactggaaggataatgacgacagattagattaaccgacctacagcctttgagccagtctcagttcactctggagtctggacgtactgcagatatctctggctttacccaagacaagaacctgttgtttctttctgtatttcttctacacccactgctggagcagttgaaaatattgtccccaaaatccaaataatgcttttttgcattttgtgaaaataatatgcatatactc

SEQ ID NO: 3278 - DNA, 2494 bp, Oryza sativa
  Clone ID: PAT_MRT4530_51503C.1
cggacgcgtggggaaaaaaaaagagaggccacgaagagagctcagctgctgcctctagcttacttggtgataaggaggaggaggaggaggagggcaccgacatggccgcagccacggcgtacaccgtggcgctcctcggcgccaccggcgcgcgcgtccccgccgctccacgctccgccgcgcttctgccgcgccgcggcggcgtgctccaaccgctgcgcctccaggacgcgccgcgactgtccctgctgcacgagccagctgaaaaaaaaagagaggccacgaagagagctcagctgctgcctctagcttgcttggtggtaactaggacactgacgaggacagcaacggcctgcccctctctttccctcgccattaagttttctcgtccggcggcgtcacccctgcgaattaactaactagctaggccggccatggagacggtggccgcggccagctacacccgcggggcggcgacgcgctcgccagcgtgctgcgccgccatgtccttctcgcagtcctacaggcccaaggccgctagaccgccgagcacgttctacggcgagtcgctgcgggttaacacggcgaggtcgctgccgtctgggaggcagtccaaggcggcgagccgggcggcgctcagcacccggtgcgagatcggggacagcctggaggagttcctgaccaaggcgacgccggataagaacctcatcaggctgctcatctgcatgggggaggcgatgaggacgatctcgttcaaggtcaggacggcgtcgtgcggcggcaccgcctgcgtcaactccttcggtgacgagcagctcgccgtcgatatgctcgccgacaagctcctcttcgaggctctggaatactctcatgtctgcaagtatgcgtgctccgaggaagtcccggagctgcaagacatgggtggaccagtcgatggtggtttcagtgtagcattcgaccctcttgatgggtccagcattgtcgacacgaacttcacagttggaaccatatttggtgtctggcctggtgacaagctgacaggcgtcaccggtggagaccaagttgctgctgccatgggcatctatggccctcgcactacttacattatcgctctcaaagattgtcctggaactcatgaattccttcttcttgatgaaggaaaatggcagcatgtcaaggacaccacaaccattggagaggggaaaatgttctctcctggtaacctgagggctacatttgataatcctgaatatgacaagctcatcaactactatgtcaaggagaagtacacattgcgttacactggaggaatggttcctgatgtcaaccagatcatagttaaggagaagggcatcttcaccaacgtgacgtctccgacagccaaggccaagctgaggctcctgttcgaggtggcgccgttgggtttcttgatagagaaagccggcgggtacagcagcgacggcaaacagtcggtgctggacaaggtgatcaacaacctcgacgagcggactcaagtggcctacggttccaagaacgagatcatccggttcgaggagactctctacggctcgtcgaggctcaccgccggcgccaccgtgggcgccgccgcctaatcttttgctgcaacgcgagcccagtgtctctgcaggcctcaaaaacgctgaaactgcagtcgttttagactcccatcctgtaatgcagattgggttgtagttgaagtgggacttgaaactgcaaagttatactcctttttgcaaggtacccgtttttttccccttttggtgtaaacagttgcatataaaggtaaattcgcatttctgttttgccactaagcaacaaaaaaaaaaaaaaaaaaaaccgcgtcagggccgcctccgacgacacctccacctcggccagcggcgacgagctcgtcgccgacctcaaggcaaagtgggaggcgatcgaggacaagccgacgttcctcctctacagcggcggcgccgtcgtcgccctctggctcaccaccgtcgtcgtcggcgccatcaactccgtgccgctgctccccaagatcctggagctcgtcggcctcggctacaccggctggttcgtctaccgctacctcctcttcaaggagagcaggaaagagttggcgaccgacatcgagaccttgaagaagaagatcgctggaacggagtaattaagcagctgcatttgtccggggaagttttggggggtgactctctagagtgcttgctgctgcttcctctgtgtgatgtttgtatatctctacgagaatatgttctgctcccatgtgcagtaacagcgtagtgcaaaaactgtatcaaacctactatcagttgtttcttcgaaattcaaaacaatttcttcgctttcttgttgcgtggaagtgttcatataatctggcgtatgacaatgagaatatatatctcggagaatggttgatcgactcattagaaaagaattgcaaatgagttgatgataaacatctctg

SEQ ID NO: 3279 - DNA, 1071 bp, Oryza sativa
  Clone ID: PAT_MRT4530_51616C.1
atgtggaggctgaaggtggcccagggcggcggcgctttgttgcggtcgacgaacggcttcgccgggcgagcggtgtgggagttcgaccccgaccacggcacgccggaggaccgagccaacgtcgagagggtgcgccgcgacttcaccgaccaccgcctccgccgcccggagtccgccgatctcctcatgcgcatgcagtttgcaagagaaaacaatcaccaacgccgtggtgatcgtattccaccggccgtcaataagcttggcgagaaggagcaggtgactgaagaaactgtgatggcttccttgaggcgagctctcgatgagttctcctctctgcaagcagatgatggccactggcctggcgacctcagtggtgctatattcatcatgcctgtcttgatattttctttgtatgccactggatcactggacactgtcatatcatcagaacaccggagggagatatgtcgctacatctataaccatcagaacgaggacgggggatggggcatgctaatcttgggatcaagcacgatgtttgccacatgcttaaactatgtcaccctgagacttatcggcgaggagccaagcaatgagcaattagctagaggacacgcctggatcatatcacatggtggcgccacccttgttccgcaatggggaaagatatgtctgtcgtttatcattagaggcaaattctggggcccgacccgcgtggtgtacgtgccgatggcctatctgtacggcaagaagttcgtggggcccatcacgccaaccatactggcgctgcgagaggagatatacacggacccctaccacaccattgactgggcccaagcctgcaacgcatgctccaaggaggatttggtctgcccgcgcacgctgctgcagaatgtggtgtggacttcgctctacaagtgggtggagccggtgctaggcagcaggccgatgaacaagctgagggagagagctttggatagactcatggagcatatccattacgaagatgaaaactcacagtacctctgcctatgtcctgtcaacaagggcaagaagtggaggcagaggtag

SEQ ID NO: 3280 - DNA, 1238 bp, Oryza sativa
  Clone ID: PAT_MRT4530_51694C.1
tctgcttctccaattttccaagcctgcctccaagcgcacgccacgatcttctagaagcgattcgcgcgcgccgccgcctcctcccctccccttccccggagcgaagccgccccgccgggggggatgtcgccggcggcggacagcgcggcgtcgaagcggcaggcggagctgctcaagcaggagggcaacgccttcttcaagaaggaccgcatcagcgccgccatcgacgcctacaccggggccatagctctctgcccaaaggttgcagtatattggaccaaccgagcactttgctacaagaggcggaatgagtgggttagggctgaggaagattgtagaacagctattcagcttgacagccactctgttaaggcacattacatgctcgggcttgcacttctcaacaaggacgaattggccgagggaataaaagaactagagaagtcgttggagcttggaaggggtgcacatccagcaagttacatggttgaagagatctggcaagagctttctaaagcaaaatacatagaatgggaaaatttatcaagcgaacgagtccgtcaattgcataagctgaaggaagcatgtaaagaagctcttaggaattataacagccttgacaatcctcctgcatatgtccccgaggaacagctaaatgagcttgaggaagtttttcggaatgccaggaagtctgatattccaacagaagttcctgatcatctctgctgcaaaattactcttgatattttcagagacccggtgataaccccaagtggaatcacgtatgagagggcggtgattcttgatcatcttcatagggtggggaagtttgatcctgtgacccgtgagacacttgaaccacaccaactggttcctaaccttgccatcaaggaagctgtccatgcatttttgagtgaacatggttgggcttacaggatgagatgactactttgaattacacctgggcttggagctttggaggcaacatttcagattgcaatatacatgtttcggttagtcaacttaaatgtgtcattttgtttatctttacatatttattggtggaaaaggttttacctgggatggctgtgtacagattccccttctctagctatccctcctctctactctgttcatgtgtaatgcttggtatcagattatcacttatccacagtaaaagaaaattaaagtggctgtcatactccttgttctctgattattggtttttggcgcactcg

SEQ ID NO: 3281 - DNA, 1520 bp, Oryza sativa
  Clone ID: PAT_MRT4530_51807C.1
cggctctgcaggcttcgttcgctcatcgcgtctcgactccactactgtggttgcatatactactacacttgcagttgcatccagagcccgccccgcgtctctactcgctccgccgcgccgtcgtctctcccgacttcggcgacaagcgagcgacgcaggccaccgcgcgcggttcgttttcgcgagggaggccgccgccgaccagccgccatggtctcgccggacaccatccgcacggccatcggcgtcgtaggcaatggaaccgccctcgtgctcttcctctccccagtgccgacgttcatacggatctggaagaaggggtcggtggagcagtactcggcggtgccgtacgtggcgacgctgctcaactgcatgatgtgggtgctgtacggcctccccgcggtgcacccgcacagcatgctggtcatcaccatcaacggcaccggcatggccatcgagctcacctacatcgccctcttcctcgccttctccctcggcgccgtccgccgccgcgtcctcctcctcctcgccgccgaggtcgccttcgtcgccgccgtcgccgccctcgtcctcaacctcgcccacacccacgagcgacgctccatgatcgtcggtatcctctgcgtcctcttcggcaccggcatgtacgccgcccccctctccgtcatgaaaatggtgatccagactaagagcgtggagtacatgccccttttcttgtccctggcgtcactggtcaacggcatctgctggactgcctacgccctcatccgcttcgacctctacatcacgatccccaacgggctgggagtgatgttcgcggtggcgcagctgatcctgtacgccatctactacaagtcgacgcagcagatcatcgaggcgcgcaagcgcaaggaggccgaccatgtcgccatgaccgatgtcgtcgtcgactccgccaagaacaacccctcctccggcgccgccgccgccgccgccaacggccgctactagctcacgccgccctctttacttcaccagctagccagtcactcaggaggcatggccaccgatgaggccttcatgacttactagcaaagtggagtactacctttagctaagccgtcccaaagggatattactacatgtctcaaattaattagctaatctaatcaccatcaccctgcctaatccgctgctgttaattagtatggcagagagcaaaagaagaacaaattgagctgcacttcttatatgtactctcaagtgcagtgctactattgtcagtcccattgggggtaatttactgtcttatttacaggaggagggcctggctgctcttgttaaaaacagctagccctgccttttcttttttcaatatcatcatcatgccgtgcttttcgatctaaaaaactgtaatttttccttgctttttcttgcctttctgtacctgccgtaatgtaccttggaggccatccagatggtgttggggattatgatacctggaaaatgaagaaaaaaaagatttaaaaaaaaaaaaaaaa

SEQ ID NO: 3282 - DNA, 1411 bp, Oryza sativa
  Clone ID: PAT_MRT4530_51828C.1
tggggcaccatgactgttcacccggcctatctgacaattctatgtctaaggaagatgctatgtcaactggtgattcaacggaaagccttgatattgattgccttgatgatggggactccgaagtggtatcttccttgcaacatttggcagatgataagcttcatatttctgacaacagggatgttgcaggtgtggcatccaaatggacgaagcatggttgtaattcagtagaaattgattatatcgtcgacattgacaacaaccatgaggatccacagctgtgtgcaactcttgcttttgacatttacaagcacttgcgagtggctgagcagaccaagaaaaggccttcaacagattttgtggaaaccattcagaagaacattgacacaagcatgagggcagtgttaatagactggcttgtggaagtcacagaagaatatcggcttgtacctgaaaccttatacctcactgtcaattacattgaccgtaagtatgaagagatatgcccaccccaagtagaagagctctgctatatttctgacaatacatacactaaggatgaggttttgaaaatggaagcttctgtcctgaaatacttgaagtttgagatgactgcacctacaacaaaatgctttttgaggagatttctacgagctgctcaagtatgccatgaggctccagttttgcatcttgagttcctagctaattacattgcggagctatcacttctggagtacagcttaatttgctatgtaccgtcacttatagctgcgtcttctattttcttggcgaagtttatccttaagccaacagagaatccttggaattcaacactttcattctacacacaatacaaaccatccgacctatgcaattgtgcaaaaggactacaccggcttttcttggttggccctggaggcaaccttcgagcagttagagaaaaatacagtcaacacaagtacaaattcgtaccaaagaagtactctccaccatcaattccatcagagtttttcgaagatccaagcagctacaagcctgattaactccagttactccctgaagtctttcagtggaggtgtgcacgcttttgccaccaagatggtacgaggcaacttaccccgtgggatgtgttgaaccttgtgttagcagattggtagattgtacatcgtagatgaagtggtagagctgtacatcaagttggcctcatttgtgtatgcacggcaagtgcatttctctggcggcggcttgcttacaaccacagtgcataaagctgctagtcctttcctactctatccattttgcttgctccaagcttgtttgatatgattttaccgtgttactgtaaacaaatggatatgctggataagagataaatgcctgagggcaagtgaagtaaaaaaaaaaaaaaaaa

SEQ ID NO: 3283 - DNA, 2149 bp, Oryza sativa
  Clone ID: PAT_MRT4530_52012C.1
gtcccttgtggtgttttttttttttttttttttttttttttttttttttttgtagattgcaaatcaataggcaaacttagctcctttataaaattcccaacaaacataaggttagggatctaccagaaagcaaaatctgccgacgtagaccctaaacacaaccggggagtaattactcgtgcaattaacttagcttaatctccctctaggctctagtagtttcagtttcagtagtactgtagttttttcaccagctgaatctgacccacagcagcaacgaaccagagcgcaagaacacaacgcatttctgcctctttttttttggctggaaatggatatattccccaagcgtgacaacaacttttgacggccactgtgcgtggctagtccccccccctcccgccgtaattaaaggctctgaaacgtaactggttctgcggttcgtcaacggtcgggcaacatcacgctgtatgtgaccgcgaccatccggtcccccgccgcgcggtcggcggcggcggccaccacctgctcgtacgccgtgccgtcgtaccgcggcagcgcgttctccccggcgagcccgacgcccgccgcgcgcgccgcgggcggccacctgcctgacgagcgcctcgggcatgcactgcgcctcctgcggctgctcgtggtcgcgcatctccacgcaggtgaagttgagcacggcgccgtggcgcgccagcatgcgcgcgatcgggaggtagccgtcgcggtgccgcgtgttgtagtaccccgccgtgagctccggcgcgtgcgaccgcgtgccgtagtgccagtggatgccggccaccttgaccgagatcttggcgccggcgccgtcgccgaacacggacgtcgcgcccgacagcacgcgctcgccgtgctccagcagcatctgcgaataccacgacaggaagaactcgccgtactcggtgctccacccgccgcagtcgccgcggaagaacaccgtgtcttccggccagttgttgtagccgccggcgtccgtcggcccgccgtggccccactccggcttgcccctcgcctccgccgccgccttcaggctgctacgcatgtacctgtcgttgcattggaaggcgccgatgccggggaacctccaggtgccgttgctctccgggtaggacgggtaccgaagctcgccggcggggcccatgccgacttggatttcgacgatggtgtcgccgaggaaggaggcgaagtggtcgcggaaggcgcgcatgaagtcggtgtagcactcgacgggcgtgcggcccttgaagacgggcatggcgtcgcagccgagggagatgtactcgaagttgcggcgtccccattggtcggtgtaggcgaggtcgttgtccttctccatctcctccaccacccacctcgggagcgggatgttgacggagtcgccgacgttgccgccgcactggtggaaggacatgacggcctggaccttgaggccggtcttgcgggccatctccatgagctccacgtagccgtcgaagttgtaccggccggggccctcgctctccacgatgccccaccacacgtccaccatgatcccctccacgccggcgctcttcagcgccgccaggctcgccgccaccgccttcctccggttcagcgcgctcccgcacttgctcaccgtgtccagcggcatcatcacgaacaccggcacgccgttcctcctgctgctcgccgccgccgccgccacgtgcctggccaccgcccggcacgccaccggctcgcacgccgcctgcctcttcatcctcaggctcgtcgtggccgacgacgacgacgacggcatggcgaccaccgaagcagctcgccgcgcatcaccggcggtcgcgaagcacgctgccgccgcggcgctctgagccaagttcaaggccatcgtgtagaaaatcttaacccgaaaatcgaatccccaacaaaacgcgggaaacaaagaagtgatcaacagatgaaccaccccaaaaggaaattgttttttttttttcttttttgcgatcgacacagccttgatccgaacagaactgggagagatcggattattgggaggttggggattgggaatatatctaaagccaaaaaaaaaaaactaaaattattaaaaataattattcaatgtggggtgaaa

SEQ ID NO: 3284 - DNA, 1914 bp, Oryza sativa
  Clone ID: PAT_MRT4530_52053C.1
gagcgtccggcacgagggagttaacgctatgcggccctctccgcgccttgaacgctctctctctctctccctccccgattcgattcaattcgcgacgcctccgtgaaattctccaaagccagcttgccctgtagccgcgtgctccggccatggcgttcttcaggggcctgaccgcggtgtcgaggcttcgatcccgcgtggcacaggaggccaccacgcttggtggtgtgcgatggctgcagatgcagagcgcatctgatcttgatctcaagtcccagctgcaggaattgattcctgaacaacaggaccgcttaaagaaacttaaatcggagcatggaaaggtccaacttggaaatataacagtcgatatggtccttggtgggatgagagggatgactggaatgctttgggaaacatcattgcttgacccggatgagggtattcgttttaggggtctctcgattccagagtgccagaaagtgctgccgacagcagttaaagatggggagcctttgcctgagggtctactttggcttcttttgaccggaaaggtgccaaccaaagagcaagttgatgctctatcaaaggaattggctagtcgttcgagtgttccaggtcatgtgtatgaggcaatcgatgctctccctgtaactgctcatccgatgacccagtttaccacaggagtgatggcacttcaggtggagagtgagtttcaaaaagcctatgacaaaggaatgtcaaaatcaaagttctgggagcctacctatgaagattgcttaaatttgatagctcgccttccagcagtggcttcaaatgtttaccggaggatttcaaggggtatgaaggcaaatttttcacacatgcttgggtttgatgatcccaaaactttagtttctttgcctgtatactcacaatggaccactgatcatgaaggtggaaacgtcagtgctcatactggacatctggttggaagtgctctgtcagacccttatctttcttttgcagctgcactgaatggtttagctggaccgttgcacggcctggctaatcaggaagtgttgttgtggatcaaatctgtaataggtgagactggtagtgacgttacaactgatcaactcagagagtatgtgtggaagacactaaaaagtggaaaggttgttcctggctttggtcatggagttctacgtaagaccgatccacggtatacatgtcagagggagtttgctttgaagtacttgcctgaggatccacttttccaactggtctccaagttgtatgaagttgtgcctcctatcctcactgagcttggcaaggtcaaaaacccatggcctaatgttgatgctcacagcggagttctactgaaccactttggattatctgaagctcggtattacactgttcttttcggagtttcaaggagcattggaataggatctcagctcatttgggaccgtgctcttggcctgccgctcgaaagaccgaagagtgtcaccatggagtggctggagaaccactgcaagaaggttgctgcttgaagctacacacgcctacacggctgcgttttttttttttttttttttactctttgagcatctttgatgctaataactgagcataaactcgaaagagttagccgcattttacccttttttcccccgggccaataaacaagaggaagatgctctcagctggtaggattttgtaaccgtcgtcagttggtatgctcaaagtttatctgccattgggcaacaatgtgattagttttattttgcttagagctttttttttgttcgttgctgaacaactttttcgagcattttaagtttgctcgagttaatataccaattgctggttacggtacaaaaaaaaaaaaaaaaaaaaaaaaaaaaaaaaaaaaaaaaaaaaaaaaaaaaa

SEQ ID NO: 3285 - DNA, 509 bp, Oryza sativa
  Clone ID: PAT_MRT4530_52055C.1
tttcttgaaaggtgccaaccaaagagcaagttgatgctctatcaaaggaattggctagtcgttcgagtgttccaggtcatgtgtatgaggcaatcgatgctcttcctgtaactgctcatccgatgacccagtttaccacaggagtgatggcacttcaggtggagagtgagtttcaaaaagcctatgacaaaggaatgtcaaaatcaaagttctgggagcctacctatgaagattgcttaaatttgatagctcgccttccagcagtggcttcatatgtttaccggaggatattcaagggagggaaaactatagcagctgataatgcactggattatgcagcaaatttttcacacatgcttgggtttgatgatcccaaaatgcttgagttgatgcgactatatataacaatccacactgatcatgaaggtggaaacgtcagtgctcatactgcacatctggttggaagtgctctgtcagacccttatctttcttttgcagctgcactgaat

SEQ ID NO: 3286 - DNA, 2008 bp, Oryza sativa
  Clone ID: PAT_MRT4530_52057C.1
gaaaatgaatcgtacttgtaaatttaacaacagaaaggaaatgaagaaatgtgccataatccacaactggtatgttaactcgagctaacttagaaggctcgaaaaagttattcatcaaaggataaagctctaagcaacttaaactaatcacattgttgcccaatggcagattaactatatgagcatcctaacagcgatggctacaaaaatgtaccagccgatcgagagcatcttcctctagttattggcctgggaaaaaaatattaaaatgtggctgaacgtttcgagtttatcctcagttattaacatccaagatgataattgttagaagaattaacagcagcggtgtaggcgtgtgtagcttcaagcagcagccttcttgcagtggttttccagccactccatggtgacactcttcggtctttcgagcggcaggccaagagcacggtcccaaatgagctgagatcctatgccaatgctccttgaaactccgaaaagaacagtgtaataccgagcttcagataatccaaagtggttcagtagaactccgctgtgagcatcaacattaggccatgggtttttgaccttgccaagctcagtgaggataggaggcacaacttcatacaacttggagacgtagaactccatgaccaaagccaggaacaacctacgaatgaatgtgtcatggcatactatctttccactttttagtgtcttccacacatactctttgagttgatcagttgtaacgtcactaccagtctcacctattacagatttgatccacaacaacacttcctgattagccaggccgtgcaacggtccagctaaaccattcagtgcagctgcaaaagaaagataagggtctgacagagcacttccaacctttcctaatgcattaaaaggccatactgatacaccaggattttccagatgtccagtatgagcactgacgtttccaccttcatgatcagtgtggattgttatatatagtcgcatcaactcaagcattttgggatcatcaaacccaagcatgtgtgaaaaatttgctgcataatccagtgcattatcagctgctatagttttccctcccttgaatatcctccggtaaacatatgaagccactgctggaaggcgagctatcaaatttaagcaatcttcataggtaggctcccagaactttgattttgacattcctttgtcataggctttttgaaactcactctccacctgaagtgccatcacccctgtggtaaactgtgtcatcggatgagcagttacagggagagcatcaattgccttatacacatggcctggaacactcgaacgggtaaccaattcctttgatagagcatcgacttgctctttggttggcacctttccagtcaaaagaagccaaaggagaccctccggcaaaggttctccacctttaattgctgttggcagcactttctggcactctggaatcgagagacccctgaaacgaataccctcctccgggtcaagcaatgatgtttcccaaagcattccaatcattcctctcatcccgccaaggaccatatcaacagttatgtttccaagctggaccttcccatgttctgatttaagtttctttaagcgatcctgttgctcgggaatcaattcctgcagctgggacttaagatcaagatcagatggactctgcatctgcagccatctcacaccaccaagcgtggtggcctcctgtgccatgcgggatcgaatcctcgaaaccgcggtcaggccccggaagaacgccatcgccgcctgcaggggtggaccggaggcggaagggaagcagcaggacgacggcacccgccgccgctcctagcgaggaggagagacctcctccgggatccgaggccgggagggaagacggacggggagattgcctcgcttgggcaccgccgcgatgcgatgcgatgcgatgctcgccgtcgccagcgatggagatcgggtcgacggcggcggcaaggagagcggacgcggg

SEQ ID NO: 3287 - DNA, 1391 bp, Oryza sativa
  Clone ID: PAT_MRT4530_52242C.1
agcacacgcgcgcacacgcacgcacgcacgtacatcgcgcgcgccacgccacgccacgccgcggtcacaccgttccaagccactctcacacgcacgcgcgtcgccgccactacactctcatggctttcacggtcaaggcgtcgtcgccgtcgtcgccggctgcttcttcttcttcttcctcggcgccagctaagctcggagcggcgccggggagggtcgcggtcaggaagctcaccgcggcggcgacgtcgcttaggctcgatcgggcgcccgcggcgccggcgacggagcgcgggctgtcgtcggtgtcgcggaccatgtcgaggctgatggagaaggggaagacggcgttcatcccgtacatcaccgccggcgacccggacatggggacgacggcggaggcgctgcggctgctcgacgcgtgcggcgccgacgtcatcgagctcggcgtgcccttctccgacccctacaacgacggccccgtcatccaggcctccgccgcgcgggcgctctccgccggcgccacgatggacgggatcatgtcgatgctcgcggaggtgacgccggagctgtcatgcccggtggtgctcttctcctatctcggccccatcgtccggcgaggtccggccaacttcaccgccgcagccaaagaagccggcgtacaaggtctaatagtacctgatcttccttacctagaggcatgctctttcaggagtgaagttatcaagaacaacctagagctggtgctgcttactacaccaactacaccaccagacaggatgaaggcaatcacagccgcctcaggaggatttgtttacctggttagtgtcaatggagttacaggatctcgccaagacgtgaacccgcgtgttgagcatctccttcaggagattaagcaggtcactgacaaagctgtgtgtgttggctatggcatatcaacccctgatcatgttagacagatagcagagtggggtgcagatggggtgatcattggcagtgcaatggtgaggcagctgggtgaagcagcttctcccaagcaagggctgaaaaggctggagaagtatgctaggagcctgaagaatgcacttccatagaagctataaaaacaagttgctaaataatggcatgagagattaattaattaatctcttggtgatgactagctacatgcataaaagggaagctgaagctgcctttctcatagtctcatagttaactgtaccgcaaattagcactagaaagtgttatagataataagtgatgtataggcatccagatccttggggactgtaaaacacctcgtctgtgtagaggtcggatgttaattcttcggttgttcgaagaaaataattgctgcaaattgtgtgcaaaactggaagcttcgccccttc

SEQ ID NO: 3288 - DNA, 1498 bp, Oryza sativa
  Clone ID: PAT_MRT4530_52965C.1
ctcgaaacacaagaaacaaccggagaaactgagcccggccgaccgcaaggacagcaagctattagccatcctcgcatggatcccaacgatgccttctcggccgcgcacccgttccggtgggacctcggcccgccggcgccggcgcccgtgccaccaccgccgccaccaccgccgccgccgccgccggctaacgtgcccagggagctggaggagctggtggcagggtacggcgtgcggatgtcgacggtggcgcggatctcggagctcgggttcacggcgagcacgctcctggccatgacggagcgcgagctcgacgacatgatggccgcgctcgccgggctgttccgctgggacctgctcctcggcgagcggttcggcctccgcgccgcgctgcgagccgagcgcggccgcctgatgtcgctcggcggccgccaccatgggcaccagtccgggagcaccgtggacggcgcctcccaggaagtgttgtccgacgagcatgacatggcggggagcggcggcatgggcgacgacgacaacggcaggaggatggtgaccggcaagaagcaggcgaagaagggatccgcggcgaggaagggcaagaaggcgaggaggaagaaggtggacgacctaaggctggacatgcaggaggacgagatggactgctgcgacgaggacggcggcggcgggtcggagtcgacggagtcgtcggccggcggcggcggcggggagcggcagagggagcatcctttcgtggtgacggagcccggcgaggtggcgagggccaagaagaacgggctggactacctgttccatctgtacgagcagtgccgcctcttcctgctgcaggtgcaatccatggctaagctgcatggacacaagtccccaaccaaggtgacgaaccaggtgttccggtacgcgaagaaggtcggggcgagctacatcaacaagcccaagatgcggcactacgtgcactgctacgccgctccactgcctgcacgaggaggcgtcggacgccctgccgcgcccctaccaagccccgccgcgaagaacgtggggccgtggagccaggcctgctacgcgccgctcgtcgacatctccgcgcgccacggattcgacatcgacgccgtcttcgccgcgcacccgcgcctcgccatctggtacgtgcccaccagactccgccagctctgccaccaggcgcggagcagccacgccgccgccgccgccgcgctcccgccgcccttgttctaagctcgccggagactctgctgctgttcccgcgccgccacggcgcgtgggagtttcctgtggtgttgggccgtgttttcgttgtaaggcagttaggtcgttctaagctattcgatgggccgatcgaggatgcgtcgtcgtgtaggaactcgtcgtgtacccatgtttgcgatctggatggcccatttgtttagctgttaccatgttaaattcgtttcctttatttatgaaatggtaaatcctaaatgtcgtg

SEQ ID NO: 3289 - DNA, 1932 bp, Oryza sativa
  Clone ID: PAT_MRT4530_53245C.1
gcccagcgccccgagccggccccgcctcccccgaatccttccctcaacttcccccaaatagccccatctctttggccatccgagcgggtcagctgccggcgagttggctcgtctccggcccgggaagggatggcaagggggagcggggagggaaggaggcatgggcagcggcgcctgggaacccagcagcgagaagcacggcgccaccggggcggcgatccggagggtggcggcggggggtcggccccaagcgaaccgtcctacctgcgcggcgagggggccgcggccctgctcaagacgtccatcggcacctccatcggcgcgacgctgccacataacgagcaccacccccgcaacaatgccatccccccgcacgaccgccgcgggccgagcccggccgcacgcggcgccggagcctccaccggctcgtcggggtgaagggccaccgctgtttccagccaggccggcggtacctagtcttgcgtgcggcggccggtagtcccgcaggttctctccaatcgttgcgtgcggcagttagggtgggcagccgcctgtaatgagggcttcgttcctgcacctgatgccggtttcgcttgagcattcaggagttgggatggccgaataacgagaggcttataaggaattgccaattttaggtcttcgactgggaaaatctaagctgagacatcgcggcgtacttaagatcgcccgacgaaaacgtaatacggcttcactggaaccaaaaacgagcaaggcccgcggaagacggtctccaccatgagcgccgtctccgcgccctatccccacgcgccgcaccctctacagcctagcgggctgatcgattttgtctccctgcgccatctctcccatgtcgtctggtcgtgcgttcaagtcttgtactcaggaacgggcgcttccaaccactcctcaccaagtcaaagtttcttcctcgcgaccggcggcgagcggcggcggcggcgatgtctgggagaggcaagggcggcaaggggctcgggaagggcggcgcgaagaggcacaggaaggtgctgcgcgacaacatccaggggatcacgaagccggcgatccggaggctggcgaggaggggcggcgtgaagcgcatctccgggctgatctacgaggagacccgcggcgtgctcaagatcttcctcgagaacgtcatccgcgacgccgtcacctacacggagcacgcccgccgcaagaccgtcaccgccatggacgtcgtctacgcgctcaagcgccagggccgcaccctctacggattcggcggctaggcgaggcgatgcgaggccacgcgattggatagggattcgattagtgccatgttcttcagttcgtcgtagtagcctagcctcttctcctgtagctgttgtttcatctcgtctcctgttccttcattaattagggatgtatgaactactggttcgttcgttcgaatggaataggaaatctgcagtgatttaccctctaaaaaaaaaaatataaatatgtatcggtcagatctttgcatgtaaattagtactcctagaagcaaataataataataattaataaagagaatgggggttatttatcaaaaaaaaaaaaaaaaaaaaaaaaaaaaaaaaagaaaacaaaaaaatacaaaaagacaagaataatgagctatatcgcccaacattcggccctcccgcgcctgtcccgagtgtcctgccttacggggatgggtcctcccttcagcgccgttgcgcgcacgggggggtaccctcgccggtatgctgctgtgactccgttcgcgtgctgctgtgtttgtcttccctccccggtcgcctctccaatcccttgtttggttttccctggtttctgattttatgtactttcgctgttctggtttctttgtattttatgctaattagctttattgattatcgtctt

SEQ ID NO: 3290 - DNA, 877 bp, Oryza sativa
  Clone ID: PAT_MRT4530_53246C.1
acactcctatgggcgattgggaccctcgaggccggccgggacaagcaaaatccccaaatcctccagatcgtcttcgtcttccacctcgagctcttacgcatcgtcagccatgtcgggccgcggcaagggaggcaagggtcttggcaagggcggcgcgaagcggcacaggaaggtgctgcgcgacaacatccagggcatcaccaagccggcgatccggcggctggcgaggaggggcggcgtgaagcgcatctccgggctgatctacgaggagacccgcggcgtgctcaagatcttcctcgagaacgtcatccgcgacgccgtcacctacacggagcacgcccgccgcaagaccgtcaccgccatggacgtcgtctacgcgctcaagcgccagggccgcaccctctacggcttcggcggctgagttcccggccccctgtgctcgatccagatctgatgccgttagcgttgcttagggtttcgttgcggaaattgtactacttcgttgtttctgcttgtgcaaagtgaatggatggttggattaaatgaatcaaaaaaaaaaaaaaaaaacccgcggccagcgccagggccgcaccctctacggattcggcggctaggcgaggcgatgcgaggccacgcgattggatagggattcgattagtgccatgttcttcagttcgtcgtagtagcctagcctcttctcctgtagctgttgtttcatctcgtctcctgttccttcattaattagggatgtatgaactactggttcgttcgttcgaatggaataggaaatctgcagtgatttaccctctaaattcagttgcaatctcttgccgtgctatgtgaacgttttgcaacctgcattgttctagttggtgac

SEQ ID NO: 3291 - DNA, 1098 bp, Oryza sativa
  Clone ID: PAT_MRT4530_53248C.1
atgcctcaggtcctccccggggggtcccttttatatcgcagtcttgtccgagtaagactcttcccatccgtagacttcgtgaaggatttccttagtgtacgcgggaagtatccatatgcgcgtggtgaaaaaaatctctcaaaggccaaacgccaagtccctactcccatagtcccatggccgcgccgcaggccaaatttggcggcgcctgcaggtcaaaattttgagctggccgcctctcagaccacgaaaattcccactatcccgccaaatcaccgatccgcgcctcacgccacgtcaacgatccgctcctccccccgcgatccagatcctcaccgtccattccctcccccatccaacggcagccgcctccccactccatcctctcgtccccttttaaaaccccctcccctttcttccccaaatcccactccaatcaccaccacctcttctccaattccactcgcttttctctctctctcgtgcgtcgagccaccggaatcgtcgtcgtcggcggccatgtcggggcgcggcaagggaggcaaggggctcggcaagggcggcgccaagcgtcaccggaaggtgctccgcgacaacatccaggggatcaccaagccggcgatccggaggctggcaaggaggggcggcgtgaagcgcatctccgggctgatctacgaggagacccgcggcgtgctcaagatcttcctcgagaacgtcatccgcgacgccgtcacctacaccgagcacgcccgccgcaagaccgtcaccgccatggacgtcgtctacgcgctcaagcgccagggccgcaccctctacggcttcggcggctgattccttccttccttccttcctggtggcgtgcgggtggtggtggtggtgtaggagctagggtttcgatgggattcggggggaatttctgctttgtgttggcttctgtgtagcgactcttctgtttaaatgaattcgatgaatctgaactgaagatttggttcccctgtgattccgtcattttatatttctgtttcctgtgatgtgaatttgtgcgaagttcgtgaaactgcctttcggatgaaaaaaaaaaaaaaaaaatatgcggcc

SEQ ID NO: 3292 - DNA, 1268 bp, Oryza sativa
  Clone ID: PAT_MRT4530_53359C.1
ctaggcgaaaaatggcttgagccttgtgtttgtggtgccattcatggcgtgatggcctttggccgcccataagttagcaccattacaaactccttggcaggggagcctatcatggtctgtgttgtctgtgttgatcgccccctcaaccacacctctactaaattgcacaggggttgtgtagggttcactggctgcccgcagcaatttatttcgaccttgatgtaattgactgagttcaataaaagtttccattatctctgcctcgttaggaaggccaagcttctgcatgaggtacttctggattgacgaggcaggtatgtttccatcttttattcgcaaataatgggaaggtatctgtggtaaaggtgggtctccttcctgttcaaatgatgcaacaagtgaaaaccatatagaactgaatttcttttcgttttgtgtagctgcagcttcaggcttactatcagattgggcatgaagttctctcctccgtccagtcctttggtttttcctttttagcaaaggtacatctttcttatcatcctctattttggatttctgcatatattccctagactttgttttgttaacagatgtgctcccaggagagtcactaagttgctctctcttaacaaatggactctgtgaacttgatcgggaggactttgtcctgtttgcagcttctaccaaacaatttaaaggtctccagagctcatcagtcttatcggccaggtccttgcgatcaccttcggtatctttattggaggaatggttcgatgcctctgcgtttgatgacatctgtcttcttgtttgtggcactttgcccaaattagtgggcaagcttgaattctgagcatgcttttcaccattatcaatttcctttttcacaggatcatcaataccaggaccaaggccacgcaaggcagcagctttcctggtaactgctcttgtccgtcgccctgtcaagcctgtcggtgttactgtaggcgtatcaactaccagagaagagatagatctctctttccttttactgggaagtaaaacaggagctgctacttcgtcagcactaatcttctttcttttgaatggaaatatttttgaccttacatcttgtagattgtgatcagccctaagcttttcaactggagtgcagccaagatcaattttacatactgggcaggattctacctcctcatcattcaacttctcatatatacactttctgcaaaaggtgtggaggcactcggagacggtggtggcgtcgcggagga

SEQ ID NO: 3293 - DNA, 2442 bp, Oryza sativa
  Clone ID: PAT_MRT4530_53617C.1
atggcgtgctcgtttctctgcaagccatggctgccattaacggagagcgcgaagcccgctcgctcgccggcgccgtcttcccgcgcaagaacggtggtgcagcagctcgccgtcctcttactactgctcggcggcgtcggcggcggcggtggcgcgctgcttgccgcggccgcgtcgacgacggacaccatcctccccggcgagagcatcaccgggaaccagacgctcgtgtccaagaacggtgagttcgagctcgggttcttcaacccgggcgtcgggatccactacttcctcggcgtccgcctcaggaagctcgcggcgtacagccccacgttctggattggcgacagggtctacgtcgtcgacctgcctcgcgccgcgctggagctcttcggcgacagcctctacatcaaggaggacggtgccagcctctggtggtcgtcgccgtcgtcctcctcctcctcctcgggcggcggccgcggcggcggcgcggccgtcgccgtcctcctcgacaccggcgacctcgtggtgagggaccagaggaactcctccctggtgctgtggcggagcttcgactaccccggcgacgcgctgctgccgggcgggaggctggggctcgacgtcgccaccggggagaacgtgtcgctcacgttcgaggggttcacccacaacggcagcctccgggccgacgcgagcaggaggaacgggttcgtgctcaccaccgacggccgcgacacccgcggcgcgttcccggactggatggtgaccacccaagacaacggcggctcgctggtgctcaaccacccggacgccacgaactccaccgagttcctgcagctcaaagtcgggcaggtcagcctggtccggtggtcgggcgccgacgccggctgggtgcctcgctggacgttcccctccggctgcaagtccggcggcggcttcttctgcggcgacttcggcgtctgcacgacggcgaccggcggcgaatgccggtgcgtcgacgggttcgcgccgtcggacacgaaggagtgggggctcggttacttcgtcaccggctgctcgaggtctctcccactcagctgcgacgccaacggccagaccgagcacggcgactccttcgccattcttgacaatctccaaggcctcccttacaacgcgcaggatgagccagcgaccaccgatgaagattgcagggaagcttgcctgaacaaatgctactgcgttgcatactcaactgaaactggatgcaagctctggtattacgacctgtacaatctgagctcagctgataaacctccatacagcaagatctatgtccgattgggttccaagctcaagagcaagaggggattggccacaagatggatggtgctcttggttgttggatcagtagctgtagcttctgcaatgttggcagtgttgcttctatgcaggtacaggagagacctgtttggatccagtaagtttgtagtagaaggatctctggttgtctactcatatgcacagatcaagaaggcaacggagaatttctccgataagctcggcgaaggcggattcggaagcgttttcagaggtacattgcctggatcaaccactgttgttgctgtcaagaatctcaaagggctcggctacgcagagaaacagttcagagcagaagtgcagacggttggaatgatccggcacactaatcttgtccgtctcttgggattttgtgtcaaagggaacagaaagttgctggtctacgagtatatgccaaatggatccttggatgctcatatcttttcacaaaagtccagtcctttgagttggcaagttcgataccaaatcgcgatcggcatcgcaaggggtctagcatatctacacgaagagtgtgagcactgcatcatacactgcgacattaaacccgaaaacatactactcgacgaggaattccgccccaagatcgcggatttcggcatggcaaagcttcttggacgagaattcaacgcggcacttaccaccatccgaggtaccaggggctatctcgcgccagagtggctgtatgggcagccgattaccaagaaggcagacgtgtacagcttcggcatcgtgctgttcgagatgatctcagggataaggagtactgtcacgatgaaattcgggagccatcggtattaccccagctacgcggctgcgcaaatgcatgaaggagatgttctgtgcttgctggacagtaggctggaaggaaatgccaatgtggaggagctcgacatcacctgcagagtcgcctgctggtgcatccaggacagagagggtgacaggccatcgatggggcacgtcgttcgcatgttggaaggtgttgtggacacggagatgcccccaattccagcttcgtttcagaaccttgtggatggtgatgacagtgatatatacgaagaaaactggcgtttgaggacccaagattag

SEQ ID NO: 3294 - DNA, 1913 bp, Oryza sativa
  Clone ID: PAT_MRT4530_53892C.1
ggacaagactccagccgccggagagccagtgtctgcttgtgtgagagagagcgacgcggcgccgacgcccgatgcgtttctgtttccgagcgggtcgggcccgcgctcgcgcccgctggcctggaccgcctcctcgctcccctcctgtcgttgcagcgcgggtcggtcgggggcgaagtagttgttgagggggatgatgatgacgagcggtcgcccgagcggcggcgccggcggaggtcggtacccggttcacggcgtggcagtggcaggagcgggagcgccaggcgctcatctacaagtacatggcgtcggggactcccatcccctccgacctcaccctctcccctccgccgcagcttcctcctcgactccgccctcgccacctccccttccctcgctttccctccccaaccttcactggggtggggttgctttggcatggggtttgggcggaaggcggaggacccggagccagggcgatgccggcgtacggacggcaagaagtggcggtgctccaaggaggcgtacccggactccaagtactgcgagaagcacatgcaccgtggcaagaaccgttcaagaaagcctgtggaaatgtccttggccacgccgccgccgccgtcctcctccgccacctccgccgcgtcgaacacctccgccggcgtcgcccccaccaccaccaccacctcctccccggcgccctcctacagccgcccggcgccgcacgacgcggcgccgtaccaggcgctctacggcgggccctacgccgcggccaccgcgcgcacccccgccgccgcggcgtaccacgcgcaggtgagcccgttccacctccagctcgacaccacccacccgcacccgccgccgtcctactactccatggaccacaaggagtacgcgtacgggcacgccaccaaggaggtgcacggcgagcacgccttcttctccgatggcaccgagagggagcaccaccacgccgccgccgggcacggccagtggcagttcaagcagctcggcatggagcccaagcagagcaccacgcctctcttcccgggcgccggctacggccacaccgcggcgtcgccgtacgccattgatctttcaaaagaggacgacgatgagaaagagaggcggcaacagcagcagcagcagcagcagcagcactgcttcctcctgggcgccgacctccgtctggagaagccggcgggccacgaccacgcggcggcggcgcagaaacctctccgccacttcttcgacgagtggccgcatgagaagaacagcaagggctcctggatggggctcgaaggcgagacgcagctgtccatgtccatccccatggccgccaacgacctcccgatcaccaccacctcccgctaccacaatgatgattaatctcttgaagaagccaagaagtgatcaacacgcggaagaaatcaacagcttctttcacggcgtgcgagctgcatgctcatgctccaggatcgatcgatcgatcattgcatctccaaactaatcacgcttcgatctttcaggacttcatcaatgacaggccgaaacctcctacgagttctctgatgatattcttattttttttcccacttcttttcgttgagctttttgtaatgttgcttcgagtgttactcctacattttctccgaaatggcctcagaatgatgcggtcgggctgattaattaggttagactcttcctgaaccaactaggaatagattttctgcctggttcctgtcagtccttgtaatatctgcagcagcttgtgagacaagcgtgttcgcttttgtgaacgccctttttcttctttccgattcctctgcctgtgatagtactcgctccgcgaaaaaaaaaaagagcaaaccgtggattcttgtgtcaaaaaaaaaaatcaaaaaaaaaaaaaa

SEQ ID NO: 3295 - DNA, 2742 bp, Oryza sativa
  Clone ID: PAT_MRT4530_53979C.1
ccgggctatgtggcatctgggcagcggcagctgcagcttctcctccccactgagcccttttgtcctcactcgcagggatcggagaggggtgaagatgtcgggtgctgctctcgtcgcaatcgcggcctccatcggcaacctgctgcagggatgggacaatgccaccattgcaggtgctgtactatacataaagaaggaattcaagctagaaagtgagcccactgtggaggggctaatcgtggccatgtcactgattggtgcaaccatcatcacaacattctcagggccggtatcagactggatcggccggcgccctatgctcattctctcttcaattctctacttcctcagcagcctcatcatgctatggtccccgaatgtctatgtgttactgctcgcacgccttatagatggattcggcatcggcttggctgtcacacttgtacctttgtacatctcagagacagctccttcagagatcaggggtttgctgaatacactgccacagttcagtgggtcaggagggatgttcttgtcctactgcatggtgtttgggatgtcactgttgccgtcacctgactggagaattatgcttggtgttctcgcaatcccttcgttgtttttcttcggattgacaatattctatctgccagaatcaccaagatggcttgtcagcaaagggcggatggctgaggcaaagaaggtattacaaaaattacgtgggagagaggatgtctcaggagaaatggctcttcttgttgaaggtttggaggttggagctgacacttccattgaagagtacatcatcggaccggctatagagccagctgatgagcatgttgttgatggcgataaggaccaaataacactgtacgggcctgaagagggccaatcatggattgctcgaccttccaagggacccagcattcttggaagtgtgctttctcttacatctcgtcatggcagcatggtgaaccagagcgtgccacttatggatcctatagtcacgcttttcggcagtgtccatgagaacatgcctcatgctggaggaagcatgcggagtacattgtttcccaactttggtagtatgtttagtgtgacagatcagcaccccaaggttgatcaatgggatgaggagaaccttcatagggatgatgaggaatacgcgtctgatggtgctggaggtgactatgaagacaatgtccacagcccgttgctgtcccgacagaccacgagcgcagaagggaaggacattgcacaccatgctcatcgtggaagtgctctgagtatgagaagaagaagcctcttggaagagggtggcgaggcggtgagcagcactggcattggtgggggatggcagcttgcatggaaatggtcagagcgagaaggcgaggatggtaagaaggaaggaggatttaaaaggatctacttgcaccaagaggaagtgccaggatcaagaaggggctcagttatttcacttcctggtggaggggacgctcctgaaggcagcgaattcatacatgctgccgctttggtaagccaaccagcactttactccaaggatatcattgaacagcgtatgtccggtccagccatgattcatccatcagaggcagctgccaaaggttcaagctggaaagatttgtttgaacctggagtgaggcgtgcgttgttagtcggtgttggaattcaaatccttcaacagtttgctggaataaatggggttctctattacactccacaaatacttgagcaagcgggggtggcagttctcctttccaatcttggcctcagttcagcatcagcttccatcttgatcagttctctgaccaccctactgatgcttcctagcattggtttagccatgagacttatggacatctctggaagaaggtttctgcttctgggcacaattccagtcttgatagcatctctagttgtcttggttgtgtccaatgttatcgacctgggtacagtggcccacgccgcactctccacaatcagcgtcatcatctacttctgctgcttcgtcatgggattcggtccgatccccaacattctgtgtgcggagatcttccccactagggtccgcggcatctgcattgccatctgcgccctgacattctggattggtgatatcatagtcacctacagcctccctgtgatgctgaatgccatcggcctagcaggtgtctttggtatatacgcagttgtttgctcgattgccttcgtgttcgtcttcctcaaggtccccgagacgaagggcatgccgctcgaagtcatcaccgagttcttcgctgttggtgcaaagcaaatgcaggctacaaaggcctaattcttcagcaactctgctttcaatctttatataacactgtaaattggaatctgcaagatcacaccatgaggctggaggagctttttgagttgtaaatgagagaagaggattgctattcatgctccttatgcaagggaaaagagttcattactggcacagggcagctgtaaagtaggaaattttcatgttattcatgtccacttcttgtttatttagtactgtgttaggtaatgttgttattcatcagtagttgctgctagggatgttcaaaaataagcttgctaatctgattttgagctactatgttggggttcataataaagtaaattttctgtgtcacaaaaaaaaaagtagcactttgttgtaaattgtatggggaagttaatttattaatgttcccgctcttt

SEQ ID NO: 3296 - DNA, 1832 bp, Oryza sativa
  Clone ID: PAT_MRT4530_54020C.1
acgcccacgcgtcacggccacgcggtgcgcccacgcgtcgcggcactgttcccgcgtccgccttcccttcctcctccacctccacctcctcgtcgcgatccaaatccgaatccggccatggacgccggggcgcagccgccggacacggagatggcggaggccggcggcgggcagcagccgcctgctgcggctgcggcggcgggggcgggggcaggggcggggatgatggagaacatccaggcgacgctgagccatggcgggaggttcatccagtacaacatcttcgggaacgtgttcgaggtcaccgccaagtacaagccccccatcctccccatcggcaagggcgcctacggcatcgtctgctcggcgctcaactcggagacgggggagcaggtggcgatcaagaagatcgccaacgcgttcgacaacaagatcgacgccaagcgcacgctcagggagatcaagctgctccgccacatggaccacgagaatattgttgccataagggatatcatacctcctccacaaaggaattcattcaatgacgtttatattgcatatgaattgatggatactgatctgcatcaaattattcgctcaaatcaagcattgtcagaggagcactgccagtatttcctttatcagattctccgtggcttgaagtatatacattcagcaaatgtccttcaccgagacttgaagcccagcaacctacttttgaatgcaaattgtgacctcaaaatttgtgattttggacttgctcgtaccacctcagaaaccgattttatgactgagtatgttgtcacaagatggtatagggcaccggaacttctgttgaattcctctgaatatactgcagcaattgatgtgtggtccgtgggctgtatttttatggaactcatggatcgtaaacctttgtttcctggaagagatcatgtccatcaattacgtctactaatggagctcatcggaacgccaaatgaggctgatctggattttgtaaatgaaaatgcaagaagatacattcgccaacttcctagacatgcaaggcagtcctttcctgaaaaatttccacatgttcatcctttagcaattgatctggttgaaaagatgctgacatttgatcctagacagagaataacagttgaaggtgcccttgcacatccttacctggcatcactgcatgacataagtgatgagccagtctgctcatcacccttcagctttgacttcgagcagcatgcattgtccgaggaacaaatgaaggatctaatctaccaagaaggccttgcgttcaaccctgattaccagtagctggtgttctatttcagccttggattgattctattcatatggagttttttcctcctgcgccacaaaaggtcgccgacagtgatcactagttgtaaataattgcctcacctgaaaaatcctccctggttcaaagctgaaggtgttgttctaagagtagaaatgtactttgtgatcaagttcctgggtagctgctatgccattcttatgcttatgtatgttgtttaatgtgggatttttttccatcttaaatgtttttagtcccttttgtaagaagagttagttcatgaacgatgacggcctaaattctgcggttatcatcaaattccccattttcttgtcaaaaaaaaaaaaaaaaaaaaaaaaaaaaaaaaaaaaaaaaaaaggaagaaaaaaataaaaaaaaaaaaataaaaagaaaatcaaaggaaaaaaactaaactataaaaaaattgtaaaataaatgaaaaatcttttacagaaaatttttaaaaactgttacctgagagggggggtgtttt

SEQ ID NO: 3297 - DNA, 1939 bp, Oryza sativa
  Clone ID: PAT_MRT4530_54118C.1
cagaaactatagaggaagaagaagtcccggttagtccaccggcaaaaccggatactgcaaagccagatgctgcggagatagaagctagtgatagggggatcattggttgggggcgaacaacgagacgttgtcgcagaccgaggtgtccatcaggctacaacatttctgccgcatcttgaaaagatgccgacagaaaacatcggactatatttggatttgtagtagagatcttgatggagtggtataagaaggtaagtatagccatgagtgcacatacctcgttggcctatttgggctcccaactttcatgctttggggttgagacatggtgtacatttttaataagaaattcttaaattagttcataagatatttctgcccccccattgtattaagctgttcccatgatgggagcaaaggtagaaggtgacaattacatgcttggatattatgccatgggggatttcaacatggatgcaaatgagacgcctgatgatatgctgcagtggtttgcagatcttgctttatcaagcactgatgaccacgttgagcaagcagaagcccatgattgcgtgaataattccagtgatgatggtctggattcatttgaatcgttgacactgaagctggaagagaccaagattgatgagtactggagcaggccacaggctcctgaaataccaaatgatgaacaagcaggattatcagtgaaccttctcactaagccaaaacgaggccagcaaaggaggaggcggcagaagcgcgattttcagaaagatatcttgcctggccttacatcacttgcgagacctgaaatcatagaggacattcagttacttgagggcatcggcggtgaatcgatgggatggcggcggcgggagggcggcggcgccgtcgccggcgcggcctcgaggcttcggttcgcgccgtcctccaaccacctgctcgtctcctcgtgggattcggggctgaggctgtacgacgcagacgcgtgcgagctccaaccccgatcgattttatccccccgccgggcaccctagtcgccggatcgcgtctctcccatcctctcgcgcatcctcctccgactacctcggttgggttttgggggcggctggagatgtcggactccgaggagcaccacttcgagtcgaaggccgacgccggcgcgtccaagacctacccgcagcaggctggtactattcgcaagaacggtcatattgtcatcaagaaccgcccatgcaaggttgttgaggtctccacctccaagactgggaagcatggacatgcaaaatgccactttgtggccattgacatcttcaatgggaagaagcttgaagatattgtgccctcctcccacaactgtgacgtcccccacgtgaaccgtactgattatcagctgattgacatttctgaagatggatttgtcagcctcctgactgaaagtggaggcactaaggatgacctgaggctccctagtgatgaggctctgcttactcagatcaaggatggattcgccgaggggaaggatctgattgttaccgtgatgtctgccatgggtgaggagcagatctgcgctctgaaggatattggccccaagaactagaataccttgttaccgtgtttggctacctgtctggtcgctttaagtttggagctggtcttgagattatatataaacttttgatttgagcgtaagttaagaagacatatgggccgttgttccatcttgcggtttataccgaatgatttggatgtacctttgctatatgtaatgctattttgaaccagtagttttacagtctttatggttatttatatacaatgttctttgggttatatgcaaaatttcttgtaatccaaactaaaaaaaaaaaaaaaattttatgagtgctctttgacttaaaaaaaaaaaaaaagccgcaaaaaataaaaaaacaca

SEQ ID NO: 3298 - DNA, 1977 bp, Oryza sativa
  Clone ID: PAT_MRT4530_54608C.1
atgctgcatctagcgtctatatctgcgcagcctaacccttggtgcaaaaaacaatgtggtgatgtcaaaatcccttatccgtttggcattggcactggatgtgctattggtgaaggctttgagatcatttgcaacaggaatgctgatggaattgaccagccattcaccggtaacatcgaagttctagacatctcagtggtttacggtcgaagccgagtattaggctccatcaccacaaactgctacaactccagtacaggatcagcgaatgtcaattcctggtggatggatttatcaacatcgccataccgtttctctgatgcgtacaacacgtttgtagtcattgggtgcaatacgctcgcatatatctacaacggactgaacagaacatcatatacaactgcatgtgcatcagtgtgcggaggaccagaagacctgacaaatggttcatgcctcggagtgggctgctgccaaaatgccaatgccatacccaagggtttaactcgccaagatatctatttgtatactatttacaatacttcagaatcagatagttggaagttcaacccatgcagctatgctgcactggtagaaacagagtcatttagtttcagcacagagtacataactaccatgaggttcaatgatacctatgaggggcagcagccgctagtgctggactgggcaataggagatgtgtcttgcgaggtggcgaaaaacatgacttcatatgcatgccatagtgggaatagtatctgtattggctctgttgctctagtgatcaccattttcttcatgcgtttgatgtttgagcgaagaaagcttacagatgtcaagaaaaaatattttcagcaacacggaggactgatattatttgataagatgaaatcggatcagggacttgcatttaaggtgttcactcaagccgaactagaacatgcaacaaataagtttgagaaaagccagattcttggacatggaggacatggcaccgtgtacaagggtataacaaaggataacattacagtggcagttaaaaaatgtgcattgattgatgataggcataagaaggaatttggtaaagaaatgttaatcctttcacagatcaaccacaagaacattgttaagctgctgggttgctgccttgaggtggatatcccaatgctagtgtatgagttcatcccaaatggaacattatttgatcttattcatggcaagaaccgtacgtttcatatcccttttagttctctcctaagaatcgtcaatgaagcagctgaagggcttgcatttttacattcctatgcaaacccaccaattttgcatggcgatgtgaaaacctctaacatccttcttgatgagaactacatggcaaaggtgtcagattttggagcctccatattagcactaagtgatgaagaccaatttgtgacaatggttcaagggacatgtggctatctagatccggaatatctgcaaacatgccgattgacagacaagagcgatgtttacagctttggtgtggtccttttggaggtcatgactgggcagatgccattgaaatttgaaggtcctgagattcagaaaagcttgtcatcaagtttcctactggcaatgaaggagaataatcttgaggccatgttggacagtcaaattaaagatcatgagagcatggaactgctaagtgggcttgcagacatagctaagaaatgcttagacatgtgcagtgacaataggccatcaatgaaagaggtatctgaggagcttagcagactacgaaaattttcaaaacacccttggatacaacgtgatactgagatagagagctttctcagtggaccatcaactagtaacctagaaactgagcacagctatctcagtggaccatcaaccagtaactttgaaatcgagcacaacaccgagtatagaaggaaggatgaagaaatgcccataaacccaagcacttcatactttatccgg

SEQ ID NO: 3299 - DNA, 1337 bp, Oryza sativa
  Clone ID: PAT_MRT4530_54679C.1
agaacacggctggttgtttgcccgtagtgcttttcctttcaggcaagttaataacttattccaccttcggcgtctatcagtttttgaactgcttgctactgaggttactgttcttttgatggacacaaaccactgttcttgtagatattagagagcacacagaagacggaataatatatgtccaaagtgcttttaaatagtgaagctatgtcatctccatataattccccatgaaatattgatagggtatatgtagacatgaaggaagtgttcgtatggctggatcatcactagaattctgttatttgaccctgatacttactatgaggccatgctgatgaagaacatagcaatcttacttgctcttcttagaagcctcgtataggtagctcacgataactacagctgcagcaacagctaccccgacagcactctgtgcgagtacagcaccagttgaaagatcagatttcgtagatgcagggccgctgctccgtggagtgaagccaagttcagaaagcttcttgtgcgattcagcgtagtccttgaagaaggtgtcttcatccctggcataaagatccacatagcgtctaaatgaaggatcttccaacaatgccttgtcagttgggagcttcagaagcccctcagattcccccttcagtagctcaagaaagtacgaattgtcaaacttcagaggctcctgagtccatgcgccttcaaatccagacctttcaggatgtgcccttcccagagtgtgacccccagataaagctactatatctttgtctgataagcccatccggtaaaagatgtccctcaagtgcagtgcacctttcttagcatcaggaagacgcccttcacgggggcaaactgacgaatcacgtcttccaggaatgaactcaacagttggacccccagtaacttcaactgcaacaactccagcaagctgataaaggtcagcatatgtgatcttagggctcttggctttaataggctcgagaagatcaatagcaatctttagaccagcatttgaaccgtgagtgtactcttcctcgtatctaattgaaccatttgcaccaccagtttttgtgttcacgtcataagtgcccgcgtcatgccatgcgaggcggagcatgatgggcgcgcatcccttggaggagatgagggcgcggaggtggcggcgcgccctgtcgacctggcggaggtactcggcgtccacgaccggggcggccatggcgtggcgtcgcgtcgccggcgaggttggaagccctagagagatcggccgcggcggcggagcggagcggaggcgtgcggcgtcaagccaagcgtgtggtgtgact

SEQ ID NO: 3300 - DNA, 1248 bp, Oryza sativa
  Clone ID: PAT_MRT4530_54995C.1
acgcgccgcgaggcacgcaaccgagtcgagactagacaaggggagcagccgccgcgatccaagtcctcctccgccgccgccgacgccgccatggatccgaagctggtggaggtgacgcagctcttctcccgcttcaaggcagccttcgccaggaacgacttcgacacctgcgtagacctgctgtcgcagctcaaggtccgcctcaccaagttccccagccttcctccatcatttcagcagacaccgaatgcagtggaagagctgaaaattgcgagggacatctatgagcatgcagttgttctgagtgtgaaaattgaagaccaagatgcatttgaaagggacttttgtcaactcaaaccttattacatggatacatgcggcataattccaccatcaccacaggagtatccaatcttgggtcttaatcttctaaggctgttagttcagaacagaattgcagagttccacactgagctggaacttctgccggtcacagcacttgaaaatccttgcatcaagcatgcggtggagcttgagcagtcatttatggagggtgcttacaaccgagtgttgagcgctcgccaggctgtgccccacgaaacatatgtgtacttcatggatcttcttgccaaaacagtcagagatgaactggctggttgcagtgagaagggttatgattatatgtcaatagctgaagcaagacaagtgctgatgttcagctctgacaaagaattgcaccagtacatcgcagaggagcaccctgaatgggaggtaaaggatggttccgtcttcttccagaaggcgaaggagacccagccctgcaaggagataccatctttgcaggttatcaaccaaacgctcagctatgctagagagctggagcggattgtatgatttgttaatgaatatcatttgagatcatttgggacggcatgttcatgctatgtacacatcaggtgtcacggttgagatgcgcatgttgcagctttgaacgtttgagatgcccatgttaccttatgatactttttttaaaaatttcatttaatgggctaaaaaaaaaaaaaaaaaaaagctgaacagtaactctgatcgtgttttgatatgtcagttcgtgatcaatttactttgctgaatagctgtcctgaaaatgttcagtattagtcgtgaattgcaactgcaaactgttgggcttatgatgatgaaatgagatcgtacttattttgatgatcaaaaaataaaaaaaaaaaa

SEQ ID NO: 3301 - DNA, 4499 bp, Oryza sativa
  Clone ID: PAT_MRT4530_55252C.1
ggaaaaatggggtgcccatgcggccctgcccaatagcgttgctgtacctttcagctttataatctcgcccctcgcgagagagactccccccatcctgcagactcgccccactctcttgctcagctcctcctcttcatccagtcctcaaaactctctctgatctctctctcttgctgaaaattctccgcacactccggtgggcttaagcggtggcggcgtctcgcctgggtgggcgagatccctctcttgctcgtccgcaaggtcgctccccctgcgagtccaatctactgacgagctgggaggagcaaaggagggggcaattggagctccgctcggttccaattcagccccaattttgagccccccggctgcggggttcggccagttgagacgccatgtatcgggtgaagagcgagagcgactgcgagatgatccatcaggagcagatggactcgccggtggccgacgacggcagcagcggggggtcgccgcaccgcggcggcgggcccccgctgaagaaggggccatggacgtcggcggaggacgccatcctggtggactacgtgaagaagcacggcgaggggaactggaacgcggtgcagaagaacaccgggctgttccggtgcggcaagagctgccgcctccggtgggcgaaccacctgaggcccaacctcaagaagggggccttcaccgccgaggaggagaggctcatcatccagctccactccaagatggggaacaagtgggctcggatggccgctcatttgccagggcgcactgataatgaaataaagaattactggaatactcgaataaagagatgccagcgagctggcctacccatctatcctaccagcgtatgcaatcaatcctcaaatgaagatcagcagtgctccagtgattttgactgtggcgagaatttgtcaaacgatcttctgaatgcaaatggtctttacctaccagattttacctgtgacaatttcattgctaattcagaggctttaccttatgcaccacatctttcagccgtttctataagcaatctccttggccagagctttgcatcaaaaagctgtagcttcatggatcaggtaaaccagacagggatgctaaaacagtctgatggtgtgcttcctggattgagcgataccatcaacggtgtgatttcctcggtggatcaattctcaaatgactctgagaagctcaagcaggctgtgggttttgactatctccatgaagccaactctaccagcaagattattgcacctttcgggggtgcacttaatggcagccatgcctttttaaatggcaatttctctgcttctaggcccacaagtggtcctttgaagatggagctcccttcactccaagatactgaatctgatccaaacagctggctcaagtacactgtagctcctgcgttgcagcctactgagttagttgatccctacctgcagtctccagcagcaaccccttcagtgaaatcagagtgcgcgtcgccaaggaatagtggccttttggaagagttgattcatgaagctcagaccctaagatccgggaagaaccaacagacatctgtgataagttctagttcttctgtcggtacgccatgtaatactacggttcttagcccagagtttgatatgtgtcaggaatactgggaagaacaacatcctggtccattcctcaatgactgtgctcctttcagtggcaattcattcactgaatccacccctcctgttagcgctgcatcgcctgacatctttcagctctccaaagtttccccagcacaaagcacttcaatgggatctggagagcaagtaatggggcctaaatatgaacctggggacacttcacctcatcctgaaaacttcaggccagatgcattgttttctgggaatacagctgatccatcagttttcaacaatgccatagcaatgcttctgggcaatgacttgagtatcgattgcagacctgttcttggcgacggtatcatgttcaattcttcctcgtggagcaacatgccacacgcctgtgaaatcctgcaaacctgtgtcaccagcggcagcgatgacgcaaggatcggccaggtgtcaggccatacagagataggagttgtgatactgcaacaggctgagagttcttctcctgatgcttccatgactgacattgcacctattcttgatgagattgacccgctcttgggtgcaagctctactcatcctgatacaattccaaaggatgattcggacactgattcacatgtttcctcacaggatcatcaaactgatgatgatagtaatgatgaaactgacaataatgatgctaaagagaatggtgaggaaaagaataaagaacaaggaaaggaagctgcatttatttggacagcagatgatgaaaaaaatctgatggatcttggatattctgagatggaaagaaaccgcaggttggagcttttgatggccagacgaagatccaggaagaacataagaagaagcggcaattctggctcagcaccctcagttctgcatacaaggaaaaacccattcgatcttcctcttgatcagtccaatgatggtgatgtttctgcagataataatgaggaccacaaggacctcgatgaaaaagatttgcccaatgagcatgggtctccagctctgcagagacaggatagcgaccttgcggatgttggaagtgaatgctcggatggcatcaactccgtggatgttgaattagacaacagtgacattgatgatcgtgagattgctctacaacactttgtctttgaaagatcacaggaaagagaagcatatctttcctcaacaaaaggaaagggtcctgaagatgattacctgctcagttcagttgggaactccaagacacttcatccagtagctgacctgtttagctgggaagatggaaatggtgaaagcagccttggtgttaactcttcccataacatgtcagttgaattctcggactgggtttcatcccccaagccaattgcagagcatgattcaggaccagagaaccttcaggagtttcttaatactgaagttgcatcaagttcaaagacaattgttctaggcgcaagaaatccagctgaaaataatggaaatgttgattccatatcctattcaaacaatgaaatgccttcagataacttgggtcatgggtccatggagttcccatctgaattttgtaatgaatcactgccagtaatatctagggacttgcaccctatccctgaagagagggttgtcgagaacttcaatgtgcaagaaaagcatgaagcagaagaaacagctgcaggatatccacttgattctgatgatgatgctgataaaatctatcctgagcccatggaggacaatgtaattgatgaaagtttcctatcagaactggatgcggtaggagatttccgggtagaagcaacaagatcggaccagcagatgcctgatgttgactcccatattgataataacacttccaatggtgttgcagagagctccttgattagccctcagatttcaagtaacatattttcaaatatgaaatatgccagtatgctcgaacatgaggagaattctccattggttgatgacctaaatggcaccggtcctgaatttggttggtcattaggagcatcttatgatgaccctgagcagactgtctacaatccgaggcgacggattcttggagcaagtcgttttgaagaaactaacacagagatgaagccactatttgatgagacagaagcatcttttgtcaatgcaccaatagaagcaaacttggtagttggaccaagtaaagtggatgttgctaatgagtctgagttaactaaaactgatacaaacatgatcgttcttgatgccaattctctggaggatatagagacggcctttaaacaagcaagcaatggcgttgttgagtccaccgtggacaatgaaaccccacaggagcacacaactgctgctatgaacagttccttcgaagaaaacgaagacaagcatggatgcggtgatactgtaaaattcaccatgcatgatgagcttccagaaggaacacatattgaaggtaacacagttggagatggtaaagagcctgaaccaatggggattacaagcagcatggatgtcattgatgcaaaatccatcgatgacatatatgctgctttgaagaagcagtcaagtgctgctgcgaatagttccttcgaacaaaacgaaggcaagaacggatgtggtgatactgtaacattcaccacgcacgatgagcttccggaaggaacacacattgaagatagggataatacagttgaagatggtaaagagcctgaaccgattgggactacaagcagcatggacactattgaggtgaaaacaattgatgacatagacgcagtgttcaagaagctctctgatggcggtaccaagagtgctgcccaggcagtggattgcgagaatacttgtgaagcaagtgatgaaagtgaacagcactga

SEQ ID NO: 3302 - DNA, 1043 bp, Oryza sativa
  Clone ID: PAT_MRT4530_55374C.1
cggacgaggaggcaagagcatccgtattaaccagccttttgagacttgagagtgtgtgtgactcgatccagcgtagtttcagttcgtgtgttggtgagtgattccagccaagtttgcgatggcttctcagcaggaacgggctagctaccacgccggcgagaccaaggcccgcgccgaggagaagacggggcgcatgatgggcacggcgcaggagaaggcgcgggaggccaaggacacggcgtccgacgccgcggggcgcgcgatgggcaggggacacggcgccaaggaggcgaccaaggagaaggcgtacgagaccaaggacgcgaccaaggagaaggcgtacgaggcaaaggacgcggcctccgacgccaccggccgcgccatggacaagggccgcggcgccgcgggcgccacgagggacaaggcgtacgatgccaaggacagggcggctgacacggcgcagtccgccgccgaccgcgcccgcgacggcgccgggcagaccgggagctacattggacagaccgccgaggccgccaagcagaaagcggccggcgccgcgcagtacgccaaggagaccgcgatcgccggcaaggacaagaccggcgccgtgctccagcaggcaggggagcaggtgaagagcgtggcggtgggggcgaaggacgcggtgatgtacacgctcgggatgtcaggcgataacaagaacaacgccgctgccggcaaggacaccagcacctacaagcctggaactgggagtgactaccagtaatacggtataagaagcatgtgtcgtctttggcactgatgccaaagtgtacgtgttgtatcctcttttttaagtttcagctcgacttcgacgtgttcggtgtcacactttggtttttcagttgtgctcaactgttcatgtttctggttccatggagggccagtgtggaggtcaatgtttaagctttcgttttaaaatctgataataaagttggttaagacctgaaaaaaaaaaaaaaaaaaaaaaaaaaaaaaaaaaaaaaaaaaggacggcacagacc

SEQ ID NO: 3303 - DNA, 899 bp, Oryza sativa
  Clone ID: PAT_MRT4530_5542C.1
cggctatatcttctttagggaatcttgtttccatcagtctggagattcaaaaaggaaagtgaatcctacacattaccgggagccaaggttttacactaaggtgtttaaagagtgtcaagctcttgatcaagatgggaattcctttgaactctctgtacttacttgcaagtgtgttggagcttacgtgaaaagcaagaaaaatcaaaaccagatatgttggctatggcaaaaggttgattcaacagaagatcgggggtttcaaagatttttggacaatgtgcagtacaaagccagtggaatattacgctatgaacgcatctttggagaaggctttgtgagcactggtggaattgaaactacaaaagaatttgtggacaggctggatctcaaacctggccagaacgttcttgatgttggatgtggaattgggggcggtgatttttatatggctgacaagtatgatgttcatgttgttggtattgatctttcgataaacatggtttcttttgcacttgagcgtgctattgggcgtaagtgctcagttgagtttgaagtcgctgattgcaccaaaaagacatacccagacaacacgtttgacgtcatctacagtcgtgatactatccttcacatacaagataaaccctcactatttaaaagtttcttcaagtggctcaaacctgggggtaaggtcctaattagtgattactgcaagtgccctgggaaaccttcagaagagttcgcagcttacattaagcaaaggggttatgaccttcacgacgtcagggcttacggacagatgcttgagaatgctggtttccatgatgtcattggtgaagaccgcaccgatcagttcctcgagttctagagagggacctggtaaagttgaaagaccaaaacca

SEQ ID NO: 3304 - DNA, 1640 bp, Oryza sativa
  unsure (1)..(1640): unsure at all n locations
  Clone ID: PAT_MRT4530_55761C.1
atggaggtggagtcgccgccgaggcctgcggaggaggagggggaggggtcgccgacgaggagggagatcgtgctggggaggaacgtgcacacggcgtcgttcgcggtgaaggagcccgacgcggacgacgaggagaccggggagcgggaggccgccatggccagcgtcctcgcgctctaccgccgcaacctcgtcgagcgcaccaagcaccaccttggttacccgtataacctggacttcgactatggtgcacttggccagctgcaacacttctccatcaacaaccttggtgatcccttcatcgagagcaactatggtgtacattccaggcagtttgaggtgggagtattggattggtttgctcgcatctgggagttggaaaagaatgagtactgggggtacattacaaactgtggcacagaaggaaacctgcatggtattcttgttgggagagaggtattccctgatggaatcctgtatgcttcccgtgagtctcactattcagtattcaaggcagcaaggatgtataggatggattgtgttaaggtggacacccttatttctggggaaatagattgtgaagattttcagagaaagttattgctaaacagagacaaacctgccattattaatgttaacattggaacaactgttaagggggctgtcgatgatcttgacttggttattaaaacacttgaagaaggtggctttaaagatcggttttatatccattgtgacggtgctctttttggactgatgataccatttgtcaagaaggcacctaaggtatcatttaagaagcctatcgggagtgtgagcgtttccgggcacaagtttgtaggatgtcccatgccatgtggtgtccagataacaagactggagcacataaatcgtctttctagcaatgttgaatatctggcatcaagagatgcgacgatcatgggaagtaggaacggccatgctccgatcttcctctggtacaccctgaacaggaaaggctacaggggcttccagaaggaggtccagaagtgcctgaggaacgctcactacctgaaggaccgcctcaaggaagctggaatcggcgccatgctcaacgagctgagcagcaccgtggtgttcgaaaggcccaaggacgaggagttcgtccggaggtggcagctcgcctgcgagggcaacatcgctcatgtcgtggtgatgcccagtgtgaccatcgacaagctggactacttcctgaacgagctgacggagaagcgggcgacctggtaccaggacggatcatgccagcctccctgcctcgccaaagacgtaggcgaggagaactgcctctgcagcatccacaagaagtgaagaggagcttatatattataacaaggagccatgttgcagtgtagctttgtgttgttgtcgtggcctgaagttagtactcctaatgcgttgtgttgtaccccgatgccttctgtatgtaataatgcgttatgcagtcagtgcagcttataatgttgttatcgtcaggatattacagttaagttaaaattgatgggatgaaaattgcatcatctttacctcttntgttntcaaaaaaaaaaaaaaaaaaaaaaaaaaaaaaaaaaaaaaaaaaaaaaaaaaaaaaaaaaaaaaaa

SEQ ID NO: 3305 - DNA, 281 bp, Oryza sativa
  Clone ID: PAT_MRT4530_56041C.1
ggggggggcgccaccaccaccttttccaccacaagaaggacgactagcctgccaccggagtatactcctacggggggggggtctacacgtctgagactgtgaccaccgaagtggtcgccggcgggcatgacgagtactagaggtacaagaagggggagaagcatcacatgcacaagcagcacctcggggagggcgggtccctcgccggctgggccttctccctgtatgagaagcacgatgcgaataatgacccggagaacgcgcacaggcacaagatcacg

SEQ ID NO: 3306 - DNA, 1610 bp, Oryza sativa
  Clone ID: PAT_MRT4530_56399C.1
gcacgacggaacaaagaaagaaaatggaaaaaagattcatctcttcctcctcgtcttgtccccttccctcgtcgaaaccctagctaggctcgccgccggcgacgcccgcctcgccgatgcgctcccccacctgaccgctccgcctcgctctcccgggtcgtcgttgcctcaccgctgtgcccgcccacccccacctgggcagcgggcgggatccagtcccagatcggcgccatgtccaaggccagggtctacaccgacgtcaacgtgctgcgccccaaggagtactgggactacgaggccctcaccgtccaatggggtgagcaggatgattatgaagttgtcaggaaagttgggagaggaaaatacagcgaggtctttgagggtattaatgtcaacaacaatgaaaaatgcattatcaaaattctcaagcctgtgaagaaaaagaagatcaaaagagagataaaaatacttcagaatctttgtggaggtccaaatatcgtgaaactgcttgatattgttagagatcagcactcaaaaacaccaagcttgatatttgaatatgtcaacaacacagatttcaaagtgctatacccaaccctgacagattatgacatccgttattatatctacgagctactgaaggctttagattactgccattcacaaggcatcatgcaccgcgatgtgaagcctcacaatgttatgatagatcacgagcttcgaaaactccgattaatagactggggccttgctgaattctaccaccctggcaaggaatataatgtccgtgttgcttcaaggtacttcaagggacctgagcttcttgttgacttgcaagattatgactactctttggacatgtggagtcttggttgcatgtttgctggaatgatcttccgcaaggagccatttttctatggtcatgacaaccatgatcaacttgttaagatcgcaaaggtacttgggacagacagcctgaattcatacttgaacaagtaccgtattgagcttgacccacagcttgaagccctcgttggaaggcacagcaggaaaccttggtcaaagtttattaatgctgacaaccaacatctagtatccccagaggccatcgatttccttgacaagcttcttcgctatgatcaccaggatagacttactgcacgtgaagctatggcacacccatactttctccaagtgagggctgcggagaacagtaggcctcgtgcacaatagacaaaagaacgggactattgctgactgtcgattagcagcagtcatggagctgcaccgtattagtgacttagtccagtcacttgtattgggagtttgagattcggtaatggttgaatcacctggcaagaggattctgggagagcatgtaacagctcatgtgtgcttaaccgcaaacgtggattgtgatttactcgtgctgtttgtatctttgtttctgacgattgattgaaacacattgttctcgttgagtataaatgtttttttttaatttgcgagttggtccgttttaagactgattgtaatgatcaattagctgtaccttaatggttttatgcaccttgacttcggacatcatcgctgaaccatttcaattccct

SEQ ID NO: 3307 - DNA, 391 bp, Oryza sativa
  unsure (1)..(391): unsure at all n locations
  Clone ID: PAT_MRT4530_5639C.1
ccttctaatattgatcagaaacaaatcangacattacagataattttggaggggggctcaagggggtgggggggtcnctnccnganggatttnttcagtatttctcaagccgattcccaaaggtggtaattaaagggtgcgggggcatgtccgagcattggaagggcgaagaagctttcagcaaatatttccttggaagctcggcgtagctgtgacctggaggaggggtgaagggcctgccctggctagtgtgtgcactaacactcttctagcaaaaatgtgtggacatgggatttggaccatatatcataggggaaagaaaggtcagcctgtacattggattccacagaattggggattacttataggaaatcaaatcttttacctgact

SEQ ID NO: 3308 - DNA, 2366 bp, Oryza sativa
  Clone ID: PAT_MRT4530_56655C.1
gatcccccgggctgcaggaatcggcacgagggagagagagaactagtctcgagtttttttttttttgtttgggcaccggaccccccgagagcgctctagtttccatttttttttttttttgggcacgatgaacagcgtccatattatccatagcgcagtgatatttcaccgctaaacattccaagaacaatagtacaatagcagtttgttggttacagcattgtcactcaaatctttcctggggttttgccagttgccaagatatagatgccattgttcatcttgatctgacaaagctactgtctcccccaggagtaggctcattttggcatagcaagaccgagaattttacagcatccaacggaatcagacgctgcctgagctaaatagagagaagacacaggtttgatacctttcttcagttattcgcacgccggtttggtgtcaaagctagtcaggcagatcgcaaatgcctggaacgccgagagcgggtacctataatccattgtgaatatatcctttccgattttcccaaattggaggatgaccttctcctgctctgccgcagggataccaagggaaggatcaactgaggcaacgagctggaagttcttgactgatgctactgtaacgcgccctcggaagttgaggcaccagcactgcagctgctcatgccagcggggagctttgttcttcagaacaagaggcacttcatttgtacagaccggtccagacaaatcagcgctgaggcttgtcgatgaaaattctatggctggttcctttcctttgctagttgataaggcgggaacttgttcgtcaagtgagtggatgatgccggtaggggttggggccttcccaccttcctgaatacacaatgccggtatagagtgcatggtgcattgcattctccttggtcctcgattacgtaggacagtgagctcatatgagaccgtagcaacattgtaattgcctagtggcaatcgcggtgatacttgcttgaaatgtcgtttgcttggtcggttgtttggcaacactacagcatcgcaaggaggctggctgtcaaagattgtaaactttgtgccaaggaagtttggtttcagtttaccaacataggtgctactggatagagagaagtcattggagaccagtgagatcacaaaagaagtcctggtcgcacgcctaatcttgcgtgctgcaagcaaaagcttgtcgttttctccatgtagagatgggctgagccccaggtagaggagataggtggaagtcgccctgtccctcctcacaaagcactgcactggatgctcacgaggccccggctgcttgagggagatggggaaggtgatcctgccgcactcctcgagcgtcttcaccacctccttggtgacctcgcgccacgagcggcagacggcggcgcacgccaccacctgccgccgcgccggccacgtcgcctcgctggcctccaccctctggatcacgtccagcagcagctccggcggcaggttcgcccaccgcccctgctgctgctgatgctcctgacgctgcagctgctgctgctgcggcggctgctgctgctccgaccacaggaccggccaagaatgccgcgagccgccgcgcccgccgccggcgcgcccgtcagcggctcgcctcgacatgctgccgatgccgtccctcatctccctcagctcccgcacaatgctcttcagagacatcgccgccgcttaatggctaagcacccttcgctatcaccgaaggaaccccctgctgctgctgctactactactactactactactactactactactactactactactccatggcaagatccgccattactgacgaatctactctaaaaaaaaaatggcaggagacacctcataaagtagtccgcatcactgccatatctaacccccaactaaacaaatgaactttctgaaaaggatttgaagcacggggggctaccacgaacacagcttgctccagagcccaaattttgggcggatttggggagagcgcaagcaaagatccgagtttccctcgcacggcagctcggatctgggggcaacaaggcaatgcagcaacggagcaccggaagaaaccaggcttcgcgctcgggtagcctcaagatccaaatttccccccaaccccgcagcttaaaaagatcaaatttcccgcctcaagaacggatcaaggagcttctcctcccccatttcatcacagctcccatgagattctcccaactcctttccccccaaccagctccagatcagagcaatcaccctcccttcttcttctctcactctccccttcctctctcagccaccctgcaagctaaagatttcttcacggcatccaactcctcg

SEQ ID NO: 3309 - DNA, 2569 bp, Oryza sativa
  unsure (1)..(2569): unsure at all n locations
  Clone ID: PAT_MRT4530_56936C.1
cggcagtgcattagcgcgaagcagttttgctaaggaacgacaccatgcatacagcttttatgccttttgcatgagagatcaaacgtggaaagctttcctgactgcataacaagatggagtacggtgcagcaacgcgtggcgcgctcctcgcggccaccctgctcgccggcgcccggcgtagccggttgcccctctcaccgccgccgtcgccgccctctattcagattcagaatcgactttattcgatgtcgtcgcttccactaaaggctcgaggcgtgagaagatgcgaggcttctctagcaagtgactacacgaaggcatctgaggtagctgattttgattgggagaaccttggttttggaatcgtgcagaccgactacatgtatatcacaaaatgcggacaggacgggaatttttctgagggtgaaatgattccatttggacctatagcgctgaacccatcttctggagaaaatgcactgagaatgagaacaggtgcagaaagaatgtgcatgcctgcgcctagtgttgagcagtttgtggatgcagtaaagcagactgttttagcaaacaagagatgggtgcctcctaccggtaaaggttctttgtatattagaccgctactcatgggtagtggtgctgttcttggtcttgcacctgctcctgagtatacgttcattatatttgtctcgcctgtggggaactactttaaggaaggtttagctccaataaatttgatagttgaagataagtttcatcgtgcaacccctggtggaacccacgagcagcggccggggcttatcatcaatcggcgcctccctctctctcgctcaccgcctccttctcctcgcgatctatccaaacaaggggctcgctaagatcggcatgtcggactctgaggagcaccatttcgagtcgaaggccgacgctggggcgtccaagacctatccccagcaggccggaaccatccgcaagaatgggtatattgttatcaagaaccgcccctgcaaggtggtggaggtttctacctcgaagactggtaagcacggtcatgccaagtgtcactttgttgccatagatatattcaatggtaaaaagcttgaggatattgttccttcgtcccacaactgtgatgttccacatgtgaaccgcacagagtaccagctgattgacatatcagaggatggattcgtgagccttcttactgagagtggtaacactaaggatgatcttagactcccaactgatgacagtctcctgggtcagatcaagactggatttggtgaaggcaaggatcttgttgtgactgtcatgtccgccatgggggaggagcagatctgtgcgctgaaggacattggccccaagtaactccctcaagtggaaggcagaacagaggggcaactccctcaagtggaaggcagaacagaggggtaactccctcaagtggaaggcagaacagagggatccttatgtatcaaacctaaactaaaaaacaaagacatgtattgagaaggaatgctacaaaagacatccacccagcttgaagccgcagtaacaagtgcagtgattgctgggtgtggcattatctgattaccgctaccccatcatgacatttgggatcctgtattttccatggttttatttgtgccctctgtttggtatcaataattgatttggaacggtggaaaccatatactgaagctgaagattatcattgggtcatttcgtgcctatggatttttctctgaaaaaatcaaaaaaaaaccgatggcacagaagattgcaaaagaaaagggctattctgatgttctctacttggatgctgttcacaaaaagtatcttgaagaagtttcttcatgtaatatttttgttgtcaagggcaatgtcatttcaactccagcagtaaaaggaacaatattgccaggcatcacaaggaaaagtatcattgatgttgctctgagcaagggtttccaggtcgaggagcgacttgtgtcagtagatgagctgcttgaagctgatgaggttttctgcacaggaactgctgtcgtagtgtctcctgtgggtagtattacctatcaagggaaaagggtcgaatatgctggcaacaaaggagttggtgtcgtgtctcagcagctatatacttcattaacaagcctgcagatgggccaggcagaagattggctaggctggactgtgcaactgagttaggaagtaataaaatgttcatcaacatcaaaagatggacatgattatgatcatgtgtatccttcagttttgtagttttgttggtgtgacatcctgctgtatatgtatagacggcagtgcattagcgcgaagcagttttgctaaggaacgacaccatgcatccagcttttatgccttttgcatgagaaatcaaacgtggaaggctttcctgactgaaatatcgacaattataaaactattttgctatgttgattacaatatatatcctagataatctaaattaactgctttttttgggctccaaaaaaaagaaaaaaaaaaaaaaaaaaaaaannanaaaaaannnnaannnnaaaaanaaaaa

SEQ ID NO: 3310 - DNA, 2551 bp, Oryza sativa
  Clone ID: PAT_MRT4530_5736C.1
ctctttctgctgataagtagatggatggatcatgtgattgcattgagccgctctggcaggcggatgatctccttgtaaagtatcagtacatatctgacttctttattgcgctcgcttacttctcgatccctttggagctcatatatttcgttaagaagtcagcattcttcccttaccgatgggtgcttatacaattcggcgcattcattgttctttgtggggcaacccacctgataaatttgtggacttttgccatatataccaagactatagctgtggtactgacagtggcgaaagcagcgacagcggttgtttcgtgcatcacagctttgatgcttgtgcatataattcctgatttgttgaatgtgaagttgagagagagatttctgaaggataaggctgatgagcttgatagagagatggggattataagaacacaagaggagacaggaagacatgtccacatgctgacccatgagataagaagcacacttgacaggcacaccattctgcgaactacgctcgtcgagctgggaaggactcttgctttagcggagtgtgccctgtggatgccaacacgctctggatcggcccttcagctctctcatacgatatataacagcgcagcaattggatcagttgttcctatcaaccttcccattgtcagtaaggtttttaatagtaaccgtgtagtaaaaattccgcatacctccccgttagcttcgataacggctgacaaaagcaggtatgtgccaccagaggttgtggctatccgtgttccactgctgcaccttacgaatttccaaataaatgattggcctgagctatctgcaaaaagctttgcagtaatggttttgatgctccctccagacagtgcaagagaatggcggccgcatgaacgggagcttgttgaagtcgttgctgatcaggtagcggtcgcattgtctcatgctgccattttggaagagtccatgcgggcccgtgatctactaatggagcaaaacattgctcttgatgcagcacgtcgggaggcagaaatggctatttgtgcccgtaatgattttcttgctgtaatgaaccatgaaatgcggactcctatgcgagcaatcgtttctttgtcctctctccttttagaaacaaatcttagtgctgaacaacgcctaatggttgagactatactaaagagtagcgatcttctggcaactcttacgaatgatgttttggacgtttcaaagcttgagaatgggagtcttgagctggaaattgcaccttttaatttgcattccacctttacagatgtggttaatttgattaagccagtagcagcgtgcaagaggctctcggttatggtcactttggcaccagagttacctctacatgctattggtgatcaaaagcgattgatgcaaataatcctaaatgttgccgggaactccattaagttcacaaaggagggtcatgtttcgattacagcttctatggccagaccagatgctttgagaggtccacatgaacctgactaccatccagttgtctctgatggattcttttacctggctgttcaggtaaaagacacaggctgcggaatcagccctcaggatatgccccacacattcagaaagtttgcacaccctgaaaacgcaggcaaatggaacagtggcagtggattggggctggccctttccagaagatttgtcagtctaatggaaggtaacatctggctcgagagcgaaggcgtcgggaagggctgtaccgcgatgttctttgtgaaacttggcatgcctgagaaaccaaatgcaaacctccgaagaatggcgccgcaccctctacagccaaaccaaggagctggaggccctgatgccctcagtatatccataatggacagcaacccgagggttcctcgggttcgctaccaatcaagcgtatgagaagcaccgatgatgccatcgccatgccaaggcagagcatccgacccagttttgccatcacagtttacagctccatttgcagctctctttttgatgtatggatggtagatgttgttcttgtccatcagtggaggtaccttgggcatgctgggataagtttcattggcattcctgaatcttgatttcagttgtgagggtgattgggtggtcttaagtggtgacaattgggaaagctgatgtagtagtctgttgtctgcacgagtctgaagttactgggaagtgccaatttactgcaagtgacagtgaacatgaaggtctatggccatcttacatctctgataccctgagctatagaagagcttggacgaacgtgtttatttttcttacttttttttccctagattagggctacaacctggaagggatcgatctactagctgattgcagtatcatttgtactttttgttttttttttctgaaataagagtatcagtggtaattgtaagcgttactgcagtgctttataagcacaagcaaattatcatcaaatcaaattatagaaaaatctagtgaattaaaaagagctcaaaaaaaaaaaccaaaaaaaaaaaaaaatactgctc

SEQ ID NO: 3311 - DNA, 1518 bp, Oryza sativa
  Clone ID: PAT_MRT4530_57465C.1
tttttttttttttttagatgccaacatccaaggaaaccaaatgcttttatgttaagatgatataataagatgtcataggcttgggaagccctacaaaataccaccctgggagctgcacagctctccttatgcacgtagtacatatataaccgatgttatatacatggcagcttttagaacatatatgtacttcaaccaagtgatagtgggcctatgctacgagttacatgaccgtcagtgtgcattgcttgccgccatagaactctaatagaacaacatcgtccaaagctgaacttacagtcgggcatgccaggaatcaggagactggagggaccacctcgacaccgagaatcaccgatgccgttccaaagttcagatgtgcttcatcagagtggacgaaatgttggtttctggaactctcataaactgggttctccatcagaagatcccaggtcacctggttgaccgaatagttatgcgaggttagcgacgagcatacaccatatcagcttgtccccctacttgctgcttgctgaggctggggcagctcaagtacgatatggaagaaactccgctccgactcccttatatattggacctcgccacccatcaattttaggatcttcctgcatatgcttaggccaataccctcttgggttgtccagcgggagttactaaacatgtcttgaacaatctctgggggaaggccttcgccaggacaggcaaacctgaagaggaaaagcattgtgtctgttccatcagaattttgttttatatttggtctgacctgtatctccacccagccattttcagctggagcaaacctcaccatgcttagcaaaaagtcacataaaacttgttgaattctatattggtcaccatatgctgaggcttctttaatttcatcagggatatctcgaataagttgtaaatctctttctctcaactgtatcatcacttggctgacaacagcattcataacactacctagtgaaaattcacctttctcaagcaccaaagagccatcctcaatactttggaggctagcatccttaacaattttggacatctgtttctcacaagcagtgctggtttcaagaaactgcctctggtcatcctttagatcagtcatctccaataacgagtttgtaaatcggataccgttgagaggattctttatttcctggtaaatgtaagccaattccttcatccttgcataacacttcttttcatggtgtctctgaatctcaaaggcttgctgtaattcaggacttgcaatctgcaagaaacagaaggctcctatggcctcaccatccattctgctcctcgtgtttgcagtcaataaggcctgcacgtatttcccattcttgtcaaaaaatgaaaacggacgcgtgggacaatcctgtcctcctatagcgctgtgtaggacaatcattaatttcgcttatgcataccgtgcctatcagtcgccatcaattaccaaagaccttgtttaccataagttaaacaacaacttcc

SEQ ID NO: 3312 - DNA, 786 bp, Oryza sativa
  Clone ID: PAT_MRT4530_57804C.1
atgtgccaaaatggacacactctgtgttccacctgcaaagctagggtgcacaaccgttgccctacatgcagacaagagcttggtgatatcaggtgtttggccctggagaaagtagctgaatcgcttgagcttccctgtaagtactgctctttggggtgcccagagatcttcccatactacagcaagataaaacatgaagcgcagtgcatgtttagaccatacaattgcccttatgctggttctgagtgtgctgtggtgggtgatatcccttatcttgttgcccatttgagggatgatcacaaagttgatatgcatagtggttgcacattcaaccatagatatgtcaagtccaacccacgagaagtcgaaaatgccacctggatgctgacgaaatattggcacattgaatcgctgtctggtgaggaggtcttccactgtttcgggcaatacttgtgcgtgcactttgaggccttccagcttgggatggcgccagtctatatggcctttctccgtttcatgggtgatgaaaatgaggcaaggaactatagctacagccttgaggtcggcgcaaacggcaggaaaatggtatgggagggcaccccccgaagtgtccgggacagccaccggaaggtgcgggacagccatgatggcctcatcatccagaggaacatggcgctgttcttctcggggggcgaccgaaaggagctgaagctgaggatcaccggccggatctggaaggagcagcagaccccagacggtgcctgcataccaaatctctgtagctaa

SEQ ID NO: 3313 - DNA, 2114 bp, Oryza sativa
  Clone ID: PAT_MRT4530_57841C.1
cccacgcgtccgcccacgcgtgcgcccccgcgttcggtgcaaaggatttgccctgctcactgctcggtcactcactcactcaccatgaagtccatgaggctttcctacatccctcctgctgcttctgctgctccacagagccccagctatggcaggaagaagaacgcctccgccgctccgccatcggctgccgcctccaccaccgttctcacctccccgccggtgaccaccacccgcactccgaagcagaccgggcaagaggacgagcagttggtagccaagaccaagactacgagaactgttattgctacgacgaatggcagggcggcgccgagccagtctcggcctcgccgccggcctgcccccgccgccgcggcgtcggccgcttcgctgccgatgacgttctgcaacgcgctggaggaggtgatcaacacgttcatcgacccgccggcgcttcggccggcggtggacccgcggaacgtgctgaccagcaacttcgtgcccgtggacgagctgccgccgacgccctgccccgtcgtgcgcggcgccatcccgcgctgcctcgccggcggcgcctacatccgcaacgggcccaacccgcagcacctcccgcgcgggccgcaccacctgttcgacggcgacggcatgctgcactccctcctcctcccgtcgcccgcgtcgtccggcgacgaccccgtcctgtgctcgcgctacgtgcagacgtacaagtacctcgtggagcgcgacgccggcgcgcccgtcctgcccaacgtcttctccggcttccacggcgtggccgggatggcgcgcggcgccgtcgtggcggccagggtcctgaccgggcagatgaatccgttggagggcgtcgggctcgccaacaccagcctcgcctacttcgccggccgcctctacgcgctcggcgagtccgacctcccctacgccgtgcgcgtccacccggacaccggcgaggtgaccacgcacggcaggtgcgacttcggcggccgcctcgtcatgggcatgaccgcgcaccccaagaaggaccccgtcaccggcgagctcttcgcgttccgctacggccccgtgccgccgttcgtgacgtacttccggttcgacccggccggcaacaagggcgccgacgtgcccatcttctccgtgcagcagccgtcgttcctgcacgacttcgccatcaccgagcggtacgccatcttcccggagatccagatcgtgatgaagcccatggacatggtggtgggcggcggctcgcccgtggggtcggaccccggcaaggtgccccgcctcggcgtgatcccgcgctacgccaccgacgagtcggagatgcggtggttcgaggtgccgggcttcaacatcatgcactcggtgaacgcgtgggaggaggccggcggcgaggagctggtgctggtggcgcccaacgtcctctccatcgagcacgccctggagcacatggagctagtgcactcctgcgtcgagaaggtgcgcatcaacctccgcaccggcgtcgtcacgcgcaccccgctcgccgccgggaacttcgacttccccgtgatcaacccggctttcctcggccgccgcaacaggtacggctacttcggcgtcggcgaccccgcgcccaagatcggcggcgtggccaagctcgacttcgaccgcgccggcgagggcgactgcaccgtggcgcagcgcgacttcgggcccgggtgcttcgccggcgaaccgttcttcgtggccgacgacgtcgagggcaacggcaacgaggatgacgggtacttggtgtgctacgtccacgacgaggccaccggcgagaaccggttcgtggtgatggacgcgcggtcgccggacctggagatcgtcgcggaggtgcagctgcccggacgcgtcccctacggcttccatggcctgttcgtcacgcaggccgagctccagtcacagcaccaatgatacaaaccaacgtagcaatgtatagaattcacgtatacattttccatacgaaattacgagttactgtggaacacgtagtataagtgcacacatacttcgagaaaattatgtagagtacatatgaaatgaaagaatgattttaactaaaaaaaaaaaaaaaa

SEQ ID NO: 3314 - DNA, 1883 bp, Oryza sativa
  Clone ID: PAT_MRT4530_5803C.1
caagaagcatactagcacgctacgaaaccccccttctcttcgtccccaaattgcactacaaaaaaggccgcccctttcttctctcctcgtccttatcaccaccaatccgatcctcttctcttctcttctcttcttccccacatccagttcgattctcatctctcccacaacaaatcacgccatggatccctacaagcatcggccgtccagcgggagcaattccaccttctggaccaccaactccggcgcccccgtctggaacaacaactccgccctcaccgtcggagagcgaggccctatcctccttgaggactatcatctgattgaaaagcttgcacagtttgacagggagcgtatccctgaacgtgtcgttcatgcaaggggagccagtgccaagggattttttgaggttactcatgatatttctcacctcacatgtgctgattttctccgtgctcctggtgttcagaccccagttattgttcggttctccacagtcgtgcatgagcgtggaagccctgagacattgagggatccacgtggttttgctgtcaagttttacactagagagggtaattttgatcttgttgggaacaatatgcctgtcttttttatccgagatgggatgaaattccctgacatggtccatgctttcaagccaagtccaaagaccaatatgcaggagaactggagaatagttgatttcttttcacaccacccagagagcctgcacatgttctccttcctctttgacgatgtaggcatcccactcaactacaggcacatggagggttttggtgtcaacacctacaccctaatcaataaggatggaaagcctcaccttgtcaaattccactggaagcctacctgtggtgtcaaatgcctgttggatgatgaagctgtgactgttggcggcacctgccacagccatgccacgaaggacttgactgattctattgcagcagggaattacccagagtggaagctttacatccagactattgatcctgatcatgaggacagatttgacttcgatcctcttgatgtcaccaagacatggccagaggatatcatccccctgcagccagttggacggatggtcctgaacaaaaacattgataacttctttgcagaaaatgaacagcttgctttctgcccagcgataattgtccctggaatccattactctgatgataagctgctccagacaagaattttctcctatgctgatacccaaaggcaccgtcttggcccaaactatttgatgcttcctgtgaatgcaccaaaatgtgcataccacaacaaccaccacgatggctccatgaatttcatgcacagggatgaagaggttaactacttcccttcaaggtttgatgctgcacgtcatgctgagaaggtccctattcctcctcgtgttctaacaggctgtcgggaaaagtgtgtcattgacaaggagaacaatttccaacaggctggtgagagataccggtcatttgaccctgccaggcaagatcgttttctccagcggtgggttgatgctctctcagatcctcgtattacacatgaactccgtggcatctggatctcctactggtcgcagtgtgatgcgtcccttgggcagaagctggcttcacgtctcaacctgaaaccaaacatgtagatcggccaggaggaatccagtggtggtgctatgttggacagtcaaacatgaactgtaatgtgtcgaccagccgtagtcgtgaataaaatgtgatacggtgatatgtatactggtgacgcaagttgtgaaactgtatctggaatcctgaaaatatgccttgctgtgtcttgggaaagagataataaagactgatacagtgggtgctaaaaaaaaaaaaaaaaac

SEQ ID NO: 3315 - DNA, 1754 bp, Oryza sativa
  Clone ID: PAT_MRT4530_58916C.1
gcggtgccggcggggtgcgcctcgtcgcttttattagacgccgccgctgtggtggtgtttacttcgttcgtttggatcccacgcaggccatcgccatgggcgtctcggctctcctccgcctgtagatcgtgtggatcgtgcttacctgcgatggatagggcgagcgagaaccggaggctggcggcggtggggaagcccgtgccggggatcggagagatggggaaccggaggccgctcagggacatcaacaacctcgtcggggcgccgccgcacccgtccgcgatcgccaagaagccgatgctagagaagagtgggaaggaagagcagaagcctgcattggtggtgagccaccggcctatgacgaggaatttcgcggcctccttgacgcgaaaagaacagcttgaccatcaggtttccgtggctgatgcagcggtcgtctgcactgatccacagaagaaccccatccccgatggcacagttgacgacgatgtggaatcgtgcgaatcgaacgactatattgccgtggatgaatgcaatgatactgatgaggatgagtccatgatggacattgacagtgccgactcagggaatccgcttgcagcaaccgagtacgtcgaagagttgtacaagttctatagagaaaatgaggaaatgagttgtgtgcagcctgattacatgtccagtcaaggagacataaatgaaaagatgagagcaattctgattgattggctcattgaggtccatcacaagtttgagctgatggatgagactctctttcttactgttaacatagtagacagattcttggaaaaacaagttgtgccaaggaagaagttgcagctagttggagtgacagctatgctccttgcttgcaaatatgaggaagtcgcagtccctgtcgtcgaggatctagtgctaatttctgaccgggcttatacaaaaggacaaattctggaaatggaaaagttgatcctaaacacactccagttcaacatgtctgtaccaacaccttacgtttttatgagacggtttctgaaggcagctcagtctgacaagcagctacagctactttcctttttcattctggagctctccctggtggaataccaaatgctcaagtaccgaccttcgcttctttctgctgctgcagtttacacagcacaatgtgctctcactcgttgccagcagtggacaaagacctgcgaactacatagtagatataccggagagcagcttcttgagtgttctaggatgatggtagatttccaccagaaggccggagcaggcaagctcaccggcgtgcaccggaaatacagtacgttcaagtttgggtgtgcagccaaaacggagcctgctctcttcttgcttgagtcaggagcaggaggttacaaccttcagaagcagccttgttgaatgaatctattcccctggatagatttttttaacttagcttcagaacaactacagcaagcatgttgatgcttcacaaaagtgcagcagatttaccttactacagctcttttgtggtaatgtaaacttggtgtgaatgatggataatctgggtggtggtcagtccttcagttatactggggggctaataaatgattcaggcattcagcctatgtaagctgaatctcttgtaaatctacatgtgttcaagtagcatgaagaaaataacttgcatgttgagactttcagattcctcttaaaaaaaatgaaaattcccattggggcgtgcaaaaaaaaaaaaaaat

SEQ ID NO: 3316 - DNA, 3725 bp, Oryza sativa
  Clone ID: PAT_MRT4530_59607C.1
ctagtggatccccgggacacagaacaatttatatttcctttgcagtaaatgttagataaacccatgcctaccatacatacatactggaggctaaacctatcaccttagtgctaaatgaatttactcgttatacacaccaaagaggcgaaaaacaacccaaaaaaaaagaaatttctataaaggagaattttctatagctatctccttgggtcatgcagacgtgtcattggaacttctgaacggttcacctgatttacattctcgaatttttctatctctcgggcaacttgaatatcactgggggtaaaatactctgtaaaggccttgattacaaaatgtggtaccattgctgcaacaacaatgataagcagcagtaaccaaaacaaacctgtccccatttacttcctaggataaccatatccaggaagaaaccaaatggagtcgatcacaaagaggcaaatggttgttgctgctattgttccccacacaaaagcatgtacgatccaattccaccgaaagatgtccatggctagtagcatatttacaacaatgacaggggcaagtgcccatagatctcccagactagacatatctatcgtactttgtctatatgcaaaatatggcatgtagaaaacaaccagactttgccatagcgcttcgagcatattgaggacaaacaaatttacattatacttctcatccctttggccagatccatatagctttggataagctagtagtgtttccttactaagatccttgtcaagaataccaacaacaattgttggaagggatgtatatagcacagtatacaaaaggctactccattctgtgatagcagttgtcagagtgaatgctgtataaagtacataccagaaaagaaccaagacaaatgtcgcattcttgtaaaagttgtagaggatcatatatgacattctttgataattccaatggccatgaactaatagaagagggaccaagaatctgaattggcccatcgcaaaatctgatgccattacagcctgccgtccttcttgaccactgatgccaacaccaacatcagccatttgaatcattgaaacatcatttgcaccatcaccaattgctaaggtcatgtcatctgttcggtttttgataagtgcaactatccctgccttttgtaacggggccacccgacaacacaatacaacactacattctcttgccactttgaaaagctcttcttgcaactctgtctcaagtatgtaaaccaggctgttaccatctacaattaacgcaagagttacaccagcagattctgatgctaattctggactctgtgtgccagttgaagcaattctgagcttcttaatcgttgcatgtgcttcctcgagactcctcttacaagactcctttgagttgttgtttatcacaatttgtgtcatgtcattggtcagcagtttacaagagtagccaatagaaattgctgtctcctgcttatctcctgttaaaatccaaacctttatgtctgcttgtcgaagagattctattgtttctggaaccccatcttgaagcttatcttctatcccagtagcccccaatatgcggatattgttctctatattggccgcaactgatcggagtaaatttccccttccaagtactgacgtgctagcattttcatatgccaattgccactcctcaaactcaggttgactcaattcacgcatgccaataacgagagttcttagaccaaacgatgaatatttgtggaggtgtgcctctgtagcacgaacaatgtccagatctaatgaatttttggtaattccaaacaatgaactgtccgcacctttcacatatagcttaacagtcttatcggggcagccaactatgacagacatcctcttacgatcactatcaaactcatgaagtcctaatatatcaaatctctgtctgtcaccaaggacatcaatcaccacataaccagatgttcgctcaacaagcacaatgccataagatgccgcagcatacactagtgcctgctcatcaggggactcaccctgataatcaatcaacttttgcttagaatcacgagtatctaggacaagtggcacaatggtattacatgcagcaagagcaaggaagaattcgaggacaagctttgtttcctcatctgtgccaccacccctcagtaacttcaaaagccgatgatcaatcttgactgccatcttgggtgtccataggagatcatcgactacaactgagtatccgcatgaatctttgccagaacagtaatcaaccccccgaattgatgcacactggaactccatcttgttctctgtcagcgtccctgtcttatcagaaaatacatatttaatctgtcctagatcctcgtttatattcagggccctgcattggaactttgaccttgatgactcatcatacaaatctctgtcagcacccatgaaatatgcctgcccaagccgtaccaactccattgatatatacaaagagatcggaatgatgacctgatatacaatcaccgccatgaggaatgtaatgaatatctgcatccccatgccatagtaattgtagttcttccctgtcgtgtaatccttctccctaaagaactgggtgaattccaaatccccacggtgattcagtatccaaatccccgcgagcacacttgcggtcgtgcacatcccaatgagcataatggacagtatgacagtctcccggttcaactgtgtctccaaccggctccgtttcgacggcgccccggagctattaagcatgaccttggtctcctttccagcatacacaacaacccctatcgcccaggtggtattcttgagctcacatccacggagcacaatgttcgatggccctagcgagacacgcttgccatcaatctccaaattcgcctgaaatccatagatgttcctgtttggccgctcacaatgaaggacaccgccgattccaccgtcctgcgagaacctcagttgcgtctcctgcttagcatacctcgtcttgaggttggtctccccgtcaagattgacggtctggacgtgcgcgacgccggaggggtcgctggtggcgaggagcaccatgtcggcagggagcgtctcgctggaggcgacgcggacgacgtccccgacgcggatgtgcttccatttcttgggcgcgaactcccccgcggcgggcggcgccaggaggaccctggcgaggcggttgttctcctggcggtcggagcggtggcggcggaggtcctcgtaggcgtccttgacggcggtgacgaagaggacgaaggcgagcgggagcacggaggcgccgcggccgaagacggcgacctgggggagctggttgagcacggtgatggcgaggaagtagacgtacgacagccgccggaactgctcgaacaggttccgcggcaggaacgtcagcaccgagtacttcgccgtccgtacgccgttcccggcgaaccccgccgccgcctccgaagacgagggctccccgacaacaaccgcgcgggactcctcctcgccgcccccctcctcctccccccgctgcgacgcggccgacgacgggtcgggctcccggcggaaggggtcgggcacctcgagggagaacgcgaggcggtcggctcggaggggcggctccggctgcggcggcgggagcagcgatgacgccggcggctgctgcgtcggccgcggcgaggcgtcgagcagcgggcgcccggaagccat

SEQ ID NO: 3317 - DNA, 866 bp, Oryza sativa
  unsure (1)..(866): unsure at all n locations
  Clone ID: PAT_MRT4530_59646C.1
ccggccggggaatcccaagccgaaaccctcctctcctctcctcttcccccgcttctcccctcttcccccaaccaaattccaatggcggccacggcgatggaccacgacggcggcgaggtggtcacccctggggagctcctcggcaactcgtccctcctagcggggctcggcgcctacgccgacggccgctgcgtgcgcgcgtccatcactggccatcgccgcctcgtgccgcctcctcccggctccaccgatcagaggtccacggtggaggtggtcgggcacaaggcccatggagctgtgccgcagccgggaagcgtcgtcattgcgcgtgtgacgaaggttatggctaggatggcttctgcagatataatgtgtgttgactcaaaggctgtcaaggaaaagttcactggcatgataaggcagcaagatgttcgtgcaactgaaatcgacaaggtggatatgtttcagtcataccgacctggtgatattgtcagagccctggttctctctcttggtgatgcaagggcatattacctttccactgcccagaatgaactcggagttgtttctgcacaaagtataactggtggtacactagtcccgatcagttggactgagatgcaatgcgaattgacgggccaaatagagcaaaggaaagttgcaaaagtggaatagatttggtgactttgctaacagaaaaggttcatgatggcctacaatgtgttgaccaacaaagatggtcctcatgcgtgtatcaaaagcttgcgacgctcaagctcacgtcgccactggatttnagagttttgggttagcgatggtccatttagattctaatgatgtaggtcagggttttgctctggggtgct

SEQ ID NO: 3318 - DNA, 2084 bp, Oryza sativa
  Clone ID: PAT_MRT4530_59818C.1
atggcggggagtgggaggccgccggcggcgcagaagaagatcctgcagtcgctgcgcccgccgctgccgttcgccgcctcgtcgaggtcgcccttcgcggcgcccaacgactaccaccgcttccccgctggtggcgcggcggcggcggcggcgtctggttcgggtggcatcggcgcgggcggtgctggcggcggcggcgatatcgaggaggggctggtcatccggacgccgacacgcgacgcagatcgatatggaaagaatttgatccatgcagttgtcggagccaagcaaaaaagaaaagcaccagaagaaagtgatgttgctgagtctagcgactgtatgattactagccctggatttgctgtcagtccaatgctcactccagtctctgggaaagctgttaagacttccaagtcaaagactaagaacaacaaagctgggcctcagacacctacatcaaatgttggttcaccacttaatcccccaactcctgttggtacatgccgttatgacagttcgttagggcttctcacaaagaagttcataaatttgctgaagcaggctccggatggcattctagatttgaataatgctgcagaaacactagaggttcaaaaacggcgtatatatgatattaccaatgtacttgaaggaatagggttgattgaaaagacactcaagaacagaatccgttggaagggcttggatgattcaggagtggaattagataatggtctttcagctttgcaggcagaagttgaaaatcttagtctgaaggagcaagcattagatgagcgcataagtgatatgcgtgaaaaactaagaggtttaactgaagatgaaaacaatcaaagatggctctatgtgacagaagatgatatcaagggattaccctgctttcagaatgaaacactaattgcaataaaagctcctcatggcactacacttgaagtcccagatcctgacgaggctggtgattatctccagagaagatatagaatcgtattaagaagtacaatgggcccaatagatgtctacttagttagtcaatttgatgagaaatttgaggacttgggtgggggtgcaacaccatcagggcatgcaaatgtaccaaaacatcaacctactgaagtcttcaatacaacaaatgctggggttgggcaatgtagcaactcagttgctgtggacaataatattcagcacagccagacgattcctcaggatcctagtgcttcacatgattttggaggaatgacaaggattatcccttcagatattgatactgatgctgattactggctcatatcagaaggggatgtcagcattactgatatgtggaaaacagcactacttaacatggaaacagcagatgtgcagtgggatgagagcctggatacggatgtcttcctatctgaagacgttagaacgccaagttcacacaatcagcagccatctgcagtgggcgggccacagatgcaggtctcagacatgcataaaccctaggatcacaggggttacagaagtgaaaagatgacatctggaattcctggagcggtgtttgtagtgaaaagtgaaagcatgacagcaaatgctcattgccaaattgtaaagagccgggtggtcttcatcagaatatctgcatcttctcgagacaccaagtccgtgcgagagatcaggatgacaccattccggattcacatctgctgtggaggctggtggcgtcaactaacttaccagcctgctgtttcagcaccctgcttcagtcgaacgggagtaaatcttgctgctgctttcgctgtgaagcctgctgcggtgctcattaaggcactgatatattttttgcattcaaaactaactagtcatcagcaaggaaacggtgggctttgctgtgctctgtcgagtattctttgaaaattctttgtacattgggaggtataagggcatgcagggctcgagttattggtttgacgggagcaatgagctgagttaatgatgtaaccgagccgtctttgtaaattgttccatgctcttcctcaaatacaatggatagactttcattttgaaaaaaaaaaaaaaaaaaaaaa

SEQ ID NO: 3319 - DNA, 1882 bp, Oryza sativa
  Clone ID: PAT_MRT4530_59856C.1
cgaaaaggccacagctttcaatataaacaaacaccaaacgaatcccttcttagcggtagtgcatccccatccatccattctcgcacaagattccatcttttcatccaccaatctcgcgaaatctccgtctaattcaagaaaagatgagctgaggaatgagaggaaatattggtgttgcgaattgtggattgggaatttggagtttggattaggaggaggaggaggaggagaagattaggcgatgtctttcaggagcgtgatccaggaggtgaagggcgagatcggcgccatctcgcggcgggggttcaggtcgcggccggggcgagtccggcgagtggcggcggcggcggaggagccgccggacgagtcgtcggcggcggcgctggtgatgcgggagagctgctggacgcagctgccgccggagctcctgcgggaggtgctggcgagggtggaggagtcggaggggtggtggccgcgccgccgcgacgtggtggcgtgcgccggcgtctgccggagctggagggggatcgtcagggagatcgtgcgcaccccggaggcgtccgggaacctcaccttcccaatctctctcaagcagcctggcccgagggatgctcctatgaaatgtttcattgtaaggaaccggaccactcagacatattacctgtacattggactgactgatgcattaactgatgatgggaagttcctacttgctgcacgcaaatgtcgtaggaccacatgcactgagtacctgatttcgcttgatatgaacgatatatcaaagaggactgatagttatgttggcaaactaagatctaacttcttgggaaccaaatttactatctatgatgcccatccaccttatgctggagatgtgatttcaaagggtcagtctgcacgtgtgattggttcaaaccatttatcccccaggatacctgctgggaattatccagtctcacatatttcatatgaattgaacgttttgggttctaggggcccgagaaggatgcactgcgctatggattctatccctgtatcagcaattgaacaaggaggaacagctccgacgcagactgaatttcctttgagttaccatgaatctttcacatcaattccctttttcaaatcaaaatcagttcgagcgaataattcaactgcttcattactcactcaaaatggaagcaaactggtgttgaagaacaagtccccgaggtggcacgaacatctgcagtgctggtgccttaacttccatggacgggtaacggttgcatcggtaaagaacttccagctggtggcttcagatgagagtaacccaaccaaccaggaacacgatgatgtgatcctccagtttggtaaagttgggaaggacatgttcaccatggattaccgctatcctatctcggcatttcaggcgtttgcgatatgtctgagcagctttgacaccaaaatagcgtgcgaatgagtgaaggtgtgattctttcttccatgatcgaatgaaccgtttcctgatgacccacattgcaagctggccatgcactctgcttagttgcttccaccttttggaagcatgcagaatagagacataaataaaagttgctttaaatctaacattttagttgggtagggatatgtaacctgcaatttagctttcttgaagtatgttcaacctgcaacatttgagtgacttgtaagtcttgagtttaactacaggtgttggataaccacaattgacagctcacggacttatgtgtatacttgtccctttcggaaatccatagatgtatctgtttgcatagatatgtttatgttacattcttctattaccagaatgaacagagctattggatcttgtttcaaaaatcatgaaaaaaaaaaaaaaaaa

SEQ ID NO: 3320 - DNA, 1278 bp, Oryza sativa
  Clone ID: PAT_MRT4530_59858C.1
atgtctttcaggagcgtgatccaggaggtgaagggcgagatcggcgccatctcgcggcgggggttcaggtcgcggccggggcgagtccggcgagtggcggcggcggcggaggagccgccggacgagtcgtcggcggcggcgctggtgatgcgggagagctgctggacgcagctgccgccggagctcctgcgggaggtgctggcgagggtggaggagtcggaggggtggtggccgcgccgccgcgacgtggtggcgtgcgccggcgtctgccggagctggagggggatcgtcagggagatcgtgcgcaccccggaggcgtccgggaacctcaccttcccaatctctctcaagcagaccggaggccagatggcccagcttgtgttgaaagctgataaaatgcaattatattcgcctggcccgagggatgctcctatgaaatgtttcattgtaaggaaccggaccactcagacatattacctgtacattggactgactgatgcattaactgatgatgggaagttcctacttgctgcacgcaaatgtcgtaggaccacatgcactgagtacctgatttcgcttgatatgaacgatatatcaaagaggactgatagttatgttggcaaactaagatctaacttcttgggaaccaaatttactatctatgatgcccatccaccttatgctggagatgtgatttcaaagggtcagtctgcacgtgtgattggttcaaaccatttatcccccaggatacctgctgggaattatccagtctcacatatttcatatgaattgaacgttttgggttctaggggcccgagaaggatgcactgcgctatggattctatccctgtatcagcaattgaacaaggaggaacagctccgacgcagactgaatttcctttgagttaccatgaatctttcacatcaattccctttttcaaatcaaaatcagttcgagcgaataattcaactgcttcattactcactcaaaatggaagcaaactggtgttgaagaacaagtccccgaggtggcacgaacatctgcagtgctggtgccttaacttccatggacgggtaacggttgcatcggtaaagaacttccagctggtggcttcagatgagagtaacccaaccaaccaggaacacgatgatgtgatcctccagtttggtaaagttgggaaggacatgttcaccatggattaccgctatcctatctcggcatttcaggcgtttgcgatatgtctgagcagctttgacaccaaaatagcgtgcgaatga

SEQ ID NO: 3321 - DNA, 4737 bp, Oryza sativa
  Clone ID: PAT_MRT4530_60150C.1
atgatcaccctcaagagctccgacggcgagccggtcgaggtgacagaggcgtcggcgaggatctccaaggtcatcggggacaagatcgacgccggccgcggcggcgaggccatcccgctcccacacgtcgacaaaaagaccctcaagaaggtgatcgagtactgcgacgagcacgccaacgagaactccgacaccgacgagcagaaagaggaactcaagaactgggacaaggccttcatcgacgagctggacgaggacgacggctccttcctcttcttggtcctcctggcctccagctacctcaaaatcgatgggctcctcgacctcacctaccagagggtcgccgacaatagcaaggccaagaccaccgaggagatccgcaagaccttcagtaccatcgagatcgaactcagcgacaaggaggaggaggagcagcagcaggaggaggagatccgcccggagaacatgaagaagaagacggccacggcgatgatgatcgtgacgccccggccgaccgtgacgactgtgcccgtggcaggagaagaggtcgccgggggcacaacaacgaccaccccagggctaatcaaaactggcgatgcagggattgagacgacgacgattggaatgaacggggacgagactttgggcgtggccgcggcgaacaacgtgcgattgatcaagactaccgccgtgaacgcacacgctccccgcgccagcgcgacaggggagggcacagtcaccatggcggccggcgtcatcacgctggtgccaccgacgtggacaacgtcaccgatcctgtctaccccgagccacacctggcagagatctctctgccttcccgccagcaggagcttcacaccgaggaaatcccggcgtgatcagctgcttcgcctcgcgcttgtcgctgataaggccatggctgcgccacctccgacggcgatggaggacctggccatccggtcttccactgggactgaagcctggttcagcggcacggcatggaagccagtgcctgttgcgcgtgtctttggccgtatcagggaggccttgccggccacgccagcggtcgaaacgccgacaacctaccagcaaattgaggaggcgctgatgcgccttgagctcgctgccgctgcagctcgcaccccaggcgatgacactctcctaccacagcccatgtcaccggcacctctcgcagcgtccccgcctcgccgcttggaagatctggccagcgacgctgtggccgacaagattctgccggcgccgctccccggggcgctgcttccccaagagatgacccatatgccagccaccccgcccctgtcggcgctggagccgggctcgctgccggaacgcgcatcctcgccatgcgccatcgcgggactgttcacctcgcctccgccggctatcattgcgtcgccgctgcgctcgacgcttccatgtctgcggccggtcgtcctcacaaggaaggtgaagctccggccgaggcagcatagccaggcaatccggcggagtgagcacctcgccaagcaacctgcaagaccgatgatggagaggtgccagcgcatcctattcaggaggttgggcatcctccatgacgaagaagatgcctccgtggagcgcgttctcagccagtacatggccatgtttgatgggcccctgccgccgcacgccatcgccgccttgacggcgatcttcggcctcgacgacgatgatgagtgcgccatggatgcctctctgctcccccttgtgggcgaagggatcactgatgtggccgatgaactggcgtgccgccggtggcctgcgtgccgcctccctagcatttctatggaacctcagctcttggagcacatgtcgatgtcgcacagtctagatttcattagttggaatgtgagggggctcaattcgccagcacactgcaacacggtccacgagatgatgttggatacgaagtgcaacctagcatgcctccaagagacgaaacttcagaacatctacgacggcctcgcccgcttcctgggtggctacaaattggatagctttgccttcaaaccggccacgggcacgagagggggaattctcatcctttggaacagtgctgtcctcgtcctacaagatattcgaatcggccgcttttcgatctcagcacaagtgacggtcccactcacaggggctaccttccttatgaccggggtgtacgggcccacgagacaccggcttaaggatggcttccttaggcacataaggcggctaaagcccaatgctggcgaagggtggctcctattcggggatttcaacatgatctaccgagcaagggacaaaaacaatggcaaccttaatctagctcgcatgaggcgctttcgagcgacaatcgatcgatgtgaactccgcgagatccccttgcaaaacaggagattcacctggagtaatgagcgtcaaaggcccactctagtgaagcttgatcgttgtttctgcaatgagaactgggatctcgccttccatcaccatgtcctgcatgccctcccaacagggccgtcagaccactgccctctcgttctttcaaatcccgctgccccgcgcaagccgcgcccctttagatttgagaacttttggacacgcattccgggtttcaaggacatggtcaaggctagttggacccaaccatccccgcacacagagccgatgcaccgcctaaattacaagctacagcgcacagcttcttgcattaaaacctgggctaaaagtctattcacggaggtgaaaattcagtttcacatggcactcgatgtcattcagcggcttgatgtggcccaggaacacagagatctctctggcccggaattgcggctgagagctgccctaaagcgcaaaactctgactctcgccacgatagagagggcaaggaaaagacatgcttccaggttgactcatatccgtgaaggggaggcaaacataaagttttttcacctcagggtgaatgcgcgtaggaggaagaatagcattcaaagacccagcaaagaaaatggctgggcagtcactcacgatgagaaagaaatgaccattcttgaccacttcgcccatttaatgggtcggccggggccgaggccgaatgagctcaactgggaagctctagacatccagcctttcgacctctctaccttggaagagcctttcttggagcaggagatccaccaggctatcaaagagatgccagttgacaaagcgccagggccgaatggttacactggtatcttctttaaaatttgttgggatatcgtcaaggaggatgtttcccttgtcttcaattccatcttcaacctccgctacgccagcttgggcctccttaactcagcgaatattgtgttgatcccgaagaaggaaggggcggagagtgtttcggactacaggccgattaatctaatccatagcatagccaaaatcttctccaagctgctggcgttgtggctgaggccccacatgcactccttggtctccatcaaccaaagcgccttcatcaagggaagaagcattcatgacaacttcctctttgtgaggaacatggccagaagatttcaccgtacgaatcggccgatgctcctcttcaagctcgacatcacgaaagcatttgattctattcgttgggactacttgatggcccttttgcaacgcctaggcttccctgtaaaatggagagactggctagatgacgctgccattttcgtcaatcccacaagaggggatgtccaagcgctcacggaaatcctgcaacgtttcggtacggccactggactcgttaccaacttccaaaaatctcaagtcgcggccatcaaatgcaataacattgatttggacgacgtcctagagggagtcccagcagctggcacgggggacatcacgggtggaaaatgcaaagtcaattggacaaagacgtgtctgccaattaggcaaggaggcctcgaggtcctgaacctagaaagattcatgagagccctgcgtctacgctggctgtggcatgaatggaaggacccaaacaagccatgggttggtctcgagatcccctgcgacgaagtagacaagagcttgtttgccgcatccactaagataaccattggtgatgggaatatagcgcgattctgggacactgcgtggattgatgggagaagaccaaaggacctcatgcccctagtatatgcaatttctaagaagaggaaaaagaacctgcgccaaggaaaggagaatgatgcctgggtaggtgatttggcactggagacaaacccagtaattacagtggcccttgtggagcagctggttgccctatggactgcagtctgcaacgtgcagttagaagaagaagagtcagaccaaatcgcctggaagttcactcctcatgggcactactcggcttcatcggcctacaaagcgcagtatacgagacggatttggaacctcgttgcgacatgggtagggttccaccagctagaaccccgacgctggggggtggcgcaatcggtcaaagattggtgggaaatgctggcctctgtgtctggcgtccccaagaagggactccgcactctgattctactcatcgtatgggaagtctggaaggagcgaaataggaggatatttgatcataaggaagccacaacctcgtatctcctttcaaagataaaagaagaggctggcatgtgggccttggcaggtgccaagcgtcttggagagatcatctcgcagtttgtatag

SEQ ID NO: 3322 - DNA, 1769 bp, Oryza sativa
  Clone ID: PAT_MRT4530_60372C.1
tttggcgccacgtttaaagggcggagtcgctggcgttagagaagaggatttaaagagagagaaggccattctctcttgattgcttggagaggaagaagaacaagagccgccaccgccgccgttaggtttttatttattttttttctcgatctgatccgaggaggagcgaagcgaagaagggcaagatgcattcgacgaatctgctgctggaggagcccatcaggatggcatccatcctggagccatccaagcccagcttcttcccggcgatgaccaagatcgtggggacgctggggccaaagtcgcgctccgtcgacaccatctcctcctgcctcaaggccggcatgtcggtggcccgatttgatttctcgtggggagacgccgagtaccaccaggaaacccttgagaacctcaaggtcgccatcaagtccaccaagaagctctgcgcggtcatgcttgacacggtcggcccagagttgcaggtggtgaacaagagcgaagcctccatctccctcgaggagaacggcactgttattctcacccctgaccaggggcaggaggcctcctcacaagtgctgccaattaacttcgctgggcttgctaaggctgtgaagccaggtgacacaatatttgttgggcaatacttgttcacaggcagtgagactacttcagtttggttagaggtttctcaaattaaaggagatgatgtggtctgtgtgataaaaaacacagcaactctggctgggtcgctcttcacattgcattgctcgcagattcacatcgacttacctaccctatctgatgaggacaaggaggttatcagaaaatggggtgccccaaacaagattgacttcctctctctttcttatacaagacatgtagaagatgtgcgacaggcacgtgaattcctctcaaagttaggtgaccttagccagacccagatttttgcaaaaatcgagaatgtggaggggttgaataattttgatgaaatcctccaagaagctgatggtatcatcctgtcaagaggaaaccttggaattgatcttccacctgaaaaggtgtttttatttcaaaagtctgctctgcacaagtgcaacatggctggaaagcctgctgttgttactcgtgttgtagacagtatgactgacaacctcaggcctactcgtgcagaggctacggatgtggcaaatgcagtgcttgacgggagtgatgccattctccttggtgctgagactctgcgtggtttatacccagttgagactatttcaatagtgggtaaaatttgtgctgaggctgagaaggtcttcaaccaagatttatacttcaagagaactgtgaaacatgtgggggagcccatgacccacttggagtctattgcttcctctgcggtgcgagctgctattaaagtgaaggcgtctgtcataatttgcttcacatcatctggacgtgctgcaaggctaattgccaagtataggccaaccatgcctgttctatctgttgtcattcctcgtctaaaaacaaatcaactgaggtggagtttcactggcgcatttgaagcaagacaatcgctcatagttagaggcctctttccgatgcttgctgatccgaggcatccagctgaatcaaccaacgctacaaatgaatccgttttgaaggttgctcttgaccacggtaaagtttctggtgtgataaagtcgcatgatcgcgttgttgtctgccagaaggtgggagattcctcggttgtgaagatcattgagctggacgattag

SEQ ID NO: 3323 - DNA, 3042 bp, Oryza sativa
  Clone ID: PAT_MRT4530_60464C.1
atgggtgtgggaggaggcggaggaggaggaggaggggaggcggcggcggcggtggcggtggagggggatgaggcggggaaggggaggaggtggtggagggtgaaggtgaagctgagcacggtggcggtggtggcgtgggtgctggcgtcggcggcgctctgggcggggctgcactggcgcttccgccgcgcggcgctgcacaaggccgaggaggccctcgtctgcatgtgcgaggagcgcgcccgcatgctgcaggaccagttcgccgtctccgtcaaccacgtccacgccctcgccatcctcgtcgccaccttccactacgacaagcaccctcccgccctcgaccaggacacgttcgccgtgtacgccgcgaggacgtccttcgagcggccgctgctgagcggcgtggcgtacgcgcagcgggtggtgcacgccgacagggagagcttcgagcggcagcaggggtggatcatcaagaccatgaagcacgagccgtccccggcgcaggacgagtacgccccggtgatctactcccaggagaccatctcctacatcgagggcctcgacgtcatgtccggcgaggaggacagggagaacatcttgagggcgagggcgacagggaaggccgtcctcacgaggccgttccggctgatgtcgaatcacttgggtgttgtcttgacgtttcctgtctacctcgtcgatctcccaaatgataccgcggtggaggatcgtgttgctgctactgcaggataccttggaggagcatttgatgtggagtcactagtagaaaatttgttgagacagttagctggtaaccaggaattggtggtcaatgtttatgatgtcacaaaccactcaaaccctcttgtgatgtatggatctgaggttcctcttggtattccctcaccatcacacacctatacgttggattttggtgatccattgagaaagcatcagatggtttgcagatacagaaacaagcttcatgtttcatggtctgcaattactacaccatcaggggtctttgttatatgtatgctggtgggctacataatatatgctgcttggagtcgctacgataatgttaaggaagattgccggaaaatggaagcgctgaaaaaacgggcagaagcggctgatattgctaaatctcagttccttgcaactgtttctcatgagatcagaacacccatgaatggcgtgctgggaatgcttgatatgttattagacacagagctgaagtcaacccagagggattatgcacaaacagcccaagtctgtggaaaggcattaatatccctgattaacgaagtgcttgacagggccaaaatcgaggctggcaagatagatctcgagtcagtaccatttgacctgaggtccatccttgatgatgtcatctcgttattttcttcaaaatcaagagagaaaggaattgagcttgctgtatatgtttctgaaagagttcctgaaatcctgttgggcgaccctggaaggtttcgtcagataattacaaacttggtgggaaactcgatcaagataacaatatttaccttgtcgcagttcacagaacgggggcacatttttgtacaagttcacctggcagatcactcaaatcttgcaacagaagcaaaaattgaaccagtagtcaatgggatgaatggacataaagacgaggctattgctatacccaccagtgggtctcataacactttaagtggttttgaagcagctgatagccgaaataactgggaaaacttcaagcttttgctctcttacgagaaaaatgaaatgccatatgaaagtgattctgataaagtaactcttgttgttagtgtggaagatactgggataggcataccactgcatgcccaaggccgggtcttcacgcctttcatgcaagctgacagctcaacttctaggaactatggtggaactggcattggattgagcatcagcaaatgtcttgttgaaataatgggtggtcagataaactttgtcagccgacctcttgttgggagcacattcacattcactgctgttctgagaaggtgtgacaaaaatgctattagtgacagtaagactgttgctttgcacccattaccgtccagttttaaaggcttatctgcgctattggttgataaaagacctgtaagagcaactgtgactaagtatcatttgcaaaggcttggaatcacttctgaagttgttggtaccattgatccgacatttggtgtgttgtctgggagaaatggcagttctctaaccagcattggtaagaagcagccatgcatgttgctaatcgagagtgattcctggggaccacagatggatgtctccttacatgctagacttcaggagatgaaacagagtgatcgcatacatgtattgcccaaggttttccttctttctgctgcagaatcagacaaagtaaagaagatacatgcagttgattctgtgataccaaagcctctgaaagcaagtgcacttgcggcctgtctgttccaagcacttggtatcacacagccgagccatgagaaacgtgacgattcaggttctcttcatgggcgtgatggttcaggttctcttcatgggttgcttcttggcaagaacatattggtagttgatgacaacaaggtaaacctcagagtggccgctggtacattgaagaaatatggggcaaaggtggagtgtgtggagagtggaaaagatgctctttcccttctacaagtgccgcacaagtttgatctgtgtctcatggacattcagatgccggagatggatggatttgaggcaactcggcaaatacgagcaatggaagggaaggcaaatgagcaggcagacgacagcgaatcgggttcagaaatcgcagcaaagacggccaaatggcacttgccaatcctggcaatgaccgctgatgtcatccaggccacccacgaggaatgcacaaagtgcgggatggatggctacgtctcgaagccctttgaggagaagcagctcttccaggcagtacagaagttcttgggcccatgcgtttccagctga

SEQ ID NO: 3324 - DNA, 2249 bp, Oryza sativa
  Clone ID: PAT_MRT4530_60549C.1
gactgaaaagtagcttatcgaatttcatatatgcaggtgtgtgagctcggtgttacttcacaaatacttgtctcttacacatgttcaggagctgatccactatgttagatgtaggaggtaaggaccactcatttcttttgttacttactgaattacccgtgggcaattagatagagtataggtgataattagcggaagcaaaggaaaccgttgaaacaccagatcaatggaaaaggcatctgttttcactgagcagattgtgctagggtcaggtcatatggggagagagtgccagagtggtcgacatcgagcttttcaaactcctccagaaaagaagaaatctcctcttggttgatcttacccagttctttgagcttgtacacaacaaattctgcagcaccaacttgtcgatcatcatccagatcggctgcctcaagatccatctttgtcattttccgtgtgagaacccaattggccagcattttctgccgtcgctcggtgtagatctcagcaaggtacatgaagaattgtgccatgatgatagtgctcgtgataatccaaaagaccgcgaaaacacgtcccagtttggatgagaagcttttatccccataacccagggtagtgattgtggcacatacacagtagaaggaatcaacaagactcagtttctccactttccacagaaatacggtcccagaaataatggatagcaccagaagcagtgcatttgtgtaaaatttgtactttatcctgtttgtctcgattgctctaagcatcttggtctcaccacccttcagattcgtgtgcaatgctttgaagaacagcacctcctgcttctcaacaagataatctgctactttgctgacaaagagagcaacaactgccatacccatgaagacgaaagcacaagcaagcagttttgttgtgtcattgtttgggacgaggtctccatagccgacggtggtcattgtgacaacacagaagtacaaggcgtcaagcactctatttgttcgcttgcctgatatctcatccatgacagcataaaaggccaggacgcccactagaagatagataaaaaggagaagtcctactagtctgaaacttggcctcatctccttgaataactccttggctttaactgatgagcccttttcaggggggccttgaagaggatccgtggaaggagtcgacctgcatcgtcgaaaccgatttactccttctgacggcttccgctgcagcacattagggttatcagctagcagtgattgctgaatgctgttgtcatccattggattagcctggatctttcctccggctgaggggacgccgcgcgtcgatctcctctccctctcgcccgacctgccctgagccgcctgagacggatgccccgcgcgcgcgcgccactgctgctgcgcgcctgcggggttgagggctctggctcctggttgtgaacttgtgacggcaactgcaaccagcggccacaagtcgcagtcacaggcggtggcgattcggttggcgagctccggcggcgcggagaggcggcgacccagcgggcaagctccggcggtgattcggtcggcgagctccggccgcgcagagaggcggcgaaccggcggtcgggaggtcgcgactcgatgggctggctcccgcggcagggagaggcagtgacccagcggtagggaggccgcgactcggcgagctagctccggccggcggtagggaggccgcgactcggcgagctggctccggcggtgtggagaggcggcggcctcggcgggctggctccagcgacgcggagaagtggcagcccgatgggcggagatcgcgtggaggcggtggaggtcgcgcgactggccaagtccggcaggggcggcgaggctagcagtggcgcggagtacaccagtcgccgcgggcttcctccgcgcgtcgtcgtcgtcgccgtcgccggagcggatggtggtggcggcagcggccggagcaggtcgccatggcgtcacaccagacgtcgtcgtccctcgccacggcggcactcgaagccgatggtggttggctccagcatctctggattcaccaatgaagccattcaatttcaggctccagcagtggtatacttggaggaggttgtactcttcagcagagccattctctttatcatgttgtagtctcttatctctgaacttctctgaaacttcaattccatccttgaactttctctgaaatagcaggagcaattcagcactcatgatcat

SEQ ID NO: 3325 - DNA, 1725 bp, Oryza sativa
  Clone ID: PAT_MRT4530_6072C.1
atggccgaggtgacggtggtccgtgcggagcgcgaggaggagtccaccctggagcagggtctcctcgccatcccggaggaatccaaccaacttacatacactggagatggatctgtcgacttttctgggaatcctgttgtgaaggagagaactggtagatggagggcatgcccatttatcttaggtaatgagtgctgtgagcggttggcctattatggaatctccacaaaccttgttacatacttgacaaagaaactgcatgatggtaatgcttctgctgctagcaatgtgactgcatggcagggaacttgctacttaactccccttattggagctatactggctgatgcatactggggaaggtattggactattgcaacattctccacgatatacttcattgggatggctgtactgactctttcagcatcagttcctacattcatgcctccaccttgcgaagggtccttttgcccaccagcaaatccattgcagtatactgtcttttttcttggactttacctaattgctcttggtactggtggtattaagccctgtgtctcatcctttggagcagatcaatttgatgatacagacccagttgagcgaatccagaagggatctttctttaactggttctatttctcaataaacattggtgctctcatatcaagcagttttctggtttgggtgcaagacaatataggatggggaataggctttggcattccaacaattttcatggggctggccatcataagtttcttctctggaacatcactttatagattccaaaagccaggcggcagtcctattacacgagtatgccaggtggttgttgcctcctttcgcaagtggaacgtacatgttccagaggatagctctcgcttgtatgagttgcctgatggggcttcagcaattgaagggagtcggcaattggagcacaccgatgaactcagatgtctggacaaagctgctacaattactgatcttgatgtgaaagcagatagctttacaaacccatggcgaatatgcactgtgactcaggtggaagaactgaagatattgatgtccaccatgtttgttgagcaagggatgatgcttgatacatcagtaggtccattcaagattcctccagcatctctatctacctttgatgtggtaagtgtcattatatgggtccccctctatgatagtatcttggttccaatagctaggaggttcactggcaacccgaggggctttacagagttacagaggatggggattggtttggtaatctcaatcttttcgatggcggcagctgcagttcttgagattaaaaggttggacattgcaagggctgaacatttggtggatcaaaatgttccagtaccactgaacatctgctggcaaattcctcaatatttcttggttggtgcctcagaggtcttcacatttgtcgggtcacttgagttcttctatgatcaatcaccggatgccatgaggagcctctgcagcgcactgcagcttgtcacaacagctcttgggaattatctcagtgcattcattttgacattggttgcgtacttcacaacaagaggaggaaatcctggatggattcctgataacttgaatcaaggtcacctagattatttcttctggcttcttgctgggctcagttttctgaactttgtgatatatgtcatctgcgcaaacaaatacaaaagcaagaaagcagcttga

SEQ ID NO: 3326 - DNA, 2232 bp, Oryza sativa
  Clone ID: PAT_MRT4530_6073C.1
cctcgaggccgggagcccaacaataataatccccccttttcatcgcggcgacgccggagaccccacatatccagatctgcaagcttcctcctcctccttcctcctgatcctttagcttcctatatacgattccaccatcgaaggccagggcccagacttgcttgccgcaggttactgatccaccgaaggagggaggcgcccgcccgccgccatggccgaggtgacggtggtccgtgcggagcgcgaggaggagtccaccctggagcagggtctcctcgccatcccggaggaatccaaccaacttacatacactggagatggatctgtcgacttttctgggaatcctgttgtgaaggagagaactggtagatggagggcatgcccatttatcttaggtaatgagtgctgtgagcggttggcctattatggaatctccacaaaccttgttacatacttgacaaagaaactgcatgatggtaatgcttctgctgctagcaatgtgactgcatggcagggaacttgctacttaactccccttattggagctatactggctgatgcatactggggaaggtattggactattgcaacattctccacgatatacttcattgggatggctgtactgactctttcagcatcagttcctacattcatgcctccaccttgcgaagggtccttttgcccaccagcaaatccattgcagtatactgtcttttttcttggactttacctaattgctcttggtactggtggtattaagccctgtgtctcatcctttggagcagatcaattcgatgatacagacccagttgagggaatccggaagggatctttctttaactggttctatttctcaataaacatgggtgctctcatatcaagcagttgtctggtttgggtgcaagacaatataggatggggaataggctttggcattccaacaattttcatggggctggccatcataagtttcttctctggaacatcactttatagattccaaaagccaggcggcagtcctattacacgagtatgccaggtggttgttgcctcctttcgcaagtggaacgtacatgttccagaggatagctctcgcttgtatgagttgcctgatggggcttcagcaattgaagggagtcggcaattggagcacaccgatgaactcagatgtctggacaaagctgctacaattactgatcttgatgtgaaagcagatagctttacaaacccatggcgaatatgcactgtgactcaggtggaagaactgaagatattggtaaggatgttccctgtctgggcaacgactattgtgttttctgctgtctatgctcagatgtccaccatgtttgttgagcaagggatgatgcttgatacatcagtaggtccattcaagattcctccagcatctctatctacctttgatgtggtaagtgtcattatatgggtccccctctatgatagtatcttggttccaatagctaggaggttcactggcaacccgaggggctttacagagttacagaggatggggattggtttggtaatctcaatcttttcgatggcggcagctgcagttcttgagattaaaaggttggacattgcaagggctgaacatttggtggatcaaaatgttccagtaccactgaacatctgctggcaaattcctcaatatttcttggttggtgcctcagaggtcttcacatttgtcgggtcacttgagttcttctatgatcaatcaccggatgccatgaggagcctctgcagcgcactgcagcttgtcacaacagctcttgggaattatctcagtgcattcattttgacattggttgcgtacttcacaacaagaggaggaaatcctggatggattcctgataacttgaatcaaggtcacctagattatttcttctggcttcttgctgggctcagttttctgaactttgtgatatatgtcatctgcgcaaacaaatacaaaagcaagaaagcagcttgagctaatcaggagttaaaagactgtcgtcatgggaatttcacttcaaaattctgtatatatgtgcacaaagtacatgttgaagcagcgaccgtaacaagagaactttaaccatcctgtactctgtatttgatgctactatacattttatactttttgttctgtagatattaatttattgaagctacttgtggaatgtagctttgcttccaatgcgtctcattaaaaaaaaaaacctgatt

SEQ ID NO: 3327 - DNA, 2313 bp, Oryza sativa
  Clone ID: PAT_MRT4530_60906C.1
atggcggcggcggcgatactgccggagctggcggcgcaggtggtgatcccggtggcagcggcggtggggatcgcgttcgcggtgctgcagtgggcgctcgtctccaaggtgaagctcacggcggagccgcggcgcggggaggcggggggcgccgccggggggaagagcgggccgagcgactacctcatcgaggaggaggaggggctcaacgaccacaacgtcgtctccaagtgcgccgagatccagaccgccatctccgaaggagcgacatctttccttttcactgagtacaagtatgtcggattattcatgagcatcttcgcagttcttattttcctcttccttgggtctgttgagggcttcagcacgaagagccagccttgccactacagcaaggacaagacttgcaagcctgcccttgcaaatgctatctttagcactatagcttttgtgcttggtgcagttacctctctggtatctggttttcttggaatgaagattgcaacttatgcaaatgctcggacgactctggaggccaggaagggtgttggaaaggcttttatcactgctttccggtctggtgccgttatgggtttcctgcttgctgcaagcggtctcttggtcctttacattgcaattaatttgtttggaatttattatggtgatgactgggaaggcctttttgaagctattactggttatggacttggtggttcttctatggctcttttcggccgtgtaggtggtggtatttatacaaaagctgctgatgttggtgctgaccttgttgggaaggtggaaagaaatattcctgaggacgatcccagaaacccagctgtcattgcagacaatgttggtgacaatgttggagatattgctggaatgggatcagatctttttggttcttatgctgaatcatcgtgtgctgcacttgttgtggcatcaatctcttcttttggaatcaaccatgaatttactcccatggtgtaccctcttcttgtcagctctgtgggaattatagcgtgtctcataaccaccttgtttgcaactgatttctttgagataaaggctgtgagtgaaatagagccagctctcaagaaacagcttataatttccactgcttttatgactgttggcattgcccttgtcagttggttgggccttccttacaccttcaccatctttaactttggtgcccagaagacagtgcaaagctggcaattattcttgtgtgtggcggttggtctttgggctggtctaatcattggatttgttaccgagtattacaccagcaacgcatatagccctgtacaagatgttgctgattcttgcagaactggagctgccactaatgtcatttttgggcttgctttgggttacaaatcagtcatcatccctatttttgctattgctttcagcattttcctcagcttcagccttgctgccatgtatggtgttgctgtggctgctcttggaatgctgagcacaattgccacaggtcttgctatcgacgcctatggtcccatcagtgacaatgctggaggaattgctgaaatggccggcatgagccacagaattcgggagagaactgatgctctggatgctgccggaaacacaactgccgcaattggaaagggttttgccatcggctctgcagccttggtgtcacttgcactttttggtgcctttgtgagccgtgcggctatctctacggttgatgttctgacaccaaaagtgttcattgggcttattgttggtgctatgctcccatactggttctcagcaatgactatgaagagtgtaggcagcgcggcgctaaagatggtggaggaagtccgcaggcagttcaacaccatccctggactcatggagggcacaactaagcctgactatgcaacttgtgtcaagatctccactgatgcatccatcaaggagatgatccctcctggtgctcttgttatgctcaccccacttatcgtcggaattctgttcggcgtcgagaccctctctggagtccttgctggtgctctcgtctctggtgttcagattgccatctccgcatcaaacactggcggtgcttgggacaatgcaaagaaatacattgaggctggagcttcagagcatgccaggacccttggtcccaaaggttccgatccccacaaggcggccgtcatcggtgacaccatcggagaccctctcaaggacacttcaggaccctctctcaacatcctcatcaagctcatggcggtcgaatccctcgttttcgcccccttcttcgccacccacggtggtatcctcttcaagttgttctaa

SEQ ID NO: 3328 - DNA, 710 bp, Oryza sativa
  Clone ID: PAT_MRT4530_60938C.1
ttttgtgctattcaacgcaacgcagaactttgatggtgcaaatttcagcagtggggagattcttgcaattcattggcaatttcctttatctgttcgccacgagcacctttcttggagttgctgctggacttctcagtgcttatatcataaaaaagctgtacttcagcaggcattccactgatcgtgaagtttctattatgatgctcatggcttacttgtcttacatgcttgctgaattgcttgatttcaagggtattcttacagtgttcttctgtggtattgtaatgtcgcactatacctggcataatgtaacagagagttccagggtcacaaccaagcacgccttcgccacattgtcatttatcgccgagacatttctatttctttatgttggtatggatgcattggatatggagaagtggaagattgtcggtgaaacattcagcccaatgaaatctattgctttgagctccactattttgttcttggtgctggtcgcaagagctgcttttgttttcccactatcttttttggcaaatttgaccaaaaaaactgaagagggaaagatctctattaagcagcaagttattatttggtgggcgggtctgatgagaggtgctgtgtccattgcattggcctacaacaagttcacaaggtcaggccacactcaactccctagtaatgctatcatgatcactagtacaatcact

SEQ ID NO: 3329 - DNA, 3243 bp, Oryza sativa
  Clone ID: PAT_MRT4530_60954C.1
tcacctcaacctcgtcaatttccagttcctcctgtccagcggctcgctgctgccggcggtgacgtcgtcctggtcggtcgtcatcgtgatctcgtcgctgctgccggccaccgtcgccgccacggggacgatctccttggtgcgcctctcgccgccgctgaacctgagcatgtcgaccacctcggccatcgccgggcggctctcggcgctgctctgcgtgcacagcatggccgtctccaccacggcgcggagctgcgcggcgtcgaagcgcccggcgagccttgggtcggcgaggcgctcccacctgcggcgctccaccagcggcgccgcccactgcacgatctcgcgcttgacgccgccggggagcttctccagcgggcggcgcgcgctgacgagctccagcaggaggacgccgaagctgtagacgtcgcagctctcggagaccttcccccacatggcgtactccggcgccaggtacccgagcgtccccttcacccgcgtcgtcaggtgcgacacgccgtccgggatcagcttcgcgaacccgaagtcggccaccttgggcacgaactccgcgtcgagcagcacgttgctcgccttgatgtcgcggtggatgatgtgcgggctcgcctcatggtgcaagtacgagaggccttcggcggcgccgacggcgatggcgacgcggcggggccactcgagggggacgtggtggtgggaggagggggtgccgcggtgagggtgcaggtgggtgaggaggctgtggttgggcatgtagtcatagacgatgaggcgctcgtcgccgccggcgtagaagccgcggaggctcagcaggttcctgtggcggacgcggccgaggatctccacctccacggcgaactccatctccgccttggccgtcatcgccttcagccgcttcaccgcaatctcgacgcctttggaggtgcgtccccagtagacggtgccgaagccgccctcgccgagcttgttgctctcgctgaagttgccggtcgcttgcaggagctccttgagcgtgtacgtttcccatgggtaatccacgctcgtccggttcttggacgccctcgccggattcgtcctccgacgactactggtggcagccggctccggatcagagtcgccgccggtgacgcagcagaagcaccggttgatcatttcttcacagcaatcgatggatcctgcgggccaagctgacagtatgcggatgaagaataatctgcatttatatgcatatgcacttgtgaagtcagtcagcttgcccgtcataatcttttctgttaattgtccaaaaataagaatgatgcaaaccgtcaggccaacgaacttgtccaatatggtctgtacttggtcatacttggtcattgccaactccagccatggcttcatgttaccgttgtaatcaacaacggctgcattatctatctctgagcggtcaatgcttgggttgtatcctaatccgaggacatgccacgacttgtcaaggggatgcgtcaacttgaagaaggtcaagaggccgtgtggaagtgtcccaagcttccaaagaacccggtcttcgttcatgttttgccacctgtggtagatcccagtgatatctttcttcttccactcgttcagatcaaagatgttcattccatatgcccagccacatgcatttggatcgaagttccgagcgatatgtggatttgaaaagttaagatacttgtcaaaacgatgaaaactctccccacaggtctccactgcaccggtgaccttcccattaagatcaacatcccataatcccgtcaaatctttctgcacgactatgtcatcatcaaggaaaaatatcttatccaactttggatagacctgtgggagataaaatctcaagtggttcagcatggagaggtacttggggttacgatactttaggtttgaagaacccgcagagagagtggtggggcggtcagctttgaaataatactctttcatggctgcagactcaagttgccgtaaaacaggacagtatgatgagttcaaccacttaaattcatctacgttctcaacatggatggtggccttcccaggagggttcagcaaaaaccacatgttcatggctccaaagttcaacttatcagtcacaagatggaaaacatgcttctcaggctccttagcattcatgatggttgagttcacaacagatgctgccaagacattgtctgagaaaagtgcataatggtagagctctggattttccaagttctcgctcctcgggaacttccttttctccaacgggaggagatagtaatctattgttaagcgcatcgacaaacaatgaatgctgtttggaattgtcttcgcagccaactggctaagaaatgtactctgcttcttcaagctcctgacttgttcatctgctgactgaagcatagctctaagtctctgagtaaccgccttgcaatcatacacatcttctctagccttggatagaagttgacccattactctgactttctcaggtgcactatgatgaaggtcagaatcagcagtagcctctccaacagcccgctggctttccttgatcctggtttgcagctcttgataaagatcattcttgttctttgatttagcaagcacagaataaacacgtgccataataatctggtctctcatcaatctaactgtcaaatctgagttctcattctcattctcctttctccaaatgccttcgaacattttttgcagccgtgtcgacttgatgttcatctgcacagacaagaagtttattttcttgcataccttgtcatcaatatccaaactcgcattgctcaggtcattgactagatcatcagttttccaagagggagatgcacgttttatgaaaaaatcaacactcaaagcacctgcttcttgttgactagaagctaaagcatcaaacatctccttggacaaaatagatttcaggttgttcgttggcagctgtttttgccattctgtttcctgagtaccttccatatccatgggatctgcaggtaaacaaactacaacatcacttatcaaacctgaacacatcactccccagtccccacccccaccggaacctgagccgacgtggcccccattgcacgcgacgaagaagatcgacggcgcgagaacgaagaggaacacgacgaccaccagcggcgccaccacgccgcgcctccctcctccgccgccgccggccgtggagtacgggagccgcttcgagttcgccat

SEQ ID NO: 3330 - DNA, 1139 bp, Oryza sativa
  Clone ID: PAT_MRT4530_61243C.1
gagagaaaccccccgcacgaagcaaagaagccgcaaccgcaagccccaagagcgaaaccgtaacgaagggaaagtttgggatgcgcgttgctgcgacgacgcggcccgcctcctcctccgccgccgctccgctccccctcttcctcctcctcgccgtcgccgccgccgccgccgccctgttcctcgtcggctccgcgtccctcgccatggccggccacgtcctcggcggcgcgcacgacgccccctccgccgccaacagcgtcgagaccgacgcgctcgcccgcttcgccgtcgacgagcacaacaagcgcgagaacgcgctgctggagttcgtgcgggtggtggaggcgaaggagcaggtggtggccggcacgctgcaccacctcacgctcgaggccctcgaggcggggaggaagaaggtgtacgaggccaaggtctgggtcaagccgtggctcgatttcaaggagctccaggagttccgcaacactggggatgcaaccaccttcaccaacgccgacctcggcgccaagaaaggtggacatgagcctgggtggcgtgatgttccagtacatgatcctgtagtcaaagatgctgcagaccatgctgtgaaatcaatccagcagaggtcaaactccctgtttccatatgaacttctcgagatcgttcgtgcaaaggcagaggttgttgaagacttcgcaaagtttgacattctgatgaaacttaagaggggaaacaaggaggagaagttcaaagccgaggtccacaagaaccttgaaggggcatttgtactgaaccagatgcaacaagagcatgatgaatcgagcagccagtgaaccttgccacattaagctgtagttatgtagtttgtgttcaataagaaaacagtgaacatgcacccttccgtttctatcgggacataggctggaacttgttcctaacatcgatgaaaagaagacactacactatccttttgttcctgttgctcttagtgtgataatacgatactggtcgtgtaacttctcaagggaaccgtgggtctatgccatacagcttgtgaatgtgaaatcctatgttgatacttctcaagtcaaaaaaaaaaaaaaaaataaaaaaaaaaaaaaaaaaaaaaaaaaaaaaaa

SEQ ID NO: 3331 - DNA, 1110 bp, Oryza sativa
  Clone ID: PAT_MRT4530_61245C.1
atggccggccacgtcctcggcggcgcgcacgacgccccctccgccgccaacagcgtcgagaccgacgcgctcgcccgcttcgccgtcgacgagcacaacaagcgcgagaacgcgctgctggagttcgtgcgggtggtggaggcgaaggagcaggtggtggccggcacgctgcaccacctcacgctcgaggccctcgaggcggggaggaagaaggtgtacgaggccaaggtctgggtcaagccgtggctcgatttcaaggagctccaggagttccgcaacactggggatgcaaccaccttcaccaacgccgacctcggcgccaagaaagttacacattcatgtctagttgagtttgttatatgtgccctgttgaacttaaaaggtggacatgagcctgggtggcgtgatgttccagtacatgatcctgtagtcaaagatgctgcagaccatgctgtgaaatcaatccagcagaggtcaaactccctgtttccatatgaacttctcgagatcgttcgtgcaaaggcagaggttgttgaagacttcgcaaagtttgacattctgatgaaacttaagaggggaaacaaggaggagaagttcaaagccgaggtccacaagaaccttgaaggggcatttgtactgaaccagatgcaacaagagcatgatgaatcgagcagccagtgaaccttgccacattaagctgtagttatgtagtttgtgttcaataagaaaacagtgaacatgcacccttccgtttctatcgggacataggctggaacttgttcctaacatcgatgaaaagaagacactacactatccttttgttcctgttgctcttagtgtgataatacgatactggtcgtgtaacttctcaagggaaccgtgggtctatgccatacagcttgtgaatgtgaaatcctatgttgatacttctcaagtcaccactctttggttgcttaacatgccaaatgtacttgcatgaatattcaacatgttataccgtcggatctctgcagatattcgggttagggatccgatttttttctgcattttaactactatgtagagaaacatgccaaagcaagggagtttggggctgctgatttctgcttc

SEQ ID NO: 3332 - DNA, 1805 bp, Oryza sativa
  Clone ID: PAT_MRT4530_61496C.1
ccaccgccttcgtcggaggcagctttgcttcgctaccctgcgccgagctagctagggagaggggatcaatataccaccccgcgcatcaaccggagagacgtacgatcgatcgaatagctagctagctctctagctcggggagagagagagacaaagaagcctctctcttcgcatgggaggagggcccaacggcaacggcggcggagggcgtcactatggacgtctaccttccccggacccaaggcgacgtcgacgacgacggcaaggagaggaggacagggacggtgtggacggcgacggcgcacataatcacggcggtgatcgggtccggcgtgctgtcgctggcgtgggcgatggcgcagctggggtgggtggctggccccatcaccctcctcctcttcgccgccatcaccttctacacctgcggcctcctctccgactgctaccgcgtcggcgacccggccaccggcaagcgcaactacacctacaccgacgccgtcaagtcctacctcggtggctggcacgtctggttctgcggcttctgccagtacgtcaacatgttcggcaccggcatcggctacaccatcaccgcctccatctccgccgcggctatcaacaagtccaactgctaccactggcgcggccatggcacggactgcagccagaacacgagcgcctacatcatcggcttcggcgtcctgcaggccctcttctgccagctcccaaacttccaccagctctggtggctgtccatcatcgccgccgtcatgtccttctcgtacgccgccatcgccgtcggcttgtcgctggcgcagaccatcatggacccgctggggaggacgacgctgacgggcacggtggtcggcgtcgacgtcgacgccacgcagaaggtgtggctcacgttccaggcgctggggaacgtcgccttcgcctactcctacgccatcatcctcatcgagatccaggacacgctgcggtcgccgccgccggagaacgcgacgatgcggcgcgccacggcggcggggatctcgacgaccacggggttctacctgctgtgcggctgcctgggctactcggcgttcgggaacgcggcgccgggcaacatcctcaccggcttcggcttctacgagccatactggctggtggacgtggccaacgcctgcatcgtggtgcacctcgtcggcgggttccaggtgttctgccagccgctgttcgccgccgtggagggcggcgtggcgcggcggtgcccggggctgctcggcggcggcgcggggcgggccagcggcgtgaacgtgttccggcttgtgtggaggacggcgttcgtggcggtgatcacgctgctggccatcctgatgcccttcttcaacagcatcctgggaatcctggggagcatcgcgttctggccgctcaccgtcttcttccccgtcgagatgtacatccggcagcggcagctgccgcggttcagcgccaagtgggtggcgctgcagagcctgagcctcgtctgcttcctcgtcaccgtcgccgcctgcgccgcctccatccagggcgtcctcgactcgctcaagacctacgtgcccttcaagaccaggtcctgattcgacctcgccgtagtgcgttagtgtatactctcggtttgattccatatggatatgggggaataatgatttactacagtcgttttggactctctgaggtgcagctttatctgaagattttatgagaaggatttagcttaaaaaaaaaaaaaaaaaaaaatattatggtgttaaaaaaaaaaaaaaaaaaaaaaaaaaaaaaaaaaaaaa

SEQ ID NO: 3333 - DNA, 714 bp, Oryza sativa
  Clone ID: PAT_MRT4530_61692C.1
gttgattgggcgatgtggtagttgcatactagtcgtcctttcttcccttgtcacctttggcggcctcggcttgcttaaaaggatacatatgcttttgtaactagaacatttgttgttgaatttggattatttgatcccatggcgaattctcgggctagccgtttcaagatgtctaatctatcagagccctcaaaagaagctgcatcagctgatgattcaagtgctgtccagaaaactggagcatggagtaacacgttgaacattcttctgcaacaagcttcagtctatggtgtggctgctggttattgcctgtcagcatccctgctctccattatcaacaaatgggcagtcatgaaatttccataccctggagcattgacagctttacagtacttcactagtgttgttggagttctcttatgtggacaactaaagcttattgagcatgatggccttaatttgaggaccatgtggaagttcttgcctgctgcggtgatgttctacatctccatcttcacaaacaatgaacttctactccatgccaatgtggacactttcatcgtgtttcgctcagctgtgccaatttttgtggccattggagagaccctttatcttcaccaaccatggccatcactcaagacatggctttcactttcaactatacttgggggaagtgtgatctatgttttcacagacaaccaagtcactgtgact

SEQ ID NO: 3334 - DNA, 1063 bp, Oryza sativa
  Clone ID: PAT_MRT4530_62143C.1
ggtttacaggggtcctcgttaccatgcagcggcggcattcatcctcggattctggctgctcgacttctccaacaacaccgtgcagggtccagctcgcgctctgatggccgatttgtcaggtcggcatggcccaagcgcggccaacgcgatcttctgttcttggatggcattaggcaacatccttggctactcctccggatccaccaatgactggcacaagtcggtgtttttggggttgtcgacggcggtgacgatggtgtttgcgagggaggtggcgctggacccagtggcggcggcgaagcggaacgagggtgaggcgtcggggctcctcgccgtgttcaaggggatgaagaacctccccgtcgggatgccgtcggtgcttatcgtcaccggcctcacctggctctcgtggttccccttcatcctcttcgacaccgactggatgggccgcgagatctaccatggccgcccggacggctcccccgccgaggtcaccgccttccaagagggtgtccgccaaggcgccttcggcctcctccttaactcgatcgtgctgggcatcagctcgttcctgatcgagccgatgtgccgtcggctgggcgcccgcgcggtgtgggtgatgagcagcgccgtcgtgtgcgtcgccatggcggccgtctccgtgctcagcgcgtggtcgctcggcgacttcggcggctcggtgcaggacgcagcgcgggcgccggcggaggagggcggcgtcagggcgtcggcgctggcgctcttcgtcttcctcggcctccccttcgccgtcctctgcagcgtcccgttcgccgtcacggcgcagctcgcggcgagccgcggcggcgggcagggcctctgcaccggcgtcctcaacatctccatcgtcgtgccgcagatggccatcgccctcggcgccgggccctgggacgagctgttcggggaggggaacatcccggcgttcgccatggcgtccgtgttcgccgccgcggccgccgccgccggcgtcgtcttgctgcccaaggtctccgtccgctccgtcagcatggccggcggccactga

SEQ ID NO: 3335 - DNA, 1713 bp, Oryza sativa
  Clone ID: PAT_MRT4530_62144C.1
cttcgatctcttgggatataactagcttagctatagctctagctaaataggttcgtacgtataggatatttgatccattgatcgatggccgtcgacatggagctcgacggcggtggcgacggcaagggcaaagccccgccgcagataagcctgtcggggctattccttgcgtgcatggtcgccggtggcgtgcagtacggctgggcgctgcagctctctctcctcaccccgtacgttcagacattgggaattcctcatgcactcacttcagttatgtggctctgtggccctattgctggcttaattgttcagccatgcgtcggcctgtacagtgacaagtgcacatccagccttggaagacgtagaccgttcatcctcactggatgcataatcatctgcatatctgtgatcgtcatcgggttctcctcggacatcggctacgctctcggcgacacgactgaggactgcaaggtttacaggggtcctcgttaccatgcagcggcggcattcatcctcggattctggctgctcgacttctccaacaacaccgtgcagggtccagctcgcgctctgatggccgatttgtcaggtcggcatggcccaagcgcggccaacgcgatcttctgttcttggatggcattaggcaacatccttggctactcctccggatccaccaatgactggcacaagtggtttccctttctcatgaccagggcttgctgcgaggcctgcgcgaatctcaaagcggccttcttggttgcagtggtgtttttggggttgtcgacggcggtgacgatggtgtttgcgagggaggtggcgctggacccagtggcggcggcgaagcggaacgagggtgaggcgtcggggctcctcgccgtgttcaaggggatgaagaacctccccgtcgggatgccgtcggtgcttatcgtcaccggcctcacctggctctcgtggttccccttcatcctcttcgacaccgactggatgggccgcgagatctaccatggccgcccggacggctcccccgccgaggtcaccgccttccaagagggtgtccgccaaggcgccttcggcctcctccttaactcgatcgtgctgggcatcagctcgttcctgatcgagccgatgtgccgtcggctgggcgcccgcgcggtgtgggtgatgagcagcgccgtcgtgtgcgtcgccatggcggccgtctccgtgctcagcgcgtggtcgctcggcgacttcggcggctcggtgcaggacgcagcgcgggcgccggcggaggagggcggcgtcagggcgtcggcgctggcgctcttcgtcttcctcggcctccccttcgccgtcctctgcagcgtcccgttcgccgtcacggcgcagctcgcggcgagccgcggcggcgggcagggcctctgcaccggcgtcctcaacatctccatcgtcgtgccgcagatggccatcgccctcggcgccgggccctgggacgagctgttcggggaggggaacatcccggcgttcgccatggcgtccgtgttcgccgccgcggccgccgccgccggcgtcgtcttgctgcccaaggtctccgtccgctccgtcagcatggccggcggccactgatcactactagtctatcaccctttttttttccgtggttttaaatctcccgctatagctgctgctatctccagttagagcgggtactatagcaggctataagccagctgt

SEQ ID NO: 3336 - DNA, 3062 bp, Oryza sativa
  Clone ID: PAT_MRT4530_62177C.1
atgcggggtggggaggaggaggaaaggcggctgggcgaggaggaggaggtcgtcgagaaaagctggaaagctctgtggaagatcaatgcacctgggaagatgaagataaacctctggcgtgcagtccaagattgtttgcccactggcttccagctgagaaggcgtcacattgattctaatgacggctacgttttctggaagcaaggaacaatgcaagaaatgggattagcgccctgcatcctcggcgcgtggctcagaagcgaacgagtgaacaacatcgtcctccctgaaatggctgaggcactggctattcgtcgggcactagtactggcaacagaagagggtttccagcaggtgttggtagcctctgattgcatcttccccggcgccgccgtatcgagcctgttctcccaccacggcgccatcgcatcgaccccggtgcggctgccgccgcaacgaggctgccgcatccagcccgccgtcccgcggccgccgtctcatcgagacagccgcggcgccatcgggttggccgcggctgctgccggacacccaggctgccagacgaggtgcggggacgtcgacatcccgttccccttcggcatcggcgatcactgcgcgattcacgagggttttcggctcgagtgcgacaacgccacgaaaggcaccagcaatcagaagcctttctggggggacttcgaggtgatcaagatctccatggaagacggcaaggtctgggtgaaggcgtacatgtccaggcagtgctacgaccaatccacgggcggtatgtcatacagcgacgcatcggcgaatttgagtggttcatctttctggttatcggacacggataacaaaattaccgtgatcggatgcaagactctcgcctacatgacgaccgattctgcaaatgttcctaagagcatacagtactaccagggttatttcaacgaaggctacaacaccactaaaatatggatgagcagcccttgcagctacatggcagtgatggaaaccgcagcattcaactttagcacaagttacctcacatccagcgtattttatgacacgtacaaggggggagttccggttgtctacgactgggccataacatcaaaaacatgtacagaatctagaagaaacaagacttcctacgcatgtattagtaacaacagtcagtgcattgacaacctgacgaatgcacaaggttaccgctgcaagtgctccaatggatatgaaggcaacccgtacataaaggatggttgcaaagatattgatgagtgcctcaacaatgctacttacccttgcaaggggatatgcaccaacacgttggggaatttcacctgctcatgctccccaggaagttatatgatgaatggagattgcgcaagtatcatatctgttgtcctggaagcaacaaataggttcaatgaacaacagattcttgggcaaggaggccatggaactgtttacaaggggcttctgaagggcaacatggaagtagctgtcaaaagatgcatgacaatcaatgagcatcagaagaaagaatttggtaaagaaatgctaattttatctcaaatcaaccacaaaaatattgtcaaactattaggttgttgtcttgaagtagaggtccctatgctagtatacgagttcatcccgaacggcacgcttttcgatctcatccatggtaaccatggtcagcagatctccctggccactcgtcttcagattgcccatgagtcagctgaggcacttacttatctccattcatgtgcttcaccaccaatccttcatggtgacatcaaatcatccaacatcctccttgatagaaacctgatagcaaaggtttcagattttggtgcttccattctagcaccaacagatgagtcacagtttgtcacactggttcaaggaacttgtggatatcttgacccagagtacatgcagttgtgtcaattaacagataagagtgacgtatatagcttcggagttgttctcgtagagcttctcacatgccagaaagcgttcaacctcaatgcacctgaacatgagaaaagcctatcgatgaggtttctcaatgcaatgaagaataacaagcttgcagatatattagatgaccagatcaagaatagtgagaatatgccatttctcgaagagattgcagagttggcagcacaatgcttggagatgtctggtgtgaataggccatcaatgaagcacattgcagataatcttgacaggctgagaaaggttatgcaacatccatgggcagaacagaattcagaagagttggagagtttgcttggagaatcgtccatggtcagctcaagactttcagtagctaccttccaattccagcttttccagggattttccccagtcctccaagccgggttctcggtggtgaagggctaccacgaggggttcccctgcacccatcaccgcttccttcggctccttcgccacaggagggcgctggggtttgtgcttcaagatgttctcgcgcccctgcttgaagtggcggcgctgcgttcaggacctttcatctggccggctcctgacactgtcgcctttctcactcccggtgatggcgcggataggggtggcggcggcgcgaagggagggggggaaaggttcatggggtttcggagcgacggcgaccggaaagcgatgagggcggctgggcgagaggcggaggtcgtcgatggtggcaccggcgacgacgtcgacttcaagctccacacctgctgccaccatcgctcgctcgttcacacaggaatgacactggtggtgtgtgaaaaatcgtggcatgggcgaggacgcgtgagaggatggggaaggaagcaatccttgccattccacctcttcctcactggacagaggtcgacagggccgtcaggtccaccgggctgggacggtgccgacagcagggacgtggggaagaggaaagggccggccgccacccttcaccggaaccgctgctcaagctctgtgccccactaccacctcgtcaagctccggagctcgtccatcgctggcctgtcgacctccggagctccgagaggctg

SEQ ID NO: 3337 - DNA, 1090 bp, Oryza sativa
  Clone ID: PAT_MRT4530_62336C.1
gcccgcacgagacatcgtcaccgatcgatcccggccattccacggtcgatcgatcgtctccggccggccggtcgccggtgggaattgaagcagctagctgacatacatacatggcgggcgtgtgggtgttcaaggacggcatcgtgcggcgcgtggagaaccccggcagcgaggaatcgtcgtcggcgggggacggcggcggaggcgggcggcggaaggtgctggtgcacgtgccgagcggggaggtggtggcgtcatacgaggtgctggagcggcggctgcgggagctcgggtgggagaggtacctcaccgacccgtgcctcctgcagttccaccagcgctccaccgtgcacctcatctctgtcccccgcgacttctccaagttcaagctcgtccacatgtacgacatcgtcgtcaagacccgcaacgtcttcgaggtccgcgacgccgctgcccccgccgtctcaccggcgacctagctgctgatccgagatccatccatccatcgatcagacgacagcttatagctacagcagtccacatgagcttgcctgcctgctattataagagtgtaagtatgtatatatatactggtatgcgtgtgatcgatcaaggatcgatgtacacacaaatgatcagcatgcacagatcactagatcgagatctatagctcgatcgatttggggtttctcctgccggcgttgcagcttttggattagatgttgcgccggtgaggacattgctataggttaattggcttttgggtatatttctgcataaataatgcatcaatagagagcacaacatgtgtatgcatacttatatttatatgtacacatgcatacatatataagtacatacataggggccgggggcaacatgcaggttgcagagattctgccagagatcaagcagaaaggggatcgccgatgccctactctcaaccgtacctttttactgtttaatttggaataatttggattgtctcaatacaaattatgtaccagttttttcacatatgatttgcacgacattttaaatattgtaatctgtacacataatattgatcggtctctctttccctgtggcc

SEQ ID NO: 3338 - DNA, 1181 bp, Oryza sativa
  Clone ID: PAT_MRT4530_62420C.1
cccacccactccaggctcaactcaactccacccgaatccgcaagagagagagagagagacgatggcggcggcggcgggaggagggacgagggaggagatggtgtacatggcgaagctggcggagcaggcggagaggtacgaggagatggtggagttcatggagaaggtggtgacggcggcggcggcgggcgggggtggggagctcacggtggaggagaggaacctgctgtccgtggcgtacaagaacgtcatcggcgcgcgcagggcgtcgtggcgcatcgtgtcctccatcgagcagaaggaggaaggccgcggcgccgcgggccacgccgccgccgcgcgctcctaccgcgcccgcgtcgaggccgagctctccaacatctgcgcggggatactccgcctcctcgacgagcgcctcgtccccgccgccgccgccgtcgacgccaaggtcttctacctcaagatgaagggcgactaccaccgctacctcgccgagttcaagaccggagccgagcgcaaggacgccgccgacgccaccctcgccgcctaccaggccgcgcaggacatagccatgaaggagctgtcgccgacgcaccccatcagactgggccttgcgctcaacttctccgtgttctactacgagatcctcaactcgcccgaccgcgcgtgcacgctcgccaagcaggccttcgatgaagctatttcggaactggatacccttggggaagaatcctacaaggacagcaccctgatcatgcagcttcttcgcgacaatctcactttgtggacttctgatatgcaggacgatggaggtgatgaaatgagggatgcaaccaagcctgaggatgagcactagctaaagatcctagtgacagtcgtctgtctcttaaccgctgggggtagttatgatgcttgtacaaggaccattttcttgtgtcctttcgtcgggtctttgcttaccctttgtttacttatattgctatcgccatcctcatgtattatttgttactttcctgctggaatcctgctcgtgtgtgggagagtgcctcaagcctttaactaggacaaggattgtcaactcttgtttactatgattgaatggctatgcttgttcgatatttaaaaaaaaaaaaaaaaaaacgagaaaaaaaaaagaccaggccgcctgccgtgtcctgcag

SEQ ID NO: 3339 - DNA, 1138 bp, Oryza sativa
  Clone ID: PAT_MRT4530_62783C.1
tttttttttttttttagatggaagatttatgatgtatatatgaattgatttgatgttataacagcaggggcaccaagggcaggagtactgctgatgaaccactgcattgcctcttcatcaagaactgcctcttgccccatttccacctgcctctcccgcttcctggcaatctgccgccgccgccggtgatgtccatgcctgaacagcctcactgacgctgtgttgcttcgcctgcttgtaatttggcttctcgtcgccggtggcctgccgccgtgtttgttcttcttgcagtcgatgaagagcagcttgtcggggccatactgcctgagccggagaaggccacggtgtcgcctggtcggaggcccttctccctcacgaatcggctccaccccttggtgagcacgtaactctggctgctgttccagtacgagtaccggaatcgccacaccttgccgtcgccgtcctcgaagttgaggagcacgcccttgccggcggcgtcggagctgtggcggcggagcgggaacgggaaatgcctctcggcctgctgcttgggcaccacgaggcggttgagcttgccgacgtcgctcggcgtcacggccttctcgaacagcggctcgcgcgcccaccgcggcgtcggctgcgcgcgcgagccgcggcggaggccctgctggagctcgtcgtcgtaggtgtgcttccgcagcatgtccacgacctccgccttggagtgcgcggccaggaacgcgagctcgccggcggacgcgccctccgccgccggggcgcggttggtgacggcgtcgcgcccccggaagcggagcgccgccacgtcgtaggcgcgcgccgccgcctcctcgtcggggaacgtcccgagccacacccgcgcgtgccgctcgtagatctgcgccccccaccgcccgttcggctgcggcaccacccccttgtaccgcgacgacggccgcgtcgccgtcgtcgacgacggcagccgcagctccgccgcctggacgacgtggatcaactcgtcttcctccattgcggccaactcctcctcctcctcctcctcttgctttgaatcggtcgtcgacgacgacccaccggagccggagttgcaggagaagacgaccatggcagcttcttgctccat

SEQ ID NO: 3340 - DNA, 266 bp, Oryza sativa
  unsure (1)..(266): unsure at all n locations
  Clone ID: PAT_MRT4530_62821C.1
gaccataacaataaacacctanaaaaagggggacagaaaaacaggaagcgccaccaagcagttcaagaggctcccccacccccaaccagtcctggctccacaaacccccacctgttttgctactagtagcttaaatgcgaaactgcataaccatctctagcaacctcacatacagtggagccccatatttcccaacaacaattacaaccacataggtttcattacacagtagctaatcactatctacaaacttctaagtcacataa

SEQ ID NO: 3341 - DNA, 2624 bp, Oryza sativa
  Clone ID: PAT_MRT4530_63568C.1
atgggcgtatgcggtatgaacactcagaacattaaagattttactttctttcaaaggcatctactggagaccccaagcttcaagagctatatcatcaaaggttttggtttttctactcctcggtttttggagatacgcttcttaaggggtttgttcggatcagctagacagtggctgtacagccgcagtgctgcagttgttttagtacaaatttacttggtagatcctgttggtgtggctgcagcgcagccactgctagctcttccgaacacagccataataaaagattttgttggtttttgccacatcgccaccacatcatcaagtccaaagactggacagggccacgagcccacgacgtgtttcaggccggtccttctggcaccttctcccctctgcctgacacgtgggccccacaccatcacccaccaaattgaggccccacaggctgatcatgttgaggattcagtttcatcacccaaatacgtgaaacctgccgttgcgaagcaaaatggagaggttgtgagcagagctaccaaatctgatgcaccagtgtctaaacccaaagttgacccgtcagttcctgcttccaaggctgaagctgatggtaatgcacaagctgtggaatcgaaggctgcactggacaagaaggaagacgtcggtgttgctgaaccgttggaagctaaggctgatgctggtggagatgcaggtgcagtaagctctgcagatgatagtgagaacaaggaatctggtccattggcagggccaaatgtgatgaatgtcattgtggtggcttctgaatgttctcctttctgtaaaacaggtggtcttggagatgttgtgggtgctttgcctaaggctctggcaagaagaggacatcgtgttatggttgtgataccaagatacggagaatatgcagaagccaaggatctaggtgtccgcaaacgttacagggtagctggacaggattcagaagtgagttattttcatgcttttatcgatggtgttgattttgtgtttctagaggcccctccctttcgacaccggcacaatgatatttatggaggagaaagatttgatgttttgaagcgtatgattttgttctgcaaagctgctgttgaggttccttggtttgctccatgtggtggttccatctacggtgatggcaatttagtcttcattgcaaatgattggcatactgcacttttacccgtatatttgaaggcatattacagagacaatggcatgatgcagtacactcgctctgtccttgtgatacataatatcgcttaccagggccgtggcccagtagatgaattcccctacatggaattgccggagcactacctggatcacttcaagctgtacgaccccgtcggcggcgagcacgccaacatcttcggcgcgggcctgaagatggcggaccgggtggtgaccgtgagccccggctacctctgggagctgaagacaacggagggcggctggggcctccacgacatcatacgggagaacgactggaagatgaacggcatcgtgaacggcatcgacttgggggagtggaacccggaggtggacgtgcacctgcagtccgacggctacgccaactacaccgtggcgtcgctggactccagcaagacgcggtgcaaggaggcgctgcagcggcagctgggcctggaggtccgcgacgacgtgccgctgatcgggttcatcgggcggctcgaccaccagaagggcgtggacatcatcggcgacgcgatgccgtggatcgccgggcaggacgtgcaggtggtgatgctgggcacggggcggccggacctggaggagatgctgcggcggttcgagtcggagcacaacgacaaggtgcgcgggtgggtggggttctcggtgcagctggcgcaccggatcacggcgggcgccgacgtcctcctgatgccgtcgcggttcgagccgtgcggcctgaaccagctgtacgccatggcgtacggcaccgtccccgtggtgcacgccgtcggcgggctcagggacaccgtgtcggcgttcgacccgttcgaggacacgggcctcgggtggacgttcgaccgcgccgagccgcacaagctcatcgaggcgctcggccactgcctcgagacgtaccgcaagtacaaggagagctggagggggctccaggtgcgcggcatgtcgcaggacctcagctgggaccacgccgccgagctctacgaggaggtccttgtcaaggccaagtaccaatggtgaagagaccatgtccgcccgcggtctccgcctgcgcgttcggcagctatagctatagcctccctgaagaagcttggcgctgctgtggaggtgcgactcggtggcggtgtggcgccggcgccggcgcttgcaggggaggtgtttgtgctgaccgagctgtgcgttgaggtgcgcaaattagcttccggtttgtgtgttcatggcgaggcatggtggagttgagggagtattaagctttgtttcagatgcatcatgcatgcgtaataggatgttgtatttaataatgtgtttgttatgtccattgatgcgatgttacttcttcattaaaaaaaaaaaatgaatggatgtgacttgtgagcaaaaaaaaaaaaaaa

SEQ ID NO: 3342 - DNA, 2528 bp, Oryza sativa
  Clone ID: PAT_MRT4530_63570C.1
ggaggaggaggagcggcggcggcggcggatcctatgtcgggggcaatcgcttcctcgccggcggctactctcttcctcgctggctcctcctcctcttcgccgcggcgcaggcggagcagggtgagcggggtttggtggcacttgtatggtggcacggggctgcggttgcattgggagcggcggggtttggttcgggacggagccgtcgtgtgctcggcgtcggccgccggtggtgaggatggcgtcgcgaaggcgaagacgaagtcagcggggagctcgaaggcggtcgctgtgcagggcagcacggccaaggctgatcatgttgaggattcagtttcatcacccaaatacgtgaaacctgccgttgcgaagcaaaatggagaggttgtgagcagagctaccaaatctgatgcaccagtgtctaaacccaaagttgacccgtcagttcctgcttccaaggctgaagctgatggtaatgcacaagctgtggaatcgaaggctgcactggacaagaaggaagacgtcggtgttgctgaaccgttggaagctaaggctgatgctggtggagatgcaggtgcagtaagctctgcagatgatagtgagaacaaggaatctggtccattggcagggccaaatgtgatgaatgtcattgtggtggcttctgaatgttctcctttctgtaaaacaggtggtcttggagatgttgtgggtgctttgcctaaggctctggcaagaagaggacatcgtgttatggttgtgataccaagatacggagaatatgcagaagccaaggatctaggtgtccgcaaacgttacagggtagctggacaggattcagaagtgagttattttcatgcttttatcgatggtgttgattttgtgtttctagaggcccctccctttcgacaccggcacaatgatatttatggaggagaaagatttgatgttttgaagcgtatgattttgttctgcaaagctgctgttgaggttccttggtttgctccatgtggtggttccatctacggtgatggcaatttagtcttcattgcaaatgattggcatactgcacttttacccgtatgtttgaaggcatattaccgagataatggcttgatgcagtatactcgctctgttcttgtgatacacaacattgctcatcagggtcgcggccctgtagatgacttcgccacgatggacttgcccgagcactacatcgatcatttcagactgtacgaccccgtcggcggtgagcacagcaacgtgttcgccgctggcctgaagatggctgaccgcgcggtcaccgtcagccatggctatctgtgggagatcaagacaatggacggtggctggggcctccacgagataataaaccacaacgactggaagctgcagggcatcgtgaatggcatcgacatggccgaatggaaccccgaggtggacgagcacctgcagtccgacggctacgccaactacacgttcgagacgctggacaccggcaagaaacagtgcaaggaggcgctgcagcggcagctgggcctgcaggtccgcgacgacgtgccgctgatcgggttcatcgggcggctcgaccaccagaagggcgtggacatcatcggcgacgcgatgccgtggatcgccgggcaggacgtgcaggtggtgatgctgggcacggggcggccggacctggaggagatgctgcggcggttcgagtcggagcacaacgacaaggtgcgcgggtgggtggggttctcggtgcagctggcgcaccggatcacggcgggcgccgacgtcctcctgatgccgtcgcggttcgagccgtgcgggctgaaccagctgtacgccatggcgtacggcaccgtgcccgtggtgcacgccgtgggcgggctccgcgacacggtggcgccgttcgacccgttcgccgacacggggctcgggtggacgttcgaccgcgccgaggcgaaccggatgatcgacgcgctcgggcactgcctcaacacgtaccggaactacaaggagagctggagggggctccaggcgcgcggcatggcgcaggacctcagctgggaccacgccgccgagctctacgaggacgtcctcgtcaaggccaagtaccagtggtgagctggtggtatttttcgcgacgcctctggatcccgccgtggatgggcgcgctttttctctagggcggctctgcgtcggagacgctcagacgcatcgcgcgcgttcgcgcccacacgatgactggcacgctgctgctgagacggcggcacgcgatgccatcatgccaccggacggtaggagcaacggtggaagtgaactgtactactggtgctacactgctactacatgagatctgctcttattggtcacgtactcacgttcacgctgaattaccgaatgtgttgtgtcttgtgtgtgtgtgttaaaaggcattgtcctggtaaatggtggagacgagatggccgggtcgcgggagttatatttgtatatgttgccagctttctgagtttttaaaaaaaaaaaaactcttc

SEQ ID NO: 3343 - DNA, 1832 bp, Oryza sativa
  Clone ID: PAT_MRT4530_63782C.1
atggacgtggagaaggtggagaggaaggaggtggccgtcgacgacgatggccgcgtcagaacagccgcgctgatatggcaatctcttcaatgcactgcatctttattgatgttcatgcttaatcagccaggtgttccaagagaccaagaaggcaagaatgtcacacgaacggtatggacggcgacgacgcacgccatcaccgccgtgatcgggtcaggcgtgctggcgctgccgtggagcgtggcccagatggggtgggtgctcggccccatcgccctcgtcgtctgcgcctacatcacctactacaccgccgtcctcctctgcgactgctaccgcacgccggaccccgtccacggcaagcggaactacacctacatggacgtcgtccgctcatgcctcgtacgcgattctctggggcgcaatggtgggttacaccatcacgaccgctacgagcatcatgatttgggccgtgagaatgcaggtcagtggtgcgcacgaactgccaccactacaagggggccggacgcgacctgcggctcgtccgggacgatgtacatggtgctgttcggcctcgcggaggtcgtcctgtcccagtgcccgagcctggagggggtgacgctcatctccgtcgtcgccgccgtcatgtcgttcacctactccttcgtcgggctcttcctcagcgccgctaaggtcgcgtcgcacggcgcggcgcacggcaccctcctcggcgtcagggtcggcgccggaggcgtcaccgcgtcgaccaaggcgtggcacttcctgcaggcgctcgggaacatcgccttcgcgtacacctactccatgctgctcatcgagatccaggacacggtgaagtcgccgccgtcggagaacgtgacgatgaagagggcgagcctgtacggcatcggcgtcacgaccgtcttctacgtgtcgatcgggtgcgtcgggtacgcggcgttcggcaacgccgcgcccgggaacgtcctcaccggcttcctcgagccgttctggctcgtcgacatcgccaacgttgccgtcgtcatccacctggtcggagcgtaccaggtgtacgcgcagccggtgttcgcgtgctacgagaagtggctggcgagccgttggccggagtcggcgttcttccaccgggagtacgcggtgccgctgggcggcgggcgcgcggtgcggttcacgctgtgcaagctggtgctgcgcacggcgttcgtggccgtgacgacggtggtgtcgctggtgctgccgttcttcaacgccgtgctcgggctgctcggcgccgtcgcgttctggccgctcacggtgtacttcccggtgaccatgtacatggcgcaggcgaaggtgcagagaggcagccggaagtgggtggcgctgcaggcgctcaacgtcggcgcgctcgtcgtgtcgctgctcgcggcggtgggctcggtggccgacatggcgcagcgcctgcgccacgtcaccatcttccaaacgcagctctgaacccggatggacgcatgcagccgatgagattatgcatgtagtactactcctactacttttgttgctgtactcgtactagttgctggtgtaatttggctgtcgtgttacaagctactactactagtacaagcccctctgtttttatacctctgaatttagcaaatgggacttgaggagtatggttatcctatggacaaaactgtgtacgttattccggttgggatcgtcaagcatagcatataggaatttcgggtgaaagaattcaattatgagtattagcaccttttgtatttagaacttatttctgaaagcaactaaagttaaaaaaaaaaaaaaaaaaa

SEQ ID NO: 3344 - DNA, 1478 bp, Oryza sativa
  unsure (1)..(1478): unsure at all n locations
  Clone ID: PAT_MRT4530_63823C.1
gcacatactacaggattgaaggacacagccagcccacgcaggcccgccgccgcgctcgcccagcccgccgccacaccctcctcgcccccccccacacggagcccccgcccccgtcgcctgccccatcgccgccgccatggacccttcggcgccgtccggtagctccgccgacgcctcggcgtcctcctcttcttccgccgtagaggacctcgccccgggcatggcggccatgagcctccaagaccggttcgagttgctgcggggcatcggcgaggagtgtatccaggaggacgagctcatgaatctgctgcagaaaaagcccgtccccatctgctacgacggatttgagccctccggccgcatgcacattgcccagggcattgtgaagacaatcaatgttaacaagatggtcagggctggatgcaaagtaaaaatttggatagcagactggtttgctcagctcaacaataagatggggggtgatctaaaaaaaatccagactgttggacggtacatgattgagatttggagagcagctggtatgaatcttgatggtgtggaattcttgtggtcctcagaagaaatcaataatcgtgcaaatgaatattggccacttgtaatggacattgcctgtaaaaataatgtcaaaagaataatgagatgttgtcagattatgggtcgaaatgattcggatgagttgacagctgcccaaatattctatccttgtatgcagtgtgctgatatatttttcttgaaggcagacatttgccagttgggcatggaccaaaggaaggctcaggtaaatttgaagataaaacaagcattttgccctcccaacgtggttgatgggaacccatgcttggagtacatcaagtatattgttttcccttggtttgaaatgtttgaggtggttcggaaggaagcaaatggcggtaacaagacatttacaaacatggatgaactcatcgatgattataagactggtgctttgcatcctgctgatgttaagccagctctagcaaaagcaataaaccaaatattgcagcctattcgtgaccacttcaataacaacagtgaagcaaagattctgcttaacactgttaagaagtacagagtaaccaactaaggaggaaactagttcaagcatctttgtcctattgatctacctggatattttctatggctactttggaaccatatgaacctaatatttaatggaggaattttgtttgccatttttttgtttttgtttttttatgtactgagttgcagagcaaccattgcatggtactgcacaaactttgtttagattattagttgtcagatacccaatctcgttttatcagtatggtgcaatgaatgttcatgatcaccttaatgttatagatttgacaagacaaagtcgagtgcaaatgcaaacatatggtggaaatgcatttgattttattccgggaaaaaaaaaaaaaaaaaaannaaaa

SEQ ID NO: 3345 - DNA, 889 bp, Oryza sativa
  Clone ID: PAT_MRT4530_63826C.1
cggacgcgtgggtgtggctaccgagttcatttaagggcattgtgaagacaatcaatgttaacaagatggtcagggctggatgcaaagtaaaaatttggatagcagactggtttgctcagctcaacaataagatggggggtgatctaaaaaaaatccagactgttggacggtacatgattgagcccacgcgtccggctggtatgaatcttgatggtgtggaattcttgtggtcctcagaagaaatcaataatcgtgcaaatgaatattggccacttgtaatggacattgcctgtaaaaataatgtcaaaagaataatgagatgttgtcagattatgggtcgaaatgattcggacgagttgacagctgcccaaatattctatccttgtatgcagtgtgctgatatatttttcttgaaggcagacatttgccagttgggcatggaccaaaggaaggtcaatgtgctagccagggagtactgtaccgacatcaaaaggaaaaacaaaccgattattttgtcacatcacatgctccctggttttaaggagggccaggaaaagatgtcaaagagtgatccatcctcagccatttttatggaagatgacgaggctcaggtaaatttgaagataaaacaagcattttgccctcccaacgtggttgatgggaacccatgcttggagtacatcaagtatattgttttcccttggtttgaaatgtttgaggtggttcggaaggaagcaaatggcggtaacaagacatttacaaacatggatgaactcattgatgattataagactggtgctttgcatcctgctgatgttaaaccagctctagcaaaagcaataaaccaaatattgcagcctattcgtgaccactttaacaacaacagtga

SEQ ID NO: 3346 - DNA, 453 bp, Oryza sativa
  Clone ID: PAT_MRT4530_6392C.1
ctgtctctggtgtgctctctttccttgagaaccacagtttgcattcagtgtaatagtgaagcaggtgctggggctatcaccagaggagccggtcactgccatgatacttgaagatttcctcgccttcatgaagggtctcatctctttccctctctacatcccagggacgccctatgccaaagcataataacttcatccttttgtccgcgaatcctcacaggccagagcgaggatatcaagcactgtgaagggtattattgaggagaggaggaatgctggctccagcaacaagggtgatttccttgatgtgctgctttcaagcaatgagctctctgatgaggagaaagtgagctttgtgctggattccttactgggaggatatgagaccacctcactcttgatctccatggttgtgtatttccttgggcagtcagctcaagatctggaactagt

SEQ ID NO: 3347 - DNA, 1282 bp, Oryza sativa
  Clone ID: PAT_MRT4530_64041C.1
agcaagctgcacagagctagcgttagcttggttagttgttcttagcattctagctagctcaatggcgaaagacattgaggcgtcggcgccggagggcggcgagttctcggcgaaggactacaccgacccgccgccggcgccgctgatcgacgtggaggagctgaccaagtggtcgctgtaccgcgcggtgatcgcggagttcatcgcgacgctcctcttcctgtacatcacggtggccaccgtgatcgggtacaagcaccagtcggacgccaccgtcaacaccaccgacgccgcctgcagcggcgtcggcatcctcggcatcgcctgggccttcggcggcatgatcttcatcctcgtctactgcaccgccggcatctcaggtgggcacatcaacccggcggtgacgttcgggctgttcctggcgaggaaggtgtcgctgatcagggcggtgctgtacatcatcgcgcagtgcctgggcgccatctgcggcgtggggctcgtcaaggggttccagagctcgtactacgcgcggtacggcggcggagccaacgagctcagcgacggctactccaagggcaccggcctcggcgcggagatcatcggcaccttcgtgctcgtctacaccgtcttctccgccaccgaccccaagcgcaacgcccgcgactcccacatcccggtgttggctcctctcccaattggattcgcggtgttcatggtccatctggccaccatccccatcaccggcaccggcattaacccggcgaggagcttgggagccgcggttatctacaacaaggacaaggcctgggatgaccaatggatcttctgggtgggccccctgatcggcgccgccatcgccgccgcctaccaccagtacgtgctgagggccagcgccgccaagctcgggtcctaccggagcaacgcctgagatcggcggcggcggcgcgcgcgaggtggcgctgaagtgtagatacgcgtacaagatggccgcctctgtccagcactagatcaacgaattcagccttcgcatcctgcatttcgcctcgtggatagattctactgcactattatgtactatgtatccatgcatatggtctccattcctttgaactatgtccgccatatgttgcttcccgctggtgcttccaagtttggttaattttccttcacattctgcatgtatgtaatattcatatggagaatttgtgaatttgaagatcatagttactattatgtgcgatttattaagtactttctgcatgcttgtctgtggagatgtaac

SEQ ID NO: 3348 - DNA, 3600 bp, Oryza sativa
  Clone ID: PAT_MRT4530_64237C.1
tcatcgtcgcttggcgagctggaacgtgcgcttcagaaactggctggcggcctcgtcgtcgcggtggcagagcacgcggaggatcgtgttcgcgtcggcggcgtcccaccgcctcgacgtcggcggcaccggcgtcacgccgccgtagccgccgtcgccgtcgtcgccgccgcgccccacggcggcgacgatggactcggacgtggcgacgccgaacgcgtcgatgagggcgtccataacaaaatgctagtaggaactttatacaaagcgaagaaagtacatttccacagaaagacaaaaatatatgccaaacagaaaaggtgtagatattacacatttgaaatttagtgattacagtgaaaagcataggtttgaacaaaaaaataaaaaagcatttgctagagaaagtaacaatgctagtgagagaagctcttctgccagcatatctaatttttacttgaaagttgaaaagcggggaagcttgtgcttcaaataatataactttgctcttctcactttcttgtgcctgattactttaatttccttgatcctgggtgaatatatagggaaggtaatctcaactccgacaccagcaataatccttctgacacggattgtggtgtgaacaccagatttgtgttttgctataattatgcccttaaagagcgacaatctcctcttgttgggccgttgcattctaagctcaatgatgtcaccaggcctaagatctggtaaagtcttcaccttttcagcctcctcaatgaactgtttgttcagaatcccaatgatctccccgaacttaaccgggggcttgctcggcggcggaggctcatcttcttcctcctgctcttcctccgccaccgcgacagccgcctccgcctcaccctcctccacctcagcgtcagtcgaggcagcaacagcctcagcctcagcctcagcggcgggctccggttctcccgcttctgcgctggcgtccgcgcgagggaccaggcggctggcccggcgaggggaggcggtcagggagaggcggcggaatgaggaggacaccgcgaggagctgcggccgcggcggcaagcggtggcatgcgacggcgtgggggagtaacgcaccggagatggcggcggtggcggaggcggcggcggcggcggcggccatcggaaggttacttacggcgggtcgacggaggagccgcgcgccggcgacgccgcggaggtagaggccgtggtagaaggagtggcgcgagtcgaggaacacgaggcggaacgccgccacctcggcgacgcgggcgatcgccgacttcgccgcggcgcgcgcgccgtcgaagcgtggcgacggcgcggcgacgagcgacttgtcgatggcgtggaggtgcgtgaggacgtactcgagcgtgttgaggcggacgtagaggcgctgcgtgccgcggctgatcgacggccgcgggacgtggtgcgagccgccgccaacgccgacgccgcgtgggccgccctccggcgcttggcacgacggcagcaccgtcttcctccacagcttgaagaagcccgagtcctggttgcacctcgtcaatggtggcaacggtgggaggtaattctgcttggccccgcacgaggcgacgaaggagatgtactcttggaagatcgcctcgaggccgtcgacgaggtcttgcaccacctcgtctttcgcgctcgccgggatctcggagaactcttcgacggtatacttagccagcttcatcatctccatcgctgacccggcaaaaggttcatctttggattttggtatccagctctcggtttctttggctctggcgaggcagtccatggtgatcttgaacctgtcgtccatccacaccttgagcaagcccataacgacggaatccacctcgtagggctccatgtcgccgacgatggccttggcccggtcgtcgcggcagtcggcggcgtcctccgccgtcatctgcgccatggccttctccatcctgctcgccgactggagcacgcggacgagctcctccgtgaggatggtcaccttgccgaggtactgcctcagcacgacgccgtagcagccgtgcagggtgaccgccgcgacggccaccggcgccgggtgccaccgcctcagcaccgggctgaagctccgccgctccacgacggcgagctcctccgtgtccctcgccagctgcgtcagcaccacccccggctcgccgtcgccgtcgcccattccgctctcgagaatcttggtgaaggcgttcttcatcgaacacctgatgtagtagtcgacgcggtcaccggcgaaattggcggcgtcgtcggcgtcggcggcggcatcacggtcggcgatgatcttgccggcggcgagcgagatggagaggaggatctccatgacctcggtgggggcgccgccgatgcccttctcgtagctgtcgtggtagtccagcagccgcttctcggaccactcctgcatggcgccgagcgcgccgaggagcgccttgccgtacaccgcgtcgcgggtccccctggcgtcggctgcgacgtcggcgagcacggcgagcgcggcggcggcgagctccggctcgacctggccggtgacgacgtactgctggaagaacgcccacgcgaggcacacgttgtgcacgggcctggtgacgcccagcgtcggccacgtcttcctgatgaggtcgaggagctcgtcgacctcgtcgagcacgacggtgcagtcgcggtggtcgaagatggcgtggaggagcgaggcgtagaggaggacgttgagcgggtagccgtcggcccaatggcaggcgtcgccgccgccgctgccgacgccggagcgccaggcgagggcgtggacggcgctggtgagggtgcgcatggcgtcggagctcttggcggtgtcgatggcgcggatctcggtggcacgcatcacctcgcggaagcggagcacggcggagttgaggcggtcgagggggagggaagggtggaggatgaggccggcctcgaggagcttcacctggcggaactgccactggtggtactcctcgccgtcggcgaactccgccggcttcagttgccggaggagctcgagggggaggacgatggtgtcgggcctcctgccgacctgcccgacgacggcgcgcatcagcgtccgccgcagccgcgcgtcgctctgctcggtcacgcgcatctgctgccgcatgatctccgccgacgtcatcggccgccgcccacgccccggggacgccggccccgacgtctggctcagcgtgcgcaccatcatcggctgcgccaccatcgccgccgacgacgacgacagccgcctcgccttgagccccagcgccttcttgacgcggctgccgccgccgcccctcggcccggccaccggcgacgacacctctgctgcgccggcggtgttcccgccggaggaggagcggcaggacatgaagaagatctcgtaggcggtctcgcggagctcgacggggccgagcgcgtcgacgcgtccgaacgggcagccgacgtcggcggcggcggcgaagtcgagctcggtggcgtcggacgagggcgtcgcggaggaggtcaccgagagggagcccgaacgctggtggcgccccat

SEQ ID NO: 3349 - DNA, 1291 bp, Oryza sativa
  Clone ID: PAT_MRT4530_64414C.1
ggcacgaggcccacatcttattgtcacttccatctcattctcctaattgtcatcactagcttctagctagcttaattaattaattagccatggcggaggagaagcaccaccaccacctgttccaccacaagaaggacgacgagccggccaccggagtagactcctacggcgagggcgtctacacgtcggagacggtgaccaccgaggtggtcgccggcggccaggacgagtacgagaggtacaagaaggaggagaagcagcacaaccacacggagcacaagcaagcaaagccacatcttattgtcacttccatctcattctcctaattgtcatcactagcttctagctagcttaattaattaattagccatggcggaggagaagcaccaccaccacctgttccaccacaagaaggacgacgagccggccaccggagtagactcctacggcgagggcgtctacacgtcggagacggtgaccaccgaggtggtcgccggcggccaggacgagtacgagaggtacaagaaggaggagaagcagcacaagcacaagcagcacctcggcgaggccggcgccctcgccgccggcgccttcgccctgtatgagaagcacgaggcgaagaaggacccggagaacgcgcacaggcacaagatcacggaggagatcgcggccacggcggcggtcggcgccggcggctacgccttccacgagcaccacgagaagaagaaggaccacaagagcgccgaggagtccaccggcgagaagaagcaccacctcttcggctgatcgacctcatcacaacgtcgccggcggcggcgacgacctcgccgtacgtcgccggccgccgtgtcgtcgatttgtgtgtgtaataatttgtcttcttctgcatgcgtggtgttgctgtttttcacaagagtctccggcctcgaccagtgagaggctgacaggtggggccgtgagttcagcttgtgttgcttgattttctctgcagccttgccctctgtgtgtccaaataagtggtgtgcatggctctctccgtgtcatgtatcaatgtatttttatctgtactttgtacaagtgaagcaatatttatcgaaccttgactttctccaaaaaaaaaaaaaaaaaaaaaaaaaaaaagattgcgccgcgcgggctttttcctctccacgttcctgcctccccctcgccccgccttcttcgacggatcgtcccgtcgttctcgctttgctcctcgttcctttcgtttcgcttccctcctctcgttcttttctctctaccgtttttcttt

SEQ ID NO: 3350 - DNA, 196 bp, Oryza sativa
  unsure (1)..(196): unsure at all n locations
  Clone ID: PAT_MRT4530_64758C.1
gggtacgccttccacgagcatcacgagaagaagaaggaccacaagagcgccgaggagtccaccggcgagaagtaagcaccacctgcttgcggctgatgcgacctgcatcacaacgtcgccgtcggcggcgacgacntcgccgtacggtcgccaggccgccgtggtcgtcgatttgtgtggtggtaagaatttgtct

SEQ ID NO: 3351 - DNA, 709 bp, Oryza sativa
  Clone ID: PAT_MRT4530_65023C.1
cccgggtcccggccgggcctgctcctcaaacgagaccaagaaatcaatcgttccagcgaagaagaagaagaagaaggaggaatccatggcggcgaggacggtggcggtggcggcggcgctcgccgtgctgctgattttcgccgcctcgtcggcgaccgtggccatggccggccggccaacgcctacgacgtctctcgacgaggaagcggctcaggcggcggcgcagtcggagatcggcggcgggtgcaaggaaggggaaggggaggaggagtgcctcgcgaggaggacgctgacggcgcacaccgattacatctacacccagcagcatcacaactaattaatcttatcgatcaatcaataatcaatcaatcaatcagtcgcttcctcttcgatctaccaatactagtattggtatataattaaaactgcaaatccgtcatgcatgcatggtatgcccatcgatccatccatgattatctctagttagatgtagtaacaaactgcatgcgcgtgttgtgctcatcagtgttaattttggccgcccccctgttgataaacagttcttgatcgatgagagctagctttcgttttgttttgatttgttggttggttggttgatttgagagttgagacagatcgatctctgcttgaatggtacctgtcccaatttcagaaaaaaagattctaattacaacgcttctgattgatg

SEQ ID NO: 3352 - DNA, 2430 bp, Oryza sativa
  Clone ID: PAT_MRT4530_6575C.1
ttttttttttttttttttttagtttccagaaccaggaccaccaatggttgatacaaaattctcagtacataaactcacctgataagtttcccctacggtttgggagcatttatgtacaaggaacatgattttaatgactgccaaaaccaggtattcttatacctccaatggtaacaaaccaggacgggagcatgaacaagcaaggagtagtggcacagagtgttccttagtatacatcttcctaggattagatagtagtagagtgggaaatagaagtgcttattccagtacatctcagctaccagtagcttattacggtacatagcagctagccatctagagttctagacccatacaataaccacatatcaacatatcacccaaaaaaggcaagaggcaagaacgaagcagagagataccatatcggtatttacagtcacgcaggatacaaaggaaccacagatcgtgggcagtccgacctcttcccggcaagggagtagtatgcaagtatctgagcttgactatctacacaaggttcaccatcttctctcattcgatttgcattctcagaactgggaggtgtaaactctatgttccagaagggcctggccatgagcatgagatcgtgaccagtcttagaagccttgtagccctgtacccacacgtatctcagggaaggcatactccgtatagcgcaggctaaagcttgctcactgaagcaacaactccttagctcaagcttccgcaggttctcacaccccaatgcaaaccggatcagaccatcatctgtttccccaacattacccagaagcatgtattggataattccactgtactgtccaatatagccaaggcctgtatctgaaagtccccctggtctcaagtatagagcaaacctccgaagtttcgtgcagcccctcagcagtgcacggacaccattgtctaagggcaaatctgttatcctctcttctctatcgagtaggacaagacggaagtcgcaaagatttttgcagaaagtcccaatagactccagggccccatttgtgatatcagacacataggcagctatgtattccagttcacggcatcctacggctacagttgtcaacccgacttgagagactcctccttgttcttcttgcaaacctggatcatcatctcctcgctcaactctgagtctttgtagcttcttgcatgtgtctgcaacaacccctaatcctctatctccaatcacattcctcaccgcaagaactagtaagttgggacattttgcaatgagttggcagtgatcttcagtggtgagaaaagtgtactgcaagtccagcttcttgagtaatgcagagaaagggaagataatgggcatctcgtttgtccccatgtacgtaagtcctaaggagcacagtcttgaagggaatttaacatttccatacttagtgagctccccttgctcaatgaatgcccctcccgcaaactcttgcaatgatgcagccatccggaaaaatccaattaaatctgaaaagtcacagtcactgatcttcaatgaaattagtgacttgcacttctttgcgagaagctccaggtcagctggcaccactgtgagttcggtcatgtggaagttcaatgtctccagaacaggattgttgacagcaaggtcgtggagccattcagtaccattatcagcaattgagcattcctccagaaataatgttctcagtgatctgcaggagagggcgacgaggcggagagcgtcggtggagaagccggagcacttgtcgagcttgagctcctgcagcatgtggccgcgggcgcggacgagcgcggcgaggtcgtcgtcggtgacgaccatgcggcgcaggtggagcgccttgaggcactcgagcggcgcggcgagctcggcgacccaggggcgcgcgtaggcgccccagtcctccgggatgagcccgtacatggcggcgcgcggcttccccttgaccgcgagcgactccagccgcgggaaccgcgcgagcaggtgcgcgggcgacgcggcgtagcagaagggcacggtgacgtgcttccgcgtgagcgcgtcgatgcggtgccagcggcggcacacgagcgacaccgcctccctgtcccgcgggtcgtccacgtaccccagcaccaggtgcagcgcctcctccgggatgctgcccgcgccgccgaagctcatcgcgcggtccaaccgccgcgcctccgccccctcccctcccatccctcccccctcaccccaccaccaccaaccaggcgggagcgcggatcaagcacaccctcctcctcctcctcctcgtcctcgcgcgggatgtggccgggagtggtgcgcaagcatggggattattggatggagaccgcctctctgctgctggtggtggtggtggtggtgaagaggaggagaggggagagaattacctcgtc

SEQ ID NO: 3353 - DNA, 2350 bp, Oryza sativa
  Clone ID: PAT_MRT4530_65929C.1
cggaaatcaacacaagtccaacctcgtacattttcagctagccacaagcaacacaagtccaagacaagtcaagcgttcgcaccaagtcaaaccgcgcctcactgccaccttcgtttgcgcaccatggagcttgccctggttggcaacccttcgaatggcgtggcgaagccgtcgtgcaactccgtcggctcgctgcccgtcgtcagctccaacgccgtcatcaacccgccggtgaccagcgcggcgggcgccacgctcggcaggcacctcgcgaggcgcctcgtgcagatcggcgccaccgacgtgttcgccgtccccggggacttcaacctcaccctgctcgactacctcatcgccgagcccgggctcaagctcatcggctgctgcaatgagctcaacgccgggtacgcggccgacggctacgcccgcgcccgcggcgtcggcgcctgcgccgtcacgttcaccgtcggtggcctcagcgtgctcaacgctatcgccggcgcctacagcgagaacctccccgtgatctgcatcgtcggcgggcccaactccaacgactacggcaccaaccgcatcctgcaccacaccatcggcctcccggacttctcacaggagctccgctgcttccagaccatcacctgctaccaggccgtcattaacaacctcgacgacgcgcacgagcagatcgacaccgccatcgcgacggcgctaagggagagcaagcccgtctacatcagcgtgggctgcaacctggcaggcctctcccacccaacgttcagccgcgagccagtgccactattcatctcgccaaggctgagcaacaaggcgaacttggagtacgccgtcgaagccgcggcggacttcctgaacaaggcggtgaagccggtgatggtcggtgggccaaagatccgggtggccaaggcgaagaaggcgttcgccggcatcgcggagtcgagcgggtacccgttcgcggtgatgccgtccgcaaagggcctcgtgccggagcaccacccgcggttcatcggcacgtactggggcgccgtgagcaccaccttctgcgccgagatcgtcgagtccgccgacgcctacctcttcgccggcccaatcttcaacgactacagctccgtcggctactccctgctgctgaagcgggagaaggccgtcatcgtgcagcctgaccgcgtggtggtcggcaacggcccggcgttcggctgcatcctcatgacggagttcctcgacgcgctcgccaagcgcctcgaccgcaacacgacggcatacgacaactaccgccgcatcttcatccccgaccgcgagccgcccaatggccagcccgacgagccactcagggtcaacatcctcttcaagcacatcaaggagatgctgtctggcgacaccgccgtcatcgccgagaccggcgactcgtggttcaactgccagaagctcaggctccccgagggctgcgggtacgagttccagatgcagtacggctcaatcggttggtccgtcggcgccacgctcggatacgcccaggcggccaaggacaagcgcgtcatctcctgcatcggcgacggaagcttccagatgacggcgcaggacgtgtcgacgatgctgcggtgcgggcagaagagcatcatcttcctcatcaacaacggcgggtacaccatcgaggtggagatccacgacgggccgtacaacgtcatcaagaactgggactacaccggcctcatcgacgccatccacaactctgacggcaactgctggacaaagaaggtccggactgaggaggagctgatagaggcgatcgcgacggcgacgggcgccaagaaagactgcctctgcttcatcgagatcatcgtgcacaaagatgacacgagcaaagagcttctcgagtggggatccagggtctcggctgccaacagcaggccgcctaatccccagtgatcttgctgctcgtcttctcaggacgcacactcgaaattgctgggctgccaatgtctaagatgtgctgcttatcatcgtctgtgaattaattgtttaacgcttctgtttctgtatccattcaaaattttcttagagaagaggttgaattagtacatgtcgatgggtgttacctatcctatgataatgtatgtaattcaaatgcttggaattaatgttttgtaaacctacactatattgcgatgcaataacatggacgatttgaaggagaaaaaaaaaaaaaaaaaaaaaaaaaaaaaaaaaaaaaaaaaaaaaaaaaaaaaaaaaaaaaaattgcacgatcgtaatatcgtactacctctgtgctataatataagaaactagtccagattcatataaaaaaaaaaaaaaa

SEQ ID NO: 3354 - DNA, 1451 bp, Oryza sativa
  Clone ID: PAT_MRT4530_66026C.1
tgccgccgccgccgccgccagtgcatgcagggaagtatggccgccggtcgctgggtctcgccggtacacctacacatccatgatcttgggtctcgcaatgcacggccacggtgaggacgccctgtctctatttgccggcatgcaacgagccggcgtgacgccgaacgaggtgaccctcctcggcgtcctcacggcgtgctgtcatgccggacttgtcgaggaggggctccagcaactcgacgccatgccggaacctcgcatcgagcactacggctgcgtcgtcgacatgctcgaccgcgccgggagactagacgaggcagaggagctcgtcgcggcaatgccagcacaccccgacgcgctcatctggggctcgctgctcgccgcatgccgcgcacatgacgacgtcgagcgcgccgagcgggtgatgtggcggcgcaccaccgacgccgacgcggacgccggcgactacgtgctgatgtcgaacacatacgcgtcgaatggccgccacggcgaggtggtgaaggtgaggaggcagatgaggaggaacgagatcgacaaggtccccgactgcagcctcatcgagatcgacggcgtcgtgcacgaattcaaagcaatcccagcaaattccatccgataaaaccacaacaagattcatcaaagaacagattatccgattgatcactgtagataacaagattcatacaaccaacgacgcaagattttcactgggaaattttctagtactagttgtacatgagatttcagaaggcattatttggctttattggttattgctgctactgctgagttgatgctcatttgggcttgtgattggcagcggccatgtcgacggccggcctctcgacgtcctccatgtcctcctcgcggacgaacaccgcctggtcaagcaccgacggcgagccgccggccgccgccgccgccgctccgcagtggtcgtggttttcggtgccggagacggcggcctcgtcggcggggacaaagacgccggtctcgtggtcgggcacccacgcgtcctccaccgtctcctcctccgggtgcacctccacgttcttgcggttcagcgccgcctccacctgcgctccggcggcgccgccgccgtcgtggatggccttctgctcctcctccggctgggcctgtgcgctaatcgagtaattctgatgagcttgatctcctctcctgcaggaggcaagaagagggaagccagtctgtccggccatccggcgaccggcggcggcggcagcagcagacagtgctcgagcggccattgagcagaacaaccgaacaacagagctactgctactcctaccgagcttgcaatggtgtcgtcagccaatctctcagaacgaacgcacccttagtttactgctgccaatgcagatgatgcaggtgcaagaagtactagactgtgatgaaggggaagaaggatcaag

SEQ ID NO: 3355 - DNA, 361 bp, Oryza sativa
  Clone ID: PAT_MRT4530_66161C.1
gggacgacaactttaaatattggtcaataaaaccctttctggggccaacccacacgagaggcatatccagaggaaaacaattagcccaaacggaccacttggcccaaatgcaaagcattgggaagaactaatttgaccggtaccacccttgtaaaaacccaaaaagagagaggaaggggggcccggaagaaaaacatttttgttgaaccggagaagaatccattcattatggggaccgcagcatggggcatctaaatcgatgggctccaataacatgcggagccattgatcgatcgatcttcccattttactgggccttgaaggggttgtccttggagggtttttttaccttattaccacc

SEQ ID NO: 3356 - DNA, 694 bp, Oryza sativa
  Clone ID: PAT_MRT4530_66445C.1
gcttgatggtagccctagaattaaaatagagcaacattcactaacacagaacatgcatgctgatactcaactaggccattctagaattaaggaagctcttatgcgcaaaaggatcacaggcggaattcttgatagtaatagcttaaggacgcttaaagacaggagagatttgttttacccgttttctctcatcttgcacaacactaaaccagttggccatcaggatcttgttggcttagtaatctcaatattgcttctcgcagattttagcttagtgttactgacttttctccagctatattcatactctatggccgatgttctcttagttttatttgttcttccacttgggatactatcaccttttcctgctggaataaatgctctttttagtcatggaccacggcgatcagcaggccttgctcgtgtgtatgcattatggaacattacttcactggtcaatgttgttgtggcttttgcttgcggccttgtacactacaagtcatcaaccaaaagacatcctagtacgcagccatggaaccttggaacggatgaaagtggctggtggctcttccctactggactcatgttgctgaaatgcatccaagctaggcttgtcgattggcatgtggctaatttagagattcaagaccgcgcagtatatagcaatgacccaagcatattttggcagtca

SEQ ID NO: 3357 - DNA, 2348 bp, Oryza sativa
  Clone ID: PAT_MRT4530_67017C.1
gcccccgggccgctgcccccccgccccctcctccccctccgcatcccctcctcggccggtgccaggcaatggccagtggcaacagcagcagcagcagcggcagcatggctgccaccgccggaggtgtcggcggctggctgggattctcgctgtcgccgcacatggcgacgtactgcgccggcggcgtcgacgatgtcggccaccaccaccaccaccacgtgcaccagcatcagcagcagcatggaggtgggctgttctacaaccctgccgccgtcgcctcctccttctactacggcggcgggcatgacgccgtcgtcacctccgcggccggcggcggatcgtactatggcgccgggttctcctccatgccgctcaagtccgacggctcgctctgcatcatggaggcactccggggaggcgaccaagaacagcaaggggtggtggtgtcggcgtcgcccaagctggaggatttcctaggcgcgggccccgccatggcgctgagcctggacaactccgccttctactacggcggccacggtcaccaccagggacacgcccaggacggcggcgccgtcggtggcgacccgcaccacggcggcggcggcttcctgcagtgcgctgtcatccccggcgccggcgccggccacgacgcggcgctggtgcacgaccagtccgccgcggcagtggcggccggctgggcggcgatgcacggcggcggctacgacatcgccaacgccgccgccgacgacgtctgcgccgccggccccatcatccccaccggcggccacctgcaccctctcaccctgtccatgagctcggccgggtcccagtccagctgcgtcaccgtgcaggccgccgccgccggcgagccgtacatggccatggacgccgtgagcaagaagcgcggcggcgcggaccgcgccgggcagaagcagccggtgcaccgcaagtccattgacacgttcggccagaggacgtcgcagtacagaggcgtcaccaggcataggtggactgggagatatgaggcacacctctgggacaacagctgcaagaaggaaggccagaccagaaaaggacgccaaggtgggtatgacatggaggagaaggctgccagggcgtatgatcttgctgcgctcaagtactggggcccttccacgcacatcaacttcccgttggaggactaccaggaggagctggaggagatgaagaacatgagcaggcaggagtatgtggctcacctcagaaggaaaagcagtggcttctcgcgtggcgcttcgatctaccgtggagtcaccaggcatcatcagcacgggagatggcaggcgcgaatcggccgcgtctcgggcaacaaggacctttacttggggacattcagcacgcaggaggaggcggcggaggcgtacgacgtggcggcgatcaagttccgggggctcaacgccgtcaccaacttcgacatcacgaggtacgacgtggacaagatcctggagagcagcacgctcctcccgggggagctggcgcggcgcaagggtaaggtcggcgacggcggcggcgcggcggcggtcgccgacgccgcggccgccttggtgcaggccgggaacgtggcggagtggaagatggccaccgccgccgcgctgccagcggcggcgagaacggagcagcagcagcagcatgggcacggcggccaccaacaccatgacctcctgccgagcgacgccttctcggtgctgcaggacatcgtgtcgaccgtggacgcggcgggcgcgccgccgcgcgcgccgcacatgtcgatggcggcgacgagcctgggcaactcccgggagcagagccctgacaggggcgtcggcggcggcggcggcggcggcgtcctcgccacgctgttcgccaagcccgcggcggcgtcgaagctgtacagcccggtgccgctgaacacctgggcctcgccctcgccggcggaacaacgtgttggttttgcaaagccgaactcactgtggtggtgtttatcatctcaaagtaaattgaaagcacattctcgatcgaacggcggccgtaaaccctccagaggttcggagaaaaatcctccgaacccctgcatgaccttctcagcttctctcgatcggacgaatgaatttgaagatgcgactttgcatgtagatgtaatactattgaaagtgcatttggtgtacacgttaggtgtgtcatcggtcgccgcctcgccgcgcgtcacagaggacgtcgccctctcatgtgttttcctacactactctctgacttgggaactcattccctccgcacagccatcctttgtgagatacgtccagccatcttctgagtgcaaattgacggattag

SEQ ID NO: 3358 - DNA, 1387 bp, Oryza sativa
  unsure (1)..(1387): unsure at all n locations
  Clone ID: PAT_MRT4530_67035C.1
tgcgtggtcgcggccgtggttcttttctgcaactatatttgttttttaattgaaatatagtagatagtcaattgaaatatagtgttcttgtgtgctaaacaaaaatataattgaacatatctgtatcttccagataaccattcaggccatcgactaggggattttacaggcttactttgcgtcttagcctaaacaaaacacctgctattgctacaacacagcaccaaaatctaacctggggggcacaagttcaccattcctgaagagagaggggtgcatgacatgcccaaggattgaagatctgctacatgcagcgcatgtacatatattatacttgacgtatattcacagtggtggcattattctctgacatattcgtcgtcgtcctcatcctcgtcaacatcctcgccatcatactgtagaaggctgaaatccctggattgcgccttgagcctctcttggatccgctctttgatggcagttcccattgagtggcagccttcttcaaacttctccagaaaaccagcaacccatcgatctgcattttccacccactcttcctggagtttcgccattgtattccacttctcccctactttttcttggtgctgcttcactttgtcacgcaggttttttaatcccatgttaactctcagtcttttttccttaacgtaactgacaccaagatcctttctggtgtaccccctggccaggttccgcataacatactcattataatccttaacaatccgcattataatatctgacgtcgatatcccatctgtgcgctgggtttccttaaatttaccaagttttttgacaaattcatagacatcgttaccagctccactagcatcagcatacggcagagaatcatgtgcaacaaaatcaatgttatgtttattcaagaattcttccgttaccacccatggagcatcaggaatgacttcatccacccacttgcagtgacgaagtgattcatatcgctcatcctctgtcataacagttctccctttgtacttatgtgtcaactcatcattgcagcatccgacaaggagatatgtgttaggaaacagcctcttggcctgctcgagcgacttggcgtggccgaagtggaagagatcgtagattccgtccgcgtagacccggatcggcctcccctccgggattcccccattggcggcgccgcctccgccgcccctgtccgccacctcgacgtccccgtctcccccctcggcctccttccagtcctcctcctcctcctgcgacgactgcggcgccgcctccgccgcagcgtggtcggccatggcgagaaggttcgggagagagagagagagacagagaaagtccgaggcggggaggggagaaggcgaggnggaaaggctcc

SEQ ID NO: 3359 - DNA, 4102 bp, Oryza sativa
  Clone ID: PAT_MRT4530_67341C.1
ctggacagcgaagatattagtattacaccaattaacctttgtaacttgaacatcagaattttccagcaccaagggcttaatatgtacagtattgactacaagtgccgttttgcacaagtacatgtattcgaaccaaaaattgatacaataatcaaacacaatgaagtagctactgctatctagcaagagaactagattaacaacaggtgagactgacctcgcagaacatgtatgcacccatggaacgaaaatgctgacctgaattatcaacctgagcttccacaggaactaccaaggtgtgccgcaacatcgctaaccaacagcctgatgacatggctaccagagatctccatgcattcttccaagtccgcgttgcatgctaacttcacccactcatgatcatcgtcgagatacttgatatcaaacatgccaacatccatccttagccttttggctacttcatctttcaatgcagtaacgctaccggaacatgggaagcggaacctgacaatgtcttccttaaagctagcctttatggtcaccgtccctgaattttgcatcagcgccaaattgcttgaacgtgctaaaaatggttgatcaactgctgaagtgaagagattcttcaaatctttggaacttccagaatcctcaatgagcatcctggaaagcggtagtgctggttcttgaaagggctctttagtaaacgcctctggaattaattgtggttcagcgaacgtcgatgcaattggcttgcaaacaaatgtctggtttgcaggacttccatggcatgaggcctctgaggtacgtgagtttatactgccttctccagatgagcttctcgagtgagaagctttgtctgcttcaagttgcaagttattgtttgcatctataaacccttgctgtgacatcaatatagctaagttgtcattttctattggcttttgcaaggatgaatctctgtccccctcaacagccagatttgaaagttctgcaactttatttggacttgctttctctagattctgagaatctgatgaaggtccaacaggaatagggagaggacctgtgatagacgtgagattaaatgccgcatctgagccttgaacagactcaattacctgctttagttttgagagagaccggttgaccttgttaatttttcgagatggccaacgagaaatcccatgttgcctgcagatgcgtttcatggttgtgggacatacaccaaggctttttgctgcattttttaggcttcctgagaaatattgctgaagaacatctaagctgattgttttttcagcttttcctcgtctcctttcagggggtttattacttttgtgaagcgaatcagaagcaccactaccatttggcctgccaacagatgccccattgttttgagagttgtcatcagctagcaaatgtctctctgacatgattgaaactttgttgccatcattatcaacctcgtggactctttggcttccattactttcaggcgattcacgaaagcaaccttcagaattctcaaagtgcacatttgtcttcaaatcttcagtctcaattattagcacattacttatttgcagacaaacttcattggtgtctccgttgccaactacctttagggtacgaaggcacttcttcattcgagctaatatggactccaacaaggcattttgatcatcttcgttcctgcaatttggtggcaggaagaactctaatatataatcatcatctccagtatacatactttgcaaacatattgcaaagcagccagctagaccaaacattcgagcatagtgtacaaggggatactccaacttgcagaattgactgatatctttagaaaagcaaggtcgacgatagataaaagccttcccagaaactccttgtcccttctgtaggtgatgttctacacatgcatctctaaatccccacatatgagcatcgataacatgaaatgccacatcactggttgacatgcaaacctcccccatgcaacttccatcaaagctcaaacaactcttcttaacaccaccgccatgtgccagtacacttcgatacttgcaaggaacccaggtttgagccaaaggaagcttgtgctcttcacatacgaccgtcaagatctccagtatctccaccaaagcagattggcggccttcattgcatatctggacattcggatggtccaatatctcagtgcttttgagatttactgcctcaagagctttgcagactttatcaacctcaccagcatagttgatcttctttgatgtcattataagttcaacaaccgcaatacaattttgaacagaaggatcaaaaacaggcaaggctacagtaccatgaacattgtaactgattgcatggttaaggcgtgggtactcagtactgctataatactgcacattcggtgtccactcaggaaccttttgtttgtacacacgcccaggtagccccagctctccagcattttctccatccaccgagaacatgtacatcatggatacagccctgtactgaagaagcccaatactctgctggtcaagtacaaagggctgtcctgaagtagtaagcacataccggtctccactcttaaccggtgcccaaacttgaaccagcagatgctgatctgtggactccttgaagtatctaagagcctgtgtaagcctctccttaaacaagcatgagctgtccgtgttatcatcaatagataggtgaaactgccatttgctattaatctgatcaaccctcttactagtcgtgtcagaattcccggagcgggtccgatggacttcctcgaccacggcggcggcctcggcgggcggagcggtggcgggggcagcgggggcgcccatgtcgagcgggagcagctggcgctcgtcgaacagccacagcggcgagggcggcgtgagccacgacgacgacgaggccggcagcggctgcggtgaggccgacaccgacgagaacagcagcgacgtgaacctcacttcactcagaccgcgctgcggcggcggcggcggcggtggaggaggaggcgacgcggcggctgaggaggaggaggaggaggagaggcgggagcaggagtggggagcgggaggggagcttggccattatggtgggagaggaggaggagagaatggagtggagggggatcaaatgtggctggtggtggtgtggcgggtagtggaccggaataacaataagataatggcgacgattgcgtggacatgtgggggcagatccgatccgctcatgtcgctgccatgtggggcccaccaccctcacctggcacataataaatttataaataaacaagggtggcagccaactccccgggtggtgcactccagcgtggcaataatcgatcgcgctgcgctgcgcacccccgagaccgagaccaccaccaccaccaacaacgacgacaaccgccatcagtgggtgggcgtgcccgcgcgcggggagttgcaaactgcaagcaaacgcgggcgttttctcgcggcaaccgcgtccggaggccggcggccgcgtcgcccaccaggcgcgctcgggtggcacggggaccacctgggctggatggatggccgattggttggcggccaggacggccgggatccgagactgccaggtcggctggagatcgcatctgccgcaggagcggccggggggtcggggcctcggggtaccacgtcatacccctcgggcccttgcactgctttgccccgaggccctcgcccagccgctgtttggcgggaggagcaagcgaggagggggcccaggctgaacttcctttaatgcgcgcagcgccccaactgccccctgtcgcatttaatgcagtggggcggacgtgcggcgtgctgaactgacgcgcaatggtcaagaatgaccggtctgtgaccggcctgacgccggtcacgtctgacatacatccaatacccttactgtggccgcgctgcgtccatccaccgatgactgatccacggcgtctctggtttggccacatggcgacgatcccgcaaacagcgaggctgcgacgtggtgactcgaacagttctggggccttgttgtcgcctgcccgcgacttgacactttgcctcaccat

SEQ ID NO: 3360 - DNA, 1120 bp, Oryza sativa
  Clone ID: PAT_MRT4530_67576C.1
atttaggaaacatgtcttattcacaaatatcaccttcatcatattcctcatcttcttttgatgaaaatccagcaagtagtctgaaagaaaaagcaaagccacaaaagtacacaattacaatgtttttatttacttttattagaagttgacaccacttatatatatgtagtctgatctctgatgacgttgatacatagcagagctttcaccagtatgactataatgacggggacgtcttgtacatacaatcagatgacgaggctaccttcaccaccgtgcagcagcccatgtgacggcgagcccgggccgctcctgcccagcagctcctcgatcatctgcagcgcgatcctctcctcgtcgtccattgccggaggtggtggcgacggcgagcccgtggtggacgtggacgtcgttgtgactgtgctgtcactcggagtcggctggtcgctggacgacactgctgttgctgctgccaccgtcgcagccgacgacacggccgtgtccttgttgagctcgacggtcatgacccagctggagtcagcgcgtgcgccggcgcgcttctgccagacgccaatgtgggacttctccgggtcaaggcggaggcaggtgagcgacggcgacggcgtcttgcagcacttgcggagcttggcgctgaggatctgagacaggctgttcccgccgccgttggccgtcattgaggacgagctgccgctgccgccgccgacacggccatcccgccctgccaccgcagccgccggtgtgagctcccccgtggcgttcctcgcgactgggaagttggtcttggcgttgcggccgctcatcaggatggcggcctcgtcgtacgcccgcgccgcctcctccgccgtctcaaaggtacccagccacaccctcctcttaaggagagggtgcctgatctcggagacccaggagccccagtggcgctgcctgactccgcggaacttcttcttcgactgtcccatgatctcacctctgcagggatactgtccctgaagaattctccctgcggcccggcggtccacgcgggcagagtaggagaaggaatgagcagcagcagcagccagtcagtcagtcagacagtgagcatcctcccctcgtgccg

SEQ ID NO: 3361 - DNA, 690 bp, Oryza sativa
  Clone ID: PAT_MRT4530_67628C.1
atggggagagggagggtggagctgaagaggatcgagaacaagatcaacaggcaggtgacgttcgcgaagcggaggaatgggctgctcaagaaggcgtacgagctctccgtgctctgcgacgccgaggtcgccctcatcatcttctccaaccgcggcaagctctacgagttctgcagcggccaaagcatgaccagaactttggaaagataccaaaaattcagttatggtgggccagatactgcaatacagaacaaggaaaatgagttagtgcaaagcagccgcaatgagtacctcaaactgaaggcacgggtggaaaatttacagaggacccaaaggaatcttcttggtgaagatcttgggacacttggcataaaagagctagagcagcttgagaaacaacttgattcatccttgaggcacattagatccacaaggacacagcatatgcttgatcagctcactgatctccagaggagggaacaaatgttgtgtgaagcaaataagtgcctcagaagaaaagaaaagctggaggagagcaaccagttgcatggacaagtgtgggagcacggcgccaccctactcggctacgagcggcagtcgcctcatgccgtccagcaggtttactccagagcagatgaacaactcatgcgtgactgccttcatgccgacatggctaccctgaactcctga

SEQ ID NO: 3362 - DNA, 1497 bp, Oryza sativa
  Clone ID: PAT_MRT4530_67786C.1
cgtcccacgccgcctctatctatctccacgtgaaataaaaaaaaaacaaagctcccgaaaatattctctctcccccacccccgaaaccctagcgcgacctcgccgccggcaatggccgcatgaccgatgcgcctccgccgaggagccgcccgcacccacccagcagcagcgtcgccgtgcccgccgccgcggcggcagtgatcgcagccgccctcgcgtcctccttcctcgccctgctgcagccgccccggcgcgccccggtcgccgcgggatccagggtcggcatgtcgaaggcgagggtctacgccgacgtcaacgtgctgcgccccaaggagtactgggactacgaggcgctcaccgttcaatggggtgagcaggatgactatgaagttgtcaggaaagttggaagaggtaaatatagtgaagtctttgaaggcatcaatgttaacaacaatgagaaatgcatcatcaagatactcaagcctgtgaagaaaaagaagatcaaaagggagattaaaatacttcagaatctttgtggaggtccaaacattgtgaagcttcttgatattgtcagagatcaacattctaagactcctagcttgatctttgaatatgtcaacaatacagacttcaaagtgctgtaccccacgttgacagattatgatatccgctactacatatatgagctactcaaggcattagactactgccattcacaaggcattatgcatcgagatgtcaagccccacaatgttatgatagatcatgagctccgaaaacttcgattgatagactggggcctggctgagttctatcatccagggaaggaatataatgttcgtgttgcttcaaggtatttcaaggggcctgagcttcttgttgatttgcaagattatgattattctttggacatgtggagccttggttgcatgtttgctgggatgatattccgcaaggagccattcttctatggtcatgataaccatgatcaacttgtcaagatcgcaaaggtacttggaacagaagcactaaatgcttatttgaacaagtaccatattgagcttgatcctcagcttgaagctcttgttgggaggcatagtagaaaaccatggtcgaaattcattaatgctgataaccaacatctagtatctcctgaggctgtagattttcttgataagcttctacgttatgatcaccaagataggctcactgcacgtgaagctatggcacatccgtacttcctccaagtgagagctgcagaaaatagcagagcacgaccacaatgatcttgtgtacctgctaaaatgatgatccagctgatgatccacgacggtactactttgagtttgtgtgaacgatcgtggaatgtgcttgtagccttgcatttgtaaactgtaattcactccgttggttgcgtttgatgaatgccgtgacatgcacataattatttatttctgtaatgttttaccataacaaaaaaaaaaaaaaaaacccaaa

SEQ ID NO: 3363 - DNA, 1592 bp, Oryza sativa
  Clone ID: PAT_MRT4530_67800C.1
gacatagctaacttagctagctagatcatcttagcttggagaagacagaagagtgttatcttggaaggacaacatggcaactgcagggaaagtgatcaagtgcaaagcggcggtggcttgggaggccgggaagccgctgtcaatcgaggaggtggaggttgcgccgccgcaagccatggaggttcgcctcaagatcctctacacggcgctctgccacaccgacgtctacttctgggaagccaaggggcaaactccggtgttccctcggatcttcggccacgaagctggagggattgtggagagtgtgggcgagggggtgacggagctttcccccggcgaccacgtgctgccggtgttcaccggcgagtgcggcgactgccggcactgcctgtcggaggagagcaacctgtgcgacctcctccgcatcaacaccgaccgtggcgccatgatcggcgacggccagaccaggttcaccgccaggggagggcagccggtgtaccacttcctcggcacctccacgttcagcgagtacaccgtcgtccatgtcggctgcgtcgccaagatccacccagcggcgccgctcgacaaggtctgcgtcctcagctgtggcatctccaccggatttggcgcgactgtgaacgtcgccaagccaccgaaggggtgcacagtagccatattcggcctgggtgcagttggtcttgctgccatggaaggtgcaaggatctctggtgcttcacggattattggcgtcgatttgaacccggccaaattcgaactagctaagaagtttgggtgcacagactttgtgaacccaaaagattacgacaagcccgttcagcaggtgatcatcgagatgaccaacggcggcgtggaccgcagcgtggagtgcaccggcaacgccgccgccatgatctccgccttcgagtgcgtccacgacgggtggggagtggccgtgctggtgggcgtcgccggcaaggacgcggcgttcaagacgcacccgaccaacttcctcaacgagaggacgctcaggggcacgttcttcggcaactacaagcctcgcaccgacctgcccggcgtcgtcgagatgtacatgaacaaggagctggagctggagaagttcatcacgcacagcgtgcccttctccgagatcaacacggcgttcgacctgatgctcagtggggagagcctccgctgcatcatcaggatggaggactagccatccaagatcgatgtcgccgccggcgatcgacggcgtgcggcgtactgtataaacggagaaaataagaggctaaaactacctatgcctacagcaataagctagccacggttgcaggaatgcggtttcaggtttgttcatggagaacaggggtggacaccaattatagatactgtgaattttctgaaaatttacaagacaaatatgaaattgcgcaaattacgatagcggattagcctttggctcgatcgatttgagcctatatatgctggctccaccgctacactgtttgccgcctttctgtattgcgcatctgctctctctaatgtaatgtgcaatctatatataactacattatgaaaaaaaaaaaaaaaaa

SEQ ID NO: 3364 - DNA, 944 bp, Oryza sativa
  Clone ID: PAT_MRT4530_67886C.1
cggacgcgtgggctggatctcgcccacccaccactccaccccctctcctctccgtgcgccgccgcagaattcctcgccgccgccgccgccgccgccgccgtgaggtccatcgagatcgcgaccggagcaggtgcaggttgcgatggcccgcgtgtacgtcggaaacctggatccccgcgtgacggcgcgggagctcgaggacgagttccgcgtctttggagttcttcggagtgtatgggtcgcaagaaagccaccaggttttgcattcattgattttgatgacaggagggatgctcaggatgcaattcgtgatatagatggcaagaatggatggagagttgagctgtctcgtaatgcaagcagtggtcgtggtggccgtgatcgatatggtagctctgagagcaagtgttatgaatgtggtgagactgggcactttgctcgtgaatgccgtttgaggattggttccgggggtctaggcagtggaaggcgtcgtagcaggagccgcagccgcagccgaagtcccaggtaccgcaggagtccaagctatggcagaagaagttacagccctgcagggcgctctccaaggcgtcgtagtgtgtcaccggctcgtgcacgcagctatagcaggtcaccacaatacaaccgtggccgtgatgaatctcctgcctatgataacggatatcgccgcagcagaagttagagctgaacctgatgtctaaagactgctgttacaaatgttactttgtgggttgtcagctatgaacaatgccctactccaaatatcatcatcaactctggactttgattaaggttctcataacttatctaccttattatgctttgtgtttgaagttatattactcgagaaacttatgattggatgtgtattcaactaaataaaactgtctttctgtgtgtcaataaggcatcggcctgcactgctt

SEQ ID NO: 3365 - DNA, 1140 bp, Oryza sativa
  Clone ID: PAT_MRT4530_68165C.1
agatataatagatagatagatagatagatagattatcttagccagaaaagggacatggcttccaaatttcctggtacaaaccaaatctaatgcaaattgatcttatcaattgtgtcgatgaaattttacaattttgatttccccttccagacaacaatcgcagaaagtgaccttttacatgtaccgtgtttgacaaaaagaaggtaaaccggaaaatacaaagcctgtgaacgtatcacacacgacgaatatcaaatcaagcaaacgtacgatgcatgcaaactgacacggatacttcaattaattcggttcatccacttttaagcgtagtcctggtcggcaacgggctggtatgagccgatgaacacgtcgccgtacacgagcccggcgaggccgccgccgatcagcgggccgacccagtagacccagttgccagcgaagttgccggcggcgacggcggggccgaaggagcgcgctgggttcatggagccgccgctgaacgggccggcggcgaggatgttggcgccgacgatgaagccgatcgcgatgggcgcgatggtgccgagcgatcccttcttcgggtccgccgccgtggcgtacaccgtgtacaccagcgcgaacgtgatgacgatctccatcacgacgccctccagctcgctgatgccggcgacgccgtgcgtcgggatggccttgccgtgggtgacaaacttgaggaggaggcaggcgatggaggcgcctagcagctgggcgatccagtagaagagtccggtgaggatggtgatgtggccgccgacggcgaggccgaacgtcacggccgggttaaggtggccgccggagatgttggcggcgacggaaacgcccacgaacagggcgagtgcatgggcgatcgcgatcgccacaaggccggccgggtcgagggcgccaccattggtcaattgcccataggcaatggcggatccgacgccagcgaagacgaagaggagggtggcgatgaactccgccacgtaggccttcacggacgtggcgctgaaggagtcacccaagcttccgaatgcgagcttcaccatttttaatctatatttttttccttattactctgataagtgtggagaggtctctacgcttgaaagagagcttggc

SEQ ID NO: 3366 - DNA, 2237 bp, Oryza sativa
  Clone ID: PAT_MRT4530_6816C.1
gcccggggaacgccgccgcccatttccctttctcttcctcttcttcttccttctcctcctactcctctgcgatggacaaagataagtgaagtgagcaggcgccaatgggtgcttttcttctgttcgtgtgcgtgctcgcgcctttcttgcttgtctgcgccgtccgcggccgccgccggcaggcgggctcgtcggaagcggcggcgtgcggcctgccgctgccgccggggtcgatggggtggccgtacgtcggggagacgttccagctgtactcgtccaagaaccccaacgtgttcttcaacaagaagcggaacaagtacggtcccatcttcaagacgcacatcctgggatgcccctgcgtgatggtgtccagcccggaggcggcgcggttcgtgctggtgacgcaggcgcacctcttcaagcccaccttcccggcgagcaaggagcggatgctgggtccccaggccatcttcttccagcagggcgactaccacgcccacctccgccgcatcgtctcccgcgccttctcccccgagtccatccgcgcctccgtcccggccatcgaggccatcgcgctccgctccctccactcctgggacggccagttcgtcaacaccttccaagagatgaagacttacgcgctgaatgtggcattgctgtccatcttcggggaggaggagatgcgctacatcgaggagctgaagcagtgctacctgacgctggagaaggggtacaactcgatgccggtgaacctgccgggcaccctgttccacaaggccatgaaggcccggaagaggctgggcgccattgtggcccacatcatctctgcccggcgcgagcggcagcgggggaacgacctgctagggtcgttcgtggacggccgcgaggccctcaccgacgcccagatcgccgacaacgtcatcggcgtcatcttcgccgcccgcgacaccaccgccagcgtcctcacctggatggtcaagttcctcggcgaccaccccgccgtcctcaaggccgtcaccgaagagcagctgcagattgccaaggagaaagaggcgtcgggcgagccgctgtcatgggcggacacgcggcggatgaagatgacgagccgggtcatccaggagacgatgagggtggcgtccatcctctccttcaccttcagggaggccgtggaggacgtggaataccaagggtacctgatccccaagggctggaaagtgctacctctgttccgcaacatccaccacaaccccgaccacttcccctgcccggaaaagttcgacccgtcccggttcgaggtggcgcccaagcccaacacgttcatgccgttcgggaacgggacccactcgtgcccgggcaacgagctcgccaagctggagatgctcgtgctcttccaccacctcgcaaccaagtacaggtggtccacgtccaagtccgagagcggcgtccagttcggccccttcgcgctgccgctcaacggcctccccatgagcttcacccgcaagaacaccgagcaggagtgaaaaccgaacagggagacaaaaagaagaagaagaatactagcatcagctaagctggggaaagctggcaaaaccaacatcaacggcgggcagcggcgccacgcagcgcgcgcgagtccattttcgcggcggtcaccgtccggggggacacctgttggcgccgcagtgggagcgggagacccgaacggtggattccgtattagcacggatcatcagagtccttgtacagattcttcagctaggaccacggttggcaatcgagaggaggagcagaggagttgatgaaaaaaaccaaacactacgtagacatctgagctagggagcgccacaaagaagtggcccttaattgtaaaaccaaccattttttatccttttttgcttagttttttttttggccaacaactataggagaagagtagagaagagaagagaaattggggagaaaatacagggaggatgaagaggccctgattgggatgtaagctaggttgcccgcctgaaagcaggctggcatgcagatgcagctataggtcgaataatcgaggcgagcgatgatggacggatggatcgattcatcgatcgccagagtcaaaagggaagaacgtcgtgatcccccgcgggctaagccaggccacgggagagcgactcctctgtaccgtttcgtccaactcaagagaaaatgaccttcttgagaaaaaaaaaaaaaaaaaaaaaaaaaaa

SEQ ID NO: 3367 - DNA, 825 bp, Oryza sativa
  unsure (1)..(825): unsure at all n locations
  Clone ID: PAT_MRT4530_68543C.1
ggcgattgggttcctcgaggccggccgggaaaaatatactccctccgtccctactcttctcttctctggtggtgtgggtgtgtccctgtctcccctctccttcctcctctcctttcccctcctctcttcccccctctcacaagagagagagagcgccagactctccccaggtgaggtgagaccagtctttttgcccgattcgacgcgcctttcacgccgcctcgcgcggatctgaccgcttccctcgcccttgtcgcaggattcagccatgaagggggccaaatccaagggcgccgccaagcccgacgccaagttggctgtgaagagtaagggcgcggagaagcccgccgccaagggcaggaaggggaaggccggcaaggaccccaacaagcccaagagggctccctccgctttcttcgtttttatggaggagttccgtaaggagttcaaggagaagaaccccaagaataaatctgtcgctgctgtaggaaaagcagccggtgataggtggaaatccctgaccgaagcggacaaggctccctatgtagccaaggccaacaagctcaaggccgagtacaacaaggccattgctgcctacaacaagggcgagagcactgccaagaaggcacccgccaaggaggaagaggaggacgacgagggagaatctgancagtccaagtcccgaggtcatgatgaggatgacgacgagggcagcgaagaggatgaagacgatgacgagtgagcctttcagtggnacagatgggagcagcaagacgctaaggggcggcgggcgtccctagggagctatccatcatcatcatcatc

SEQ ID NO: 3368 - DNA, 2041 bp, Oryza sativa
  Clone ID: PAT_MRT4530_68545C.1
cacatgtccaactacggccgggaaaaaaaaaaaaaaaaaaaaaaaaaaaaaaaaaaaaaaaaaaaaaaggcccgggctgcaggaattcggcacgaggaatcctcccgcccggcctcttctcttctctggtggtgtgggtgtgtccctgtctcccctccttcctcctctcctttcccctcctctcttcccccctctcacaagagagagagagcgccagactctccccaggtgaggattcagccatgaagggggccaaatccaagggcgccgccaagcccgacgccaagttggctgtgaagagtaagggcgcggagaagcccgccgccaagggcaggaaggggaaggccggcaaggaccccaacaagcccaagagggctccctccgctttcttcgtttttatggaggagttccgtaaggagttcaaggagaagaaccccaagaataaatctgtcgctgctgtaggaaaagcagccggtgataggtggaaatccctgaccgaagcggacaaggctccctatgtagccaaggccaacaagctcaaggccgagtacaacaaggccattgctgcctacaacaagggcgagagcactgccaagaaggcacccgccaaggaggaagaggaggacgacgaggaggaatctgacaagtccaagtccgaggtcaatgatgaggatgacgacgagggcagcgaagaggatgaagacgatgacgagtgagccttccagtggacaagatgggagcagcaagacgctaagggcggcgggcgtcctaaggagcctatccatcatcatcatcgtctactagaattattcagtttcacttcacatcgtgatgttttactttttctctcgtcctataacggatagcgctccttgttggcgccactggtgggtgttgtggtgcagccaatgtcttgtctccaccgtcaatgatccgcttgtacctagattactctttccattgtcatcggctaacattgtgataatatcagtttgcgtatgttagattaaattgtttctaaaaaaaaaaaaaaaaaaaaaaaaaaaaaaaaacaaaaaaaaaaaaaaaaagtcacaattcatcacactacaacaacgctaaaagcggatgcagcgtagcaaagatgagattcaggcaagggttgcacagctaaagaaggaactctccgaaactgattcgatatatgatacagagaaattggctgagaggattgcaaagctttctggtggtgtggctgtcatcaaggttggggctgcaactgagactgagcttgaggaccgccaactacgtatcgaggatgcgaagaatgcaactttcgcagctattgaggagggcattgttcctggaggtggtacagcgtatgtgcatctttcaactaccgtccctgcgatcaaagaaacaatcgaagaccatgatgagcgccttggtgcagacattattcaaaaggcgttggtagctcccgcttcactgattgcccacaatgctggagtggaaggggaagtggtagttgagaagatcaaggacggcgagtgggaagtcgggtacaatgcgatgaacgacaagtatgagaacttgattgaggcgggtgttattgacccagctaaggtgacgagatgcgcgctccagaatgccgcctcggtggctggaatggtccttaccacacaggccattgttgtcgagaagccgaagcccaaggctcctgttgctgagccggcagagggaacccttaccgtctaaacagtggtgaatttcttcagggtggctttgtttagatggttcataccaactgaaatggtagaatttttgtctgggagtttttggttcagatcaaccgaaaggtctagtgtaggattggtttccatttttgagattgaaggtgcaacctgcctgatctgaactcatatgtccatcaaagaaataatttgcatcattatcgtcatcttcggtttaaactttataaagtaaatcatatggtgtttcttcaaaaaaaaaaaaaaaaaaaaaaaaaaaaacggcctgcagcccggggatccactagttc

SEQ ID NO: 3369 - DNA, 581 bp, Oryza sativa
  Clone ID: PAT_MRT4530_68571C.1
ccggccgggatatacccctcgaacccgacgcgtctcgccgccgtcgccaccgaagtaatcccttaattgtgctaaatgtcctccggaggagaatgtgtatatggtcaagctggccgatcaggctgaaaggtatgtggacatgggtgaatacatggggaaggttgcaaagactgcatatgtggaagaggtcactgttgaggagtgcaatctcttgtctgttgcttagaagagtgagattggtgacctacgtgcctcctgtcgtaatggctcatccattgaactataaggaggaggctcgtgggaatgacgaacatggtactctgttcatggactaacgagaccagattgaatatgaactgagcaagatttgcgatggtgtcctgaagttgcttgtgtcactacttgtgccctcctctactgctgcacaatatacggtgctttacctcatgatgaaggttgattaccacaggtaccttgcgtgatttaagactggtgccgagagacatggagctgttgagatcactatgcgggcttacaaagatgctcaagatattgctctgttcggatcttgctctcaccca

SEQ ID NO: 3370 - DNA, 1590 bp, Oryza sativa
  Clone ID: PAT_MRT4530_68696C.1
gaaagactgacagagtttaattggagtttttgccgaagctgggagttcaatcacataagttagttccctttaaacctaatcttcaagtctagtgtagttagatggtttaagtctatagcaaaacattaggattaagtcattctatagcttctgttgtattagttagccacaaacttgtaaatgtcctattattttataatataaacccctttggagcccgcgcggtgccggacacgggcgtgcgccaccgtcgcgtacaaggcgatggagccaaacgcaggaggaggtgttgtttcttgcgatcttgggttgattgatatgggtgttctttgcttcggcgcttccaacatcctcctctgcgcggaggacagcagcagcgtgcttggcctgggcggctttggcggcggcggcggcgaggtggcggcggagctggggtgcggcggcggtggcggctttgatttctttggcttcggtggtggtgctgtgttccccatcgactccgatgagttcgtggcgttgttggtggagaaggagatggatcatcagcctcagcgggggtatctggagaagctggagctcggtggattggagtgttcttggaggaaagatgccattgattggatttgcaaggtccattcctactacaactttggaccactcagcctttacctcgcagtgaactacctggataggttcctctcctcgtttaatctccctcatgacgaatcttggatgcaacagttgctgtcagttagttgtctatctcttgctacgaagatggaggagaccgtggtccctcttcccatggaccttcaggtttttgatgcggaatatgtgtttgaagcaaggcatattaagaggatggagcttattgtgatgaaaaccctgaaatggaggctgcaagctgtgaccccattctctttcatcggctacttcctggacaagttcaatgaagggaagccgccgagctacacgctggcatcatggtgctctgatctcacagtgggcactctgaaagactctaggttcttgtcattcagaccttctgagattgcggccgcagtggtgttagctgtgcttgctgagaatcagtttcttgtcttcaacagtgcccttggagaatctgaaatccctgtaaataaggagatggttatgagatgctatgagctgatggtagagaaggcattggtgaagaagataaggaacagcaatgcaagctcttcagttccacacagcccgatcaccgtgttggacgcggcgtgcttcagttttaggatgtccgtgaagacaacccctgaaatgggtgaagaagaggctgcagctatgccaactgctattttactcatgcaatgcaaggagttgaagacttcagtcctcacacctgccatgctcgcctccgcctgcaccctgcacctgcacgggcgctgcaccaccaccgcctccccgtccatcgctgcgacgccgcgtgcagaggagcacgaggagtattcaactctctcgcaagccataaggctgtcgctgcaggcggcatcagaggaggaggcaggcaggatgcacagcacagcacagctcgccgcggggaagatgtga

SEQ ID NO: 3371 - DNA, 589 bp, Oryza sativa
  Clone ID: PAT_MRT4530_69125C.1
ggagttcaaggccatcctcttcgtgccccgccgcgcgcccttcgacctgttcgacacccgcaagaagatgaacaacatcaagctctacgtgcgccgcgtcttcatcatggacaactgcgaggagctcatcccggagtggctcggcttcgtcaagggcgtcgtcgactccgacgacctcccgctcaacatctcccgcgagatgctgcagcagaacaagatcctcaaggtcatccgcaagaacctcgtcaagaaatgcatcgagatgttcttcgagatcgccgacaacaaggaggattacgccaagttctacgaggccttctccaagaacctcaagctggggatccacgaggactcgcagaaccgcggcaagctcgccgacctgctccggtaccactccaccaagtccggcaacgagctcaccagcctcaaggactatgtgacccggatgaaggaagggcagaaggaggtctactacatcaccggcgagagccgcaaggccgtggagaactcgccgttcctggagaagctgaagaagaaggggtacgaggtgctgttcatggtggacgccatctacgagtacgccgtcggg

SEQ ID NO: 3372 - DNA, 3529 bp, Oryza sativa
  Clone ID: PAT_MRT4530_69157C.1
gtcctttaagccctccccctctctcctctcctcctctcactccccacaccaccaccacccatccgcgccctctcctcctcttccccggggatccagcacggctacgccgccgccgccgccgctgccgccgtgcaatgcccgtggcgcctgctctcccaagaaaagcttcccttcttggtacatggtcgtcgtctccccttccccgattgcctcgccgccgacattcccctcgcctcgccggaccgccgccccccctgctccgaggttagtttgctgcggattgggattcgtttgctgctgctgttgcaaaggtggaggagcaccagcagtcgcattttatcccgaaagattggggattgtatgcttccactgaaccccgatgcgccacgttagccgctgcaccatccctgattggaaaaataattttgtgtagacccctccaagtttcaagaaatggacattgtgcctgttgtagcattgtgctgctgcctggtcttgctgcccagttgggcctatggccttggatccatggcgtccatcgccgtgtcctacggcgaggacggccccgtgttctgcgggctcaactcggatggttctcacttggtcacctgcttcggcgcggatgcctccgttgtgtacggtgcccccagcaggatcccgttcgtaggggttactgcgggggatgggtttgcctgtggcctattgctcgacaccaatcagccttactgctgggggagcaactcctatgtcaagattggtgtgccgcagccgatggtcgagggagccatgtactcggagctcagtgcaggagacaaccacctttgtgccctacgaacatctgtcaaggggtttcacagcgtgaatggagatacatcggtgattgattgctggggatacaacatgaccgccacacataccgtcaccggagctgtatcggccatttcagctggttctgtgttcaattgtggcttatttgcacggaacaggacggttttctgctggggcgatgaatcggttagtggtgtcattgggctagctccgaggaatgtgcggttccagtctataggagcaggtggttaccatgtctgcggggtgctggagaatgcgcaggtattctgctggggtaggagcttggagatgcagcagatgtcaacacccagttctactgatgatggtgatgtgaacatagttccgatggatgcaatggtctccgtggtcggtgggcggttccatgcttgtggcatcaggagtcttgatcaccaagtggcttgctggggcttcacacttcagaacagtacacttgcaccaaaagggctcagagtttatgcaattgtggctggagattacttcacttgtggggtgccggccgagacatcgttgaagccaatgtgctgggggcatagtggcccattagcactaccaatggcggtatcccctgggatttgtgtatctgattcatgcagccatggctactatgaatacgcaaaccatggtgaagttggcagtggtagcaagacatgtaaacctgcaaattctagactctgcttgccctgcagtgttggttgcccagatgactcatatgagtcatcaccttgcaatgccacagctgaccgtgtttgccagtttgattgctcaaagtgtgcctcagatgagtgcgtgtcattttgtttgtcccagaaacggaccaagaaccgcaagttcatggcttttcagctgcgtatttttgtggcagagattgcatttgccgtcatattggtgttcagtgtgaccgctattgcttgcctgtatgtccggtacaaacttcgacattgccagtgttcaaagaatgagttgaggctggcaaagaatacaacatattctttccggaaggacaacatgaagattcagcctgatgtagaggacttgaagatcaggagagctcaggaattctcatacgaggagttagagcaagcaacagggggcttctcagaggattcacaagttggcaaaggcagcttttcatgtgtgttcaagggcattctgagggatggtacagttgttgccgtgaagcgtgcaattaaggcatcagatgtgaagaagagctcaaaagagttccataccgagcttgacctcctctccaggctcaaccatgcgcacttgctgaacctgcttggctattgtgaggatggcagcgagaggctcttggtttatgagttcatggctcatggatccctctatcagcatcttcatggcaaggatccgaacttgaagaagagactgaattgggccaggcgggtcactattgctgtccaagctgctcgggggatcgagtacttgcatggctatgcttgcccaccagtaattcaccgagacatcaagtcctcaaacatactgatagatgaggatcacaatgcgcgtgtcgctgactttggtctatctatattgggcccagcagatagtggtaccccactatcagagctgcctgcagggacacttggctaccttgatcctgagtactaccgtctgcattacttgacaacaaaatctgatgtgtatagcttcggagttgttcttctagagatcctaagtggcaggaaagctattgacatgcagtttgaggaaggaaacattgttgaatgggcagtaccattgatcaaagctggagacatttctgcccttcttgatcctgtcttatctcctccctctgatcttgaggctctcaagaagatcgctgctgtggcatgcaagtgtgtcagaatgcgagccaaagaccgcccttccatggataaggtaacaacagctctagagcgtgcccttgcactgctgatgggtagcccgtgcattgagcaacctattctgccaactgaggttgttcttgggagtagcaggatgcacaagaaggtatcgcagaggtcatctaaccattcgtgctccgagaatgatctcgttgacggggatgatcagcggattgagtacagagcaccatcttggataacatttccaagtgtgacttcatctcagaggaggaaatcctcggcatctgaagctgacatggatggacgaacaaccacagatggaaggaacgttgggagcagcataggtgatggattgcggtcgctggaggaagaaattagcccggcctcaccgcaggaaaacctgtacttgcagcacaacttctgatgaaatgtcaagaacagttgaaaattcaggcaactgtctgctgtttatggtcagcattgtgaattcagccaatgtgacctgccgttgctatattggaaattgcattgaaatgtttataaatccaatggtacctggccatctaaaagggagagagaactagctatagagagcactggaagaaattttagcagccggaggcatttctttgtagattattttaaatttttttggctctctttcctgatgttatttatatgtggatggtaacatttgatggatgctcatctgtagcttacagatctgtaccctaaacatcttttgcatgtctagtcttgctttttcctgcaaatttcaatgctgtatgccaatc

SEQ ID NO: 3373 - DNA, 2251 bp, Oryza sativa
  Clone ID: PAT_MRT4530_69460C.1
ttgtgctctggttttccgcagcgtcgggccgaccagtcgaattgtctcgcccagactggcacgacgctggtctgtgtgttttttttttttttttatgactatgcaagaatattattaactatggcagccatggatacatcatacattgaatcgcaaagaaaattattatcatacaacttctctacaaatctaatgtcaatgtttgatcctggtctataaatgaaggcaacacccgctgtcaatcaaactgagggtacatcaaagggtatcattctgtaaattggaccagggaatcggtatgtatatatatgctctctatcatttcttcttctcaacatactactgtcagtgccacgcagaagcagatatcagctttctgctcctccagccgagaagcatcgcgccgtccttctcatccaatgtgtatttatcggagtagcaggcgagaagcttccttatcaccgagttgacgtacgagctcaacgggtaaggcctgaagccggccatggtcagcctcgacttccacttgccaagcagctcatgcctctccaccctgtccttcccctcgcaggcgatgatgttgacgatgtccttggcgaggcagtgctgctccacgctgatcctctccttgttgtcccgcggcaggttggcgtcgatcgactcgaacatggcggagtagtactccatggtctccccaaacctcatcaagaaaggcgttgtgttggtgtgtgactcctgctctaccaaagtagtcaccttcggggacagccctttcaccatccggagcagaccatcgcgtgggttgttgacatccacgctctcgtccggggtgtggtgtagctggagtgtgaagtttacagacagtgcttcacctggcctgatctcaagcatctctttcgtgacttgtgtggcatagacagacagaggcgtaaactccagaggtattttgaattcttcagacatgcttttcaacattttccccacaatgtcaagaccttcaccacgagcatactctgacactgggtcatctatcccggtgatccgcacacgaggaggaccaccaggccttgcagctaatgcttgtatcagtgtgatccattgagtcccttgagcaatctgaaaatcaattatgtggatattgttctcagttctcaatgcttctgcaatcgccccattggctgccatatagccaaacttgaagtaagggcagatattgtatagaattctcatgtaggacaggagctccttgctctctggctcacggcacttcagagcacggtagatgtttgtgccagagtttccatgtctagcaaccaaaccctccagtaggtaagcacctagacgttggattggttccccgttgattgagaccactccacgagcctcctgaacaagcttatggaactcctctgtcctgtcctcactcagagcctcagcacacctggttaatagctgcttcacaattatctgagggtcttcccttaactccctttgccgtttctctggacgaaattcatagcttgctgtggggtatccaccagatgcaaactgtgaccgaccaactccaggtaacggctgccgtgattcatgactccatgttctcgaccgctgcctcacaagctgagcaggcttgatttcctcaaactcatgcttggtgctagttgttgcatcatctgtatcaggtgccatcagaacagtctcaatctcccgtaaggcgtgttgcatattatgtcttgatgtagcatacaacggatcagctcccacttgaatgttctcctggagaagaatacccgcctgtctatatgagctgtctgcttccaatggggagattggttgggctgaaatggtttctgtagagctctggttatctggagtgttggtaagagcagacaaattgtcacactcaaattgggaagagagaggggtgtatggggaatcgctgaactcgtacttcagtgggttagcttgccagggagagttttgcaagttgttctctgtaggaatttcgtacacaacgttagcgccagtcaatctgtactttaataactggtgcaagtccataataaatgaacggagattagtcgttcatgacctcctccgatctgcacagccccgacgccgcagcgatgccccgatccacttccactcctctctctctctctctctctctctctctctctctggttctcttttcgtgtgctgcgataattatgcccgagccgcctcgtgccgaattcctgcagcccggggg

SEQ ID NO: 3374 - DNA, 1985 bp, Oryza sativa
  Clone ID: PAT_MRT4530_6952C.1
cctcggcgctgccgtctcggtgtccggcggcccggcgactgccccgtcggtgccggccttgccttccggcgccgcggatggcgacgcgagggcggattgtagcggcggtggcgagcgttgtggtggcgtggctggcggtcgccgtcggcgtgaacggcggcgggtgcgaggcggagcgggaccgggtggaggcgctgccggggcagccaccggtggcgttcgcgcagtacgccgggtacgtggcggtgagcgaggcgagcgggcgggcgctcttctactggctcaccgaggccgccgccgccgccgccgccgccaccaagcccctcgtcctctggctcaacggcggtcctggatgctcatcgattgcgtatggagcatctgaagagattggcccatttaggattaagacaaacgggacagggctctatctgaacaagtactcatggaacagagaggcaaacctcctgttcctggaatcacctgccggagttggcttttcatactccaacaccacctctgatctcaagacatctggtgatgagaggacagctcaagatgcgttgcagttcttgatcagttggatgtcccgcttcccacagtatcggcaccgggatttctacattgctggagaaagctatgctggacattacgttccccagttggcaaggaagatcgttgagttcaacaaggcctcaccatatcctttcatcaacctcaaggggatccttgtgggcaatggggtgactgacaactactacgacaacatcggcacggtgacctactggtggacgcacgccatgatctcggacaccacctacaaggccatcatgtcgtcgtgcaacttcaccagcgccaacgtctccaggctctgcaaccgcgccatgagctacgccatgaaccacgagttcggcgacatcgaccagtacagcatctacacgccgtcctgcgccgccgccgccgccaacgccaccggccgccgccgcggcaaggccgccgtgctgaggttcaaggacaccttcctacggcgccggtcgttcggctacgacccctgcacggagacatacgccgagaagtactacaaccggccggatgttcagaaggccatgcatgccaacatcactgggattccttacagatggacagcctgcagtgatgtgctcatcaagacgtggcgagattcagagttctccatgctgccgacttacaagttgctgatgaaggccgggctgaggatatgggtgttcagtggcgacacggattcggtcgttccggttactgcaacgaggtttgcgcttagccatcttggactgaagacgaagatccgctggtacccttggtactcagctggacaggttggaggatggtctgaggtgtatgaagggctcacatttgcgtcagtgagaggtgctgggcatgaggtgccactgtttcagccaaggagagcattcaggatgtttcagtcgttcttggcaggggagccattgccaaaatcctgatggtttcctgccaacaactgatgtctagctacaaagtctagaaatctgtaaaagatgcttggtagaggtgcagtgtagttgataggtgaggagtgtgattgattggtgttgggaaaaggataataagagaataaggatggttgtgccatggaaaccatgggcatcgcaacaaggagctaataaacttgaagccttccgctctgtttaccactaaggttccatttggattggaggaatttcgctggaattttagaggaactgaactatttcctgtgaaaatcctataaaattcctgtgctctgaaggaaccctgagcaattatctcatcgaaaaagaatatatcatgtacgcaattcaacgcaaaagggagccatgaagtaatttgctgaatatagccatgtatagtgtcaccagtaacggaagtacctttatttatcatgaaaataagttccctgacatacagggataacatgcaaaaaaaaaaaaaaa

SEQ ID NO: 3375 - DNA, 6900 bp, Oryza sativa
  Clone ID: PAT_MRT4530_69536C.1
atggatgcctctgctgcatccatgctctggactctgatcatcatcctcgccgccgcagccgctgcctcctctgtccatccaccacagcagcagagctatggcgtcggctgcatcgcggcggagcgggcggcattgctctccttcaaagaaggtgtcatggccgacccgctgaggctcctcgactcatggcagggtgcaggagactgctgtcggtggaacggcgtcgggtgcagcaacaggaccggccatgtcgtcaagctcgacctccgcaacactctctactgggatgaccagcgccaagttagactggacaaccctcacgccatgcgtggacaggtaagcacctccctgcttgccctgaggcgtttgaagtatctttatctcagcgggaacaaccttggaggaccgggtatagccataccatcgttcttggggtctctcgagagcctggtctatctcaacctctcctgtatcgatttctttggagaggtgcctactcagcttggcaatctctcccggctgtcctacctcgacgttggcagcatgtattattctggacagattttctcatcggatctctcctggctgggacgcctctcttcactgaagtatcttgacatgagcggtgtcaatctcagcatggtttctgactgggctcatgtggtcaatatgcttcccaatttgagagttctcaatctcgaactgtgtcaactcacgagatcaaacccaccacttctgcattccaaccttacagttcttgagaagctcgttctttcttccaacaacttctatggaccacttgctactaactggttctggggtataaccacccttagaaccctcgaagtggagttctgttccctatatggccctcttcctgatagcttgggaaacatgactgcacttcaagttcttgacatgcaagataatgataatatcacaggaatgtttccaccaactctgaagaatctatgcaatttgcaagaagtcttcactgggactaacctgagcggggacataacagaacagatggagaggctgccaaagtgtgcatgggacaaattgcaggcattaaatctggatgcaaccaacatgacaggcaatcttccagtttggttggtaaacttgaccaacttgaaggaccttagtgtctcagggaaccagcttagtgggcctgtgcctttggggcttggagctcttactaagttgactatattgtatctaggccacaataacttgactggtatcatatcagaagactatcttgctaatctttgcaatatggttatattggacttgagctacacttctttagaggttgttgtgggttccacatggactcctccattcaagttaatcagagcacaactggcttcatgtcaactgggtccgggatttcctatcttgtttaaacaccaaaagggcattatctacattgatgtttcaaatgcaggcatagccgatgcaatcccaagttggttttgggatgaaatttcctatgcattttatgtggatatgtctcacaatcaaattgatggagaattaccagccaaacttgaagcgaggacaaggcaagaattgcacctcaattcaaaccagctaaagggctcaattccgcaattactcagaaatatcaccaagctagacatctctagaaactccttatctgcaccattgccttcagattttcaagctccggaattggcagcacttgtcctattctccaactacattccaggcagtgttccactgtccatatatttggaacaacaactccttcaaatccttcagtgcaaaaaagagaacttccctctctcttaccttggtctgccactgtcaacacacaaacttcgcattcaagatcttcgccctaccattgcgaaagtggacaaatacctggcaggttgggaggccagcctcttatcctatgcagaacggattgtcctgattaatgcagctcttaatagtatcccagtttatgccatgtctgccctcaagttgcctcttggaacgatcgaagaaattgacaaaaaaagaaaagcattcctttggactggagacgatagctgctcgggagctcgctgtctggttgcttgggatcgagtttgccaaccaaaggaatgcggaggattgggcataaaagatttgcaccttcagaacgaggcactcctgataaaacgtctcttccatcttcaccactcgaactcatcctgggcaaattggatttgggaggaattttcggacacctcgttacttcacctgggaacacactggagctccttgcagtccctcctgccgacgatgcgcaggctttccctagtctctatcggcgacgaagctcacacttccttttggtttgacaactggctccctgatggaccactatgtgactcctttgctgccctgctcacgcactctctcgacctagaaataacagttcagaccgtatttcaaacaggcctgcaacactgcttcgtccccaggttatcctcagtggctctagcgcagctagacgctcttcaggataaattgctttcggtccatcttcatgaatgcccagacttcagagccgcgaaatgttctcctcaattgccaatcttgtcagctaaacatatatatgaagccactcaggtctggctggatgcttgtccaaactggaagttcgtgtggcataacaaggcaccactcaaagctcaactcttcgcatggctcctggctaaggaaaggctaccgacaaagcataatctgagaatgagacacctcatggtcatcctatcagagagggcaacaatgattggtcctcggcgacgggcggcagcgaggcggggatgcagggcaccgccgcagagaagagaagacccggaggatgatgaggatgacgacgggcggcggtgccacgctgaggatattccaccacgccgccgctcgctgcgcgatgtcatcattggaaggggccggtcggttgagtcgcgggcggcggaaggggcgcgacaccggagccgcacgccgcatccttccagccgccagcgagcgcacggcaatgggcgccaaggccgctcacggaccaggcacagctcccaatgctcctgccgctgcagatcccgtcgcacgcgctccccaagctccttgactcctcgcggtcaggacggcacgggcgatgcaggcggcgcgacgaccaaggtggtcgctgtcagtggccaggctgatggcgaccagcagccagtcaacgctctcgtgagtctccccgaccctctgatccagatcctatgctcctcacctctcctccccttctcagacgaacagggggaccatgacccgatgctgccgctcctggcagagatcgctcccaagtcttcacgggaggcggagaacgagacgaagaggacgggtggggaagaaccgatactgggagaggataaggtggcgtcggcagctgagttgggccaggagaagatgggccatctcggcccagatgcgcagcaggcccccaagatggacctcctcgctcagtccactcaagatgacgaggcccaagcttccacaggagaccagcccaccctggtgcagcaggccgactgcgaggagcaacaccaggccacggtccagactcagcccatccacggaggagaaggtgaacgtgaaaaggtcgtcttatctcctctgttctcacagctgcagccgccgatcatcctgcaggcgccgctcgagctggcgccgcccggcgcggccaagacgaaggggtgcggacgcaaggtggtgcagatgccgtcacggcggagcggccgtaaggcgcgcttctcgtcggtgccggtgtccaagcgcgcagaagtgcgcctcatggaggagatggggctgctcaccccgggtgaaccggtcggggatgcggcggtggaggcttatgcaaagtccttcgacacaccacttccgttgcatgtcatcgccggtctgcgggtgctcacacgcctggatggagtgcacgacatgccggtgccaggagaggaaggaaccaccacaacggcggtgccgctgctcgctgtatggtcgatgcgactagcgctcccatgcagcaacggccttaagccagagctccttagtcggttgatgcgaatagcgctcccggtagacaccggccttcagctggttagtagcagagtagacaggctagaagatagtgaaattgcttctacatgttggaatgttcgcggactaaataacccagcacgaagagaggcagtcctcgaagcagccgagctggccagagcaggcatcctgtgcttgcaagaaacaaaattaagtagtatagaccaatggatcggcaaagagattgggggaaacaggttgtcgaacttcaatttccttcctgccaatggaactcgtggaggaattgccatcttctgggatgacacaattgttaacatggcgaatttctcccaaggaacacaccatctttcggtgatggcaacgaccataactgataacctcagcttcatcatcatagtagtttatggaccctcagaagactgtgacaaggaaaatttcctcgccgaattagtcacagccaagccaccaacagacacgccatggttggtcatgggggacttcaacatcatatacgaggctagggataagaataaccagaatttgaacaggcatctaatggggcgcttcaggctggatgtagccctggaaacaagaactctgacagcagaggaacaccaattcaggaaagacctcaagataagaattctagggctagcagcggtggaaaaggcgaggaagaagcaagcatctagggtaaaatggctaaaagaaggtgatgctaacacaaggttcttccacataaagatgaatgctcgaaggagaaaaaaattcattcattgcttgcagcaagatggaaataccctgcacacacacgaggacaaagcagctcaccttcatgcccacttcaactcaatcttagggacaagaagacagcgtggctgcacattaaattgggaagcattaggactgagtacaatacaagatgatagcatggatgagccgttcacagaggatgaaatctgggaagcaattaaaaactctccaaaggaaaaagtgccgggcccagatggtttcactggagctttctacaagagctgctggcacataataaaaaaggaaattgtggacgtttttgcaagctttcacaacctcacaggggggaactttggaagcatcaacagggccatgataacactgctgccgaagaaagactcgccacgctcggtgaatgactttagacccattagtctgatccactctgtggcgaagcttatatccaaaactttggcaatgagactggcagcactgcttggtgatttggtctcgcatgcccaaagtgctttcatcaagaagagatgcatacaagataactttctctatgtgcgcaacatggtccggtccttgcacatgcaacggaaaccatccctcttcttcaagttggacataacaaaggcatttgattcagtatcttgggaataccttgtcgaaatgctgcagtggagaggctttagtcagcgttggagaaattggattgtgcttctcctatcgactgcatcatctagaattttactcaatgggatagcgggagaaccaactacacacaggcgaggtctccggcagggtgatcccctctcgccctacctcttcatcctagcaattgacccgattcaacgactactcaacaaggccacgcaagaggggcttctatctccgttatcaaaccgagcagcgcagttcagaatatccttatatgctgatgatgcagcgatctttataaactcgatcaggaatgatgtcaacaacttgattagcatcctcaagttcttcggcgaggccacaggccttcaagtgaatctgcacaagagctcggtcgtgtccatcaaatgcgcagagcagaacctgtctgaggtgttggaaaatttcaatggacagcggggcaattttcccataacatatttgggattgccgctcaccccaggccgcatcaagagaatacacctgcaaccggtgatggacaagttgcaatcaaggttagcgggatggaaagggaagttaatccagcaatcagggcggaagacgctagtcatgtctgttctcagcttcataccaacctacttccttaccgccttaaagccgcctaaacagttcctcacagacatggacaagattaggaagaaattcctctgggccggcgatcaagagattagcggggggaagtgcaaagtgaattggaaaaaagtatgctccccaataaagatgggaggactaggcgtgttggaccttgataaattcgcgagagctttgagactccgttggctatggtttgagtgggagtgccctgacaaaccttgggttgggacaacacccccctgcgatgagttagatgagcaaatcttcgcggccgcaacaaaggtaacaattggtaatgggcggaaggcaaaattttggacatccaactggattggacaccagccgctgaaatacctagcgccagcgcttttcaaccactctaaaggaaagcaacgcttggttcaggatgcgttaaccaatgacaaatggattgaggatattaggcatgagctgtccatgccactgatccgagaattcttcgcagtgttccgccttatctgggataatgagacaaacctggaggaacgagttgaagacaccatcacctggagatggacaaataccggtaaatacacagcaaaatcggcttatttagcccaattcgctggtagaaaagactcaagggccgccaccttgatttggaagacatgggcgccatccaaatgcaaaaactttgcatggcttgtcctgcaaaacaggatatggacatccgaccgcttgcaagtctga

SEQ ID NO: 3376 - DNA, 2831 bp, Oryza sativa
  Clone ID: PAT_MRT4530_69540C.1
atggcaatgaccataactgataacctcagcttcatcatcacagtagttaatggaccctcagaagactgtgacaaggaaaatttcctcgctgaattagtcgcagccaagccaccaacagacacgccatggttggtcatgggggacttcaacatcatatacgaggctagggataagaataaccagaatttgaacaggcgtctaatggggcgcttcaggctggatgtagccctggaaacaagaactctgatagcagaggaacaccaattcaggaaagacctcaagataagaattctagggctagcagcggtggaaaaggcgaggaagaagcaagcatctagggtaaaatggctaaaagaaggtgatgctaacacaaggttcttccacataaagatgaatgctcgaaggagaaaaaatttcattcattgcttgcagcaagatggaaataccctgcacacacatgaggacaaagcagctcaccttcatgcccacttcaactcaatcttagggacaagacgacagcgtggctgcacattaaattgggaagcattaagactgagtacaatacaagatgatagcatggatgagccgttcacagaggatgaaatctgggaagcaattaaaaactctccaaaggaaaaagcgccgggcccagatgatttcactggagctttctacaagaactgctggcacataataaaaaaggaaattgtggacgtttttgcaagctttcacaacctcacaggggggaactttggaagcatcaacagggccatgataacactgctgccgaagaaagactcaccacgctcgatgaatgacttcagacccattagtctgatccactccgtggcgaagcttatatccaaaactttggcaatgagactggcagcacggcttggtgatttggtctcgcatgcccaaagtgctttcatcaagaagagatgcatacaagataacttcctctatgtgcgcaacatggcccggtccttgcacatgcaacggaaaccatccctcttcttcaagttggacataacaaaggcatttgattcggtatcttgggaataccttgtcgaaatgctgcagtgcagaggctttagtcagcactggagaaattggattgtgcttctcctatcgactgcatcatccagaattttactcaatgggatagcgggagaaccaactacacacaggcgaggcctccggcagggtgatcccctctcgccctacctcttcatcctagcaattgacccgattcaacgactactcaataaggccacgcaagaggggcttctatctccgttatcaaaccgagcagcgcggttcaaaatatccttatatgctgatgatgcagcgatctttataaactcgatcaggaatgatgtcaacaacttgattagcatcctcaagttcttcggcgaggccacaagccttcaagtgaatctgcacaagagctcggtcgtgcccatcaaatgcgcagagcagaacctatccgaggtgttggaaaatttcaatggacagcggggcaattttcccataacatatttgggattgccgctcaccccaggccacatcaagagaatacacttgcaaccggtgatggacaagttgcaatcaaggttagcgggatggaaagggaagttaatccagcaatcagggcggaagacactagtcacgtctgttctcagctccataccaacctacttccttaccgccttaaagccgcctaaacagtttctcacagacatgaacaagattaggaagaaattcctctgggccggcgatcaagagattagcggggggaagtgcaaagtgaattggaaaaaagtatgctccccaataaagatgggaggactaggcgtgttggaccttgataaattcgcgagagctttgagactccgttggctatggtttgagtgggagtgccctgacaaaccttgggttgggacaacacccccctgcgatgagttagatgagcaaatcttcgcggccgcaacaaaggtaacaatcggtaatgggcggaaggcaaaattttggacatccaactggattggccaccagccactgaaatacctagcgccagcgctgttcaaccactctaaaggaaagcaacgcttggttcaggatgcgttaaccaatgacaaatggattgaggatattaggcatgagctgtccatgccactgatccgagaattcttcgcagtgttccgccttatctgggataatgagacaaacctagaggaaggagttgaagacaccatcatctggagatggacaaatataccggtaaatacacagcaaaatcggcttatttagcccaattcgccggtagagaagactcaagggccgccaccttgatttggaagacatgggcgccatccaaatgcaaaaactttgcatggcttgtcctgcaaaacaggatatggacatccgaccgcttgcaactccgacaatggcccaataactacttttgccaactctactacaggaacttggagacggcgcaacatttattaaaggattgtccattcacgcgagaaatttgggacaaaataatggctaggatgaaccacaaccaacccttcccggtgcacaatccggacgagagtctagttgactggtgggaatcaagaacaaagcaacaaagcaaatgtcaaagtaaggggatgcagtcactgcacatgctcttgagttgggaaatctggtgcgagaggaacatgcgagttttcaaagataaagaacttcaaatccctcaactaacggcaagaataatggacgaaatacatacatggtcggcatgtggggcaaaatatcttgcgagaatagcgccttaa

SEQ ID NO: 3377 - DNA, 1490 bp, Oryza sativa
  Clone ID: PAT_MRT4530_69798C.1
cgggggatgaaagtgcagagatgaattattattgataaaaactgatcataaaacaagttagcagagaggaatgaattaattcacacaaatgatgtgacggttacatgttggtcaaggatttattctggataaaccatacagccttgaaaattaaattccctctatatatttgacaccgtagcaaaaattgtcaaatatgccgcataccactattgggcactcttcctgccgttttaagtgcttctcactggattgaaatatggatgagccatggcttcctttgctgtaggcctttcctggtgatcgtagcgaagcaacctgtctacaaaatcaatagcctcagggcttgctaggtgtctgttccccgagttaacaaacattgaccatggcttcctattatgtcttccaacaagtctttcaagctgcgggtcaagctcaagaccatacttttcaaggtaattgtagaaatcttctgttccaagaacctcggtaattttgactaattggtcgtagttatcctgaccattaaagaaagggtcgactcggaatatcattgcggcaaacatgcaaccaaggctccacaaatccaacgagtaatcataatctagcaaatccacaagaagttcagggcccttataagatcttgaagcaactctagcattatattccatcttgggatgatagaactctgctagaccccaatcaataagacaaagctggcgtttctcatgatcaatcatgatattgtgaggtttgacatctcgatgcatgatgcctcgtgaatgacaataatctagtgcattactaaagagactggtcggacagataacctttaataattcgtaaatgtagtatctgatatcgtaatccaatagtgttgggtagagtactttgaaatcagtattgttgacatattcaaagatcaaactaggtgtcttcgattcatcatccctgacaacatcaagtagctttacaatattcggtccgccatataagttttgaagtatctttatttccctctttatctttttcttcttgacgggcttgaggatcttaataacgcacctctcgtcacccccgggccggaatccctcgaacacctcgctgtacttccccctcccaagcttgcgcagcacctcgtacccatcctgctccccccattcgatgtcgagcgactcgtagtcccagtactccttgggccgctgggagttggcgtcggcgtagacgcgcgccacggaggcggcgcccccggggtgccgcgtggcgcggccgatgcgcggcggcatggggagcggcgcctcggctgcggctgccgcggcagcggcgtagacggtgggggcgagggggcggcggcggcggcggctgttgctgtggtggtggtgggggtgcgcgtagcgcggggccgcagcggaggagaggaggaggcggcggagcagctgcggcgcggtggcgagggggaggaggcggctgcgcgcggcgcaccaggccat

SEQ ID NO: 3378 - DNA, 3525 bp, Oryza sativa
  Clone ID: PAT_MRT4530_70006C.1
atggcagaaggcgtggtattcgctgctctatgcaaaattggatctgtcttggcatcatctgcaagcataacattaggtggacgtttagatgcaaacttgacaataataaatgagattgagagtcgaataaaacagatcgaagttgagctcaagttgatgcaagcattcctgcgccaagcgcaaaaacaagaaggctatagcgagcccactgaagtctacctgcaggaagtaagaaaagcagcttttgaaattgaggacatcatcgatgagtttctttacctgtctgttaagcacaagaacaggtttttcaatggggagttcatgagttacttccgtaaactcggtaaaacttcttggcacaaaattgctagagagctgaaggattcgcaatgtcaccttcagaatctccggaatttgtgggtgcagtatgagattcagcttccaaatggcaatagagtttcaaccgatgtggaggatcaccggcttccgcatcatctttcttacccagctgatgagatggtgggtgttgaacaagaaagaacaatgatgatgaactggttaaaaacatgttcgacatcggttatcactgtctggggtatgggaggatctgggaaaaccactcttgccaatagtatctatgaagatgagagaatcaagaatcagtttgattgccatatttggatcacagtgtctcagaagttcaacgcttctgacatcatgaggaagatggtacgtcacatgttgcaacggtgttcacccaacattgatagcatcgatggtagagacctggtagaaatcctgaagagaacattagaacatagaaagattttgcttgtactagatgatgtatggagcacagatgtttggatggacctggcaagtacagttgagagaagcaacaacaatggaaataaggtcgtaataacgactcggatcaaagatgtcgcttctttggcaagcgaagatcaggttcttcagctgcaaaagctgaatgatgcagattcttggtgtctcttttgcaggtgggcattcaagaaccgcattgatagatcttgtcctcaagaactagagtcattggggagagagatcatggtcaagtgtgatggtttgccattagcaattgtggttgtgggtaacatgctctcattcaagaaacaagatatggaagagtggagcaagtgcaatgatcagctaacctgggaattacgcgacagattgcgcgaccaggagttgagttcagtgatgaagattctgaaactgagttataagaacttaccgagccacctaaagaatgcatttgtgttctgcagcatctttccagaggattacatgataacaaagaaaaggctggtcagactatgggttgcagagggcctcattaagccggaaaagagaagaacagtagaagaagtcgccgaggagtacctgaatgagctgatagaccgatgcctgctacaggttgtggagaggaagcacttcagaaaggtgaaggaattccagatgcatgacattgtgagggagctggccatttccatatcagaggacgagaccttctgcatgacacatagtaaatcgcaccccggtgaacccgaatacaggtgccgtcgtttgtcgatacatgagcacaatgacaggatcaagtcggtttcagatccttctcgactccgctcgctctaccatttcgatgtaacctgttcttcttttccatctgtgggtacaccaagaagtgcaaggtatctgaatgttctggagctgcaggatgttcctatcacagttctgccagaagaattgtcaggcttatttaacttacggtacctcggtttgagaagaacaaagatcaagcagttgccacaatcagtcgacaagctgttcaatctccaaacacttgatgtttaccttacaaatgtagacaagttgccaactgggatcgccaagctgaagaggttaaggcaccttcttgcaggaaagttgagtgctccactgtattgcggcattgttgagaagtccagaggtgttcaagctccaaaggtggtgtgggagtctatggagctgcaaactcttaagggtgttcttgcaaacctaaatcttgtggaaaatttgggacacatgactcaactgaggacattggcgatcgaagatgtcggagaagaacactatcccaagctctttgcatccatcagcaaaatgcgctctctacgcacactgaaagttctttcagctgaaggtaatcaaggtctgaactttgaagcactgagcttaccaccacagaatttacgcaaactccatcttaccggaaggtttcaccatgctgtgatggaatccaatttctttcagacagttggagctaaactggagaagctgtatctcacaggaagtaagacgaacattgatccattgatctccatctcctgcctctccaacctgaaagtgctccagatcggagatgcatacgacggagcaagcttcgtcttccagagcggatggttccccaagctccacacactcatcatgtgcaacttgttgcacatcaattcgatgatcatggagcagcagacgttgcagaacctccagtggcttgcactggtcaacttccctgagctcaaggaggtgcctcatggcattgagcttctcttgtcactgcagaatttgatgctggtgaacatgcatgatgagttcatggagcgtatacagggccaagaagatccattgggcacaatgagcaggctaatggatagatgtttgaatgatgatgaaactgtgatcgatgctggcatgtgtaactacggcggtttgggtgtaccgaatctggagcttatgggtatagctcttcgttccaggtggacatggttgcaacggacctcctcaagcaaaccttggcaggggctagccattccggggtcgcaaaaggaaaggaacttcgttgcagcctctaccatctgtcaattaagagacggacaaactatcctcttctgggaagatagctggttgcaagagggttgcattcggtcctttgctccgaacatctatgataaaattccaccacgcgtgcgccggtgtcggacggtggctgaggcactaacaggtcgccaatggatcaaagacatccgaggagcacttgggatccaacctattctagaatatctaaagctttggtcgcttgtccaaatggtggatcttgatcctactactcctgattcaatcatctggaaatgggagagttcgggccaatacagctcaaaatccgcctataaggccttgttttctggtcgtgtcaccttcctttccaccccaatttggaagtcgctcgctccgcctcgatgctgcttcttcttgtggttggtcgcaatgaacagatgctggaccgctgaccgtctgcgcagtcgagggttgccacacccggatcgctgtgttctttgcgatcagtacgaggaaagcattgatcacatcttggtagcatgccttgtcaatgagccatccttccacaattggctttgtgagagccgaatgaagattggggagcggcat

SEQ ID NO: 3379 - DNA, 1592 bp, Oryza sativa
  Clone ID: PAT_MRT4530_70155C.1
atgccgcgcggccgctccaccaccaccaccacctcctcgtcggcgtccaaccccttccacgccttcgcctccaccctccccttcctcccctccccgtccccgtccccaacctccgcctcgccctcgccctcgcccccggctccccacctcgccgtccctctcatcctccccatcacctcctcctcctccgcctccgccgccgcggcttcccccgagtcgaaccgtggggcgcggatggccgcggcggcgtcaggcggcaaggcggggggtggaggtggtttggggaagggcgggggccccgcgttcgtggggcaggtgttcaccatgctcgacccctccgggaacggcctcatggccgtcaccacccgcttcgagctcccccaattcctcgccagcaggactcctatgtggttcaaaaggatcttatcgccattgaagaagagtgaaaatggtccagtatttaggttctttatggatttgaatgatgcagtatcttatgttaaacgcctaaatgtgccaagtggtatggtgggggcttgtcgccttgatgtggcatacgagcatttcaaggaaaaacctcaaatgttccagtttgttccaagtgaaaagcaggttaaggctgccaataagctcttaaagtctcttcctcaaaggagaagaaggaaaaaacttgatggtgtccccgtctttagtgctcaaaacttaaatattgccgtggcaacgaatgatggaattagatggtatacaccatatttttttgataaaaacttgttggacaatattcttgaagcttcaatggatcaacattttcactcaatggtccaaaatcgccacacacggcgtaggagagatattgttgatgatagtttgacatctgaaatgatggaagaaagtgcagacagtttccttgagcccccagaggtacaagagttgatgaatgagattggtccagttgggataccgctaaatgttgtaacaaaagcagcggagattcaatttcttgatgttgttgataaaatgcttctaggaaataagtggttgagaaaagctactggcatacagccacaattcccctatgtcgttgattcatttgaagaaaggactgctgctgcaattgacagggctgctactgccagtagtagttttactgcttcaaaggatgctgattgcttccaaattagtaaacaaccagaaactttggagtcagacgttgataacagcaaccgtggaaaacatgaaaactcaaataatggccaatctcacttcccatttagcaacctgcttcctaatatatggccaggtcatgatagaagtttcaaagcacaaggaagagacagagcattcagaagatgtgatgccagcatcaacaatgatttacaagccaacccacttctccccaaaatcacgatggttggtatctcaatgggcgaaggtggacagatgagcaaagccaacttgaagaaaacatggaagacttgactaaagagttagaacaagcaggcgagaagactatctttagcgacgagaaagacccactctttgttgccaacgttggcgattactcaaggataactaagattagctctacatga

SEQ ID NO: 3380 - DNA, 4613 bp, Oryza sativa
  Clone ID: PAT_MRT4530_70289C.1
atggtggtttcccccaccgtttgcaatgtgaagttggggcgtgtcctcatagacgggggtgcaacccccccctcccctccacagccgcgttcgcatccgccgccgcagccgcagccgccgccgccgacgccgacgaggagaggaggagagggaaggcgagagggaggtaggtaggtaggcagttagccatgtcgccggcggagccgacgagggaggagagcgtgtacaaggcgaagctggcggagcaggcggagcggtacgaggagatggtggagtacatggagcgcgtggcgcgcgcggcggggggcgcctccggcggggaggagctcacggtggaggagcggaacctgctgtccgtggcgtacaagaacgtcatcggcgcccgccgcgcgtcgtggcggatcatctcgtcgatcgagcagaaggaggagggccgcgggaacgacgcccacgccgccaccatccgctcctacaggggcaagatcgaggccgagctcgcccgcatctgcgacggcatcctggccctgctcgactcccacctcgtcccctccgccggcgccgccgagtccaaggtcttctacctcaagatgaagggcgactaccacaggtaccttgcggagtttaagtctggcgacgagaggaagcaggctgcggagagcaccatgaatgcatacaaggctgctcaggacattgctctcgcagatttggctccgacccaccccataaggcttgggcttgcactcaacttttcagtgttctactatgagatcttgaactcccctgaccgtgcctgcaacctcgcgaagcaggcgtttgatgaggccatatcagaactggacagccttggtgaagaatcctacaaggacagcactttgatcatgcagctcctgcgtgacaacttgactctgtggacttcagatgccaatgatgatggtggtgacgaaatcaaggaagccgcagctccaaaagagcctggggatcagtgagatgaattcggacgccagtctgatgcaccatctgttgttgttggggcaatggacattgatgtcttcggctttcagtagctatcttctagtacacgaactgtcgtcgcaccatcgcggaggagacgatgatgttcttaaattacttaagtagttctgggtcacgcttttgttcagttgataaatgatggctggatcctggttttcttgttccacgatgccagccacaggaaaaaccctactattctgcactgttagaatgctgttatattaaccatgtttgacaagacattttcagtatgtttgtatgaccgtcttggaagtgtttggttgaacctgtctcagggtctttggtccaagacattattcacctggcttgcttaactcgttttagagaacaaaaagcgcgacgaggacaaccctcactccgcgcatccccaccctgtgtcgactcgacccgggagagagcagggaggagaggcccccgagccgaacggcggcccgaggcccccgacggtcagagctggccctctgcccgcttgtccgacggtgccaggcgcccccgacccccaggatggccccggggccactgcgggaaggccgcgcctgtcgccctctgaccccgaggtcgtcggcacagaagtcgagtgcgcccctggtggcctctcggacgaagagcgccctggagatgcggcccctggcgaagaggatcggccccgccgaaaggtgcagcggcccgtctacttcgttagtgaggccctccgggacgccaagacccgataccctcaggcccagaagatgctttacgctattctgatggcttcgaggaagttgcgccattatttcctggcgcatcgggtctcggtggttacgtcttaccccctcggccaaatcttgcataaccgagagggtactggacaggtggtgaaatgggcaatcaaactctctgagttcgatttgcactttgaaccacgccacgcgatcaagagccaggccctcgccgactttgtggcagagtggaccccagctcccgagcccgtctccgtcctcgaggccagctcgggcccctcgcagctgcctcacaccgcctactgggtgatgcagttcgacggctccctatctcttcagggcgccggtgcgggggtcacgttgacctcgctgaacggagacgtcctcagatacctggttcgcctcgactttcgggcgaccaataatatggcggagtacgagggactccttgcgggactcagggtggcagctggactggggatccgccgcctgctggtgttaggcgactcccagctggtcgttaaccaggtctgtaaggagtaccgacccccaccgggcgcctttgaagaaaggcttgcccagccgtcggcgcgacccgaccccctaggggagacggacgcgcctgaacggcccccgaggcccgtcggagtccaggcctcgggacccgatgggagcgttcccagctcccttagattgattgcttggatcgctgagatccaggcgtacctcgcagataagactctacccgaggaccgcgaagggagtgaacgcgtccagcgcatctccaagcgctacgtgctggccttgcagaccatacctctttcgtggctgtttgctgtctgggggctcgatatcctgggtccgtttaggcgggccccgggcgggttcgagtatctgtatgtcgctgtcgacaagttcactaagtggcccgaggcttatccggtcatcaagatcgataagcactccgcgcttaaattcatcaggggcatcactgctcggtttggggtgcctaaccgtatcattacggataacggcacccagttcactagtgagctcttcggtgactactgcgaagacatgggcatcaagctctgcttcacctcccccgcccaccccagaagcaatggccaagtggagcgcgccaacgcggaaatcctcaagggcctcaaaaccaagaccttcaacatcctcaagaagcacggcgactcatggatcgaggagctgccagcggtgctctgggcgaaccgaaccacgccaagccgagcaaccggggaaacgcctttcttcctcgtctacggcgcggaggcggttctcccatctgagctcaccctgaggtcccctcgggccaccatgtattgcgaggctgatcaagatcagcttcgcagagacgacctcgactacttggaagagcgaaggcggcgcgcggccctccgagccgcgcgctaccagcagagcctgcggcgctaccatcagcgccacgtccgggcccgatcactctgcgtcgacgacctcgtcctacgccgcgtccaaacgcgtgctggactgagcaagctctcaccaatgtgggagggtccgtatcgagtgatcggtgtcccccggccgggctccgttcggctggccatgggcgacggcacagagctgcctaacccgtggaacatcgaacaccttcgtcgcttctacccctatggaaccatgaatagagtacccaccagttggggttttgtttattctagggtgaacaaggttaccactttggctccggcgtttatgttgtgggtcttgtgcgggtaccgtgtgcccacgggatccgtgtgggcccagggttccccaagaggggaaggctctcggtcgctttttggagcgcaaagggccggcacgcggttgcattggcggaacggcccggttgccgtggaccgccaacgggtccgggcgagtggacatgcggggcaccaaccggtccagcaacggcgcttcgtcgtcgtcgtcaaaagattccccacgttccccgtccccaccaaagccgcgttcgcatccgccaccacaaccgcaacccgccgccgccgacgccgacgaggagaggaggagagggaaggcgagagggaggcggagcggtacgaggagatggtggagtacatggagcgcgtggcgcgcgcggcggggggcgcctccggcggggaggagctcacggtggaggagcggaacctgctgtccgtggcgtacaagaacgtcatcggcgcccgccgcgcgtcgtggcggatcatctcgtcgatcgagcagaaggaggagggccgcgggaacgacgcccacgccgccaccatccgctcctacaggggcaagatcgaggccgagctcgcccgcatctgcgacggcatcctggccctgctcgactcccacctcgtcccctccgccggcgccgccgagtccaaggtcttctacctcaagatgaagggcgactaccacaggtaccttgcggagtttaagtctggcgacgagaggaagcaggctgcggagagcaccatgaatgcatacaaggctgctcaggacattgctctcgcagatttggctccgacccaccccataaggcttgggcttgcactcaacttttcagtgttctactatgagatcttgaactcccctgaccgtgcctgcaacctcgcgaagcaggcgtttgatgaggccatatcagaactggacagccttggtgaagaatcctacaaggacagcactttgatcatgcagctcctgcgtgacaacttgactctgtggacttcagatgccaatgatgatggtggtgacgaaatcaaggaagccgcagctccaaaagagcctggggatcagtga

SEQ ID NO: 3381 - DNA, 2246 bp, Oryza sativa
  Clone ID: PAT_MRT4530_70309C.1
gctcccagccctttacacccttccacccccgccccggtgcatcacccggcgctcctctcgaaccttccaaagtccaaaccctagtggtgacctcgcctcggcctcgaaaccctagccgcagatctcgcctctccttgccccgcgccatggacgacgacttcgagatgccgccgcccggcgccgacgacgacttgatgatgggggaggacgggatgggcgacttcggcggcgccgacgggccgccgctgaaggtcggagaggagaaggagatcgggaagcagggtctcaggaagaagctgctcaaggagggcgaggggtgggagacccccgaggtcggcgacgaggtcgaagtacactacactggcacactgcttgatggaaagaagtttgattcaagccgtgaccgtgggacacccttcaagtttaagttgggacaaggtcaagtgataaaaggttgggatctaggtatcaagaccatgaagaaaggcgaaaatgctgttttcaccattcctcctgatttggcctatggtgaatctggttcacctccaactattccagccagtgccacactgcagtttgatgttgagttgctttcttggacaagtgtcaaggacatttgccaagatggtggtatattcaagaagatactgaaggagggagaaaaatgggagaacccaaaagatcttgatgaaatggatcttgatattgttgtcgcgaaatatgaggctcggcttgaggatggcactgttatatcaaagtctgagggcgctgaatttactgttaaagatggtttcttctgccctgcgctggcgaaagctgtcaaaaccatgaaaaaagcagagaaagtgctccttacagttaagccacaatatggatttggtgagaatggtagaccagcagctggtgaggaaggtgctgtgccaccaaatgccactcttcttgttaatcttgagttggtttcatggaaaacagtcacagaaataggtgatgataagaaaatcttgaagaaagttctgacggagggtacagggtatgagcggcccaatgaaggtgcagttgttaaagtcaaaataactggaaaacttcaggatggtacaatatttacaaagaaggggcatgatgaaccagagccatttgaattcaagactgatgaagaggaggtcattgatggtattgaccgtgctgtgctaaacatgaagaatggcgaggttgctcttgtaacaattcctcctgaatacgcatttggttctactgagtcaaagcaggatctcgctgtagttccaccaaacagcactgtgatttatgaggttgagcttgtatcattcgtgaaggataaagaatcttgggacttgaacaataccgagaagattgagactgctggggcaaagaaagaagaggggaatgcattgttcaagctgggcaaatatgtcagggcttcaaagcgttatgagaaggctgcaaaattcattgagtatgacagctcatttagcgaagatgagaagaaacaatccaagcaactgaaggttacctgcaacttgaacaatgctgcctgcaagctgaagctgaaagattacaagcaagctgagaagctttgcaccaaggttctggaacttgacagccaaaatgtcaaggctttatacaggagggcccaagcttacatgcaacttgctgacctagagttagcagaggtggatattaagaaggcacttgaaattgatcctgataacagggatgtgaagttgacatacaagaacctcaaggaaaaggtcaaggagtacaacaagaaggatgccaaattctacagcaatatgttcgccaagatgaccaagcagccagccgaagacggcaaagctggatctggagctgaatcgaagcaaggatcggaacctgttactgctgcctaaggacaggacactcacgacatatcttagattttgtgtgctggctaatctttgttctagtggtgcactgatgagaaacgttacttcccaagttgtcgggcgatgatgattcttgttgagattttcaaattgcaatccatatttgaaccaatctcgtcaaaaaaaaaaaaaaaaaaaaaaaaaaaaaaacaaccatacgccatgtcgggtccagtttgccacgaaagatcaagagagcattagctgagatgtgaactagaagtgcagatgtttaatgcgagatatcaatgcagttgcgcaacattagatcaccaaaaaaaaaaaaaaaaaaaaaaaaaaaaaaaa

SEQ ID NO: 3382 - DNA, 481 bp, Oryza sativa
  Clone ID: PAT_MRT4530_70658C.1
tcgtaagaagaagagaaacaacaagaagtagtaatggcttcctctatgctctcctccgccgctgtggttacatccccggctcaggccaccatggtcgctccattcaccggcttgaagtcatccgctgcattcccggtcacccgcaagaccaacaaggacatcacttccatcgcaagcaacgggggaagagttagctgcatgaaggtgtggccaccaattggaaagaagaagtttgagactctatcttacctccctgaccttagtgacgtcgaattggctaaggaagttgactaccttctccgcaacaagtggattccttgtgttgaattcgagttagagcacggatttgtgtaccgtgagcacggaaacactcccggatactacgaaggacggtactggacaatgtggaagcttccattgttcggatgcaccgactccgctcaagtgttgaaggaagttgaagaatgcaagaaggagtacc

SEQ ID NO: 3383 - DNA, 2474 bp, Oryza sativa
  Clone ID: PAT_MRT4530_70933C.1
cccacgcgtccgcccacgcgttctccttcgatttctctcgcctccgcttctccactctccggtagatcccaccctccaccgccgccgccgccgccgtgctccggtgagccgccggtgagccggagactacagcgacgtcgcgcagagccgttgggcgggtaggcggttgggggctttgcccgagatggcgacgatggggagcctgatcgggctggtgaaccggatccagcgggcgtgcaccgtcctcggcgaccacgggggcggcggcgaggggggttccctctgggaggcgctgccctccgtcgccgtcgtcggaggccaggtacgcgtgctcgccaccaccctgcctacttagctctcagatgctaagccatggagggcaaatctggatagggtgctcgcgcccgttcggttgacgtttgtgatgcatccagagttcggggacgtcgtcggtgctggagagcatagtggggagggacttcctgccccgtggatcggggggcctcttgtcctgcagccccacaagacgtaggggggccaggagttagccgggttcctccacgccccgcggaagcgtttcactgactttgctgctgttaggaaagagattgctgatgaaaccgatcgcattactggaaaaacgaaagctatatcaaatattcccatccatttgagtatatattctccacatgttgtaaacctgacacttattgatcttcctggattgacgaaggttgctgtagaggggcaacaagaatctattgtccaagatattgaaaacatggttcggtcttatgttgataagccaaattctatcatactggccatatctccagctaatcaagatatagcaacatcagatgctatcaagcttgctagggatgttgatccttcaggtgacagaacctttggagtgttgacaaagcttgatttgatggataagggtaccaatgctgttgatgtacttgaagggaggcagtatcgtttgcaacacccctgggtgggaattgtcaaccggtcacaagctgatatcaacaggaatgtcgacatgctagcagcaagacgcaaagaaaaggagtactttgaaagtagcccagattatggtcacttggcacataaaatgggtgcagagtaccttgctaagcttctgtctcagcacttagaggctgtgatcagagcaaaaattccaagtattatagccatgattaacaaaacaattgatgaaattgaagctgagttggatcgccttggtaggccaattggaggtgatgctggggcacaactgtacacaatattggacatgtgtcgtgcgtttgaccgagtttttaaagagcacctagatggcggtcggccaggtggagatcgtatttatggtgtctttgaccaccaattaccagcagcactgaaaaagcttccatttgataagcatctttcattgcaaaatgttcggaaagtcatttcagaggctgatggttatcaaccccacttgattgcccctgagcaagggtacagaaggcttatagatagttcgctccactacttcaggggtccagcggaagcttcagttgatgcggttcatttggtcttgaaggaacttgttcgtagatcgattgcagcaacagaggagttgaagcgtttcccaacacttcagacagatatagctgctgcagcaaatgaaagcctggaaagatttcgtgaggatggtcgaaagacagttattcgtcttgttgagatggaggccagctacctaactgtagaatttttcagaaaactccctacagaaccagataagggggctaataataacactccagccaatgacagatatcaggacaaccatttaagaagaatcgggtcaaatgtatcatcttacattaacatggtttgtgagacattgaggaacaccattccaaaagctgtggtgcactgtcaagtgaaggaggcaaaaagaaacttgcttaaccgtttctatgctcatgtgggaagcaaggagaagaaacagctcagcgcgatgttggatgaggatcccgctttgatggagaagagggattccttagtcaagaggctagagctgtacaaatctgcccggaacgagatcgactcagtcgcgtggaaatgatcggttagcgaagtcacagctggaagagatagacatacatctgcgacacacagatcattgccgtagaatgctctaattccatttacgtctggattcacatggagatccgtacactattctttctttcttttttctttcatgcgagtgtcctttctaccttgtcagacaagtatatttccttggccatcttggcctttttgtatgatgttgatgatgatgagctggtcctccgggatcacactgatatgaatgcagatatatatattctttgttgaaaaaaaaaaaaaaaaaaaaaacacgaggctcctcctctctctctctctccctcgtgccgattcctgcagcccggggatcc

SEQ ID NO: 3384 - DNA, 1621 bp, Oryza sativa
  Clone ID: PAT_MRT4530_71768C.1
cgccacgcgtccggcggaggagaggagaggagatcagggggaggaagggtggccggcgcagcagatcggggcgggcggatttaggggaggagcgcgctagccgggagcggcggcgatggatgaggagtacgacgtgatcgtgctggggacggggctcaaggagtgcatcatcagcggcctcctctccgtcgatggcctcaaggtccttcacatggacaggaacgattactatggaggagaatctacatcccttaatctcactaagctctggaagagattcaaaggcaacgagaccgctcctgaacatctgggtgtcagcaaggagtacaatgttgacatggttcccaagttcatgatggccaacggtgcactggtccgtgtactcatccacacgagtgtgacaaagtatctgaatttcaaggctgtcgacggcagcttcgtgtacaacaatggcaagatccacaaagttcctgcaactgatgtcgaggccttgaaatctaatctaatgggcctttttgaaaagcgccgtgctaggaaattcttcatatacgtgcaggattacgaagaggatgatccaaagtcacacgaaggcctggatctgcacaaggtcacgacgagagaagtcatctccaagtatggcctcgaggatgacacagtggactttattgggcatgcattggcacttcatcgagatgataactatctcgatgaacctgcaattgacactgtgaaaaggatgaagctttacgcagaatcactcgctcgttttcaaggaggatcaccttatatctaccctctgtatgggctagcagagctccctcaggcctttgctcgtttgagtgctgtttatggtggcacatacatgctaaacaaagcagaatgcaaggttgagtttgatgaaaatgggaaagcatacggtgtcacttccgagggggagactgcaaaatgcaagaaggttgtctgtgacccttcatacttgcctgacaaggtgaagaaggttggaagggtggcgcgtgcaatatgcataatgaagcatccgattcctgacaccaaggattctcattccgtgcagatcatcctcccaaagaaacagctgaagcgcaaatcagacatgtacgtgttctgttgctcatatgctcacaacgttgcaccaaaaggcaagttcatcgcctttgtttctacggaagcagaggctgacaagcctgagatcgagctgaaacctgggatcgatctgctcggacctgtagaggaaacattttttgacatctatgaccgatacgaacctactaataccgctgacgaggacaactgcttcgtgacaaatagttacgatgcaactactcattttgagacaacggtgaaggatgtgcttgcattgtacagcaagatcactgggaaggaacttgatctttctgtggatctgaatgctgctagtgctgctgaatctgaagcggcctgagcgatagctacttcttccaattccttttattctttcatagatggatctgttcaattaaactacttcttgctattccagttccatttgaccttactgaaacaaagtacagtatcacggatttatatataattaaataatcttcatataaaaaaaaaaaaaaga

SEQ ID NO: 3385 - DNA, 1023 bp, Oryza sativa
  Clone ID: PAT_MRT4530_71830C.1
ccgggggccggattgggagccactgtgcaaacgtgtcgcccattctacaccgtctccatccatctcatctcgtcgtcttcccccccgcgagtccgcgaccccccgcgctataaaatccaaggccgcgatcgagatgcggaaatatcgagtcgccggattggtagccgccctgctcgtgctgcattcgctagccacgccgtccgctcaggccgaggcgcatcgcgcagggggagaaggggaggagaagatgtcgagcgacggagggccggtgcttggcggcgtcgagccggtggggaacgagaacgacctccacctcgtcgacctcgcccgcttcgccgtcaccgagcacaacaagaaggccaattctctgctggagttcgagaagcttgtgagtgtgaagcagcaagttgtcgctggcactttgtactatttcacaattgaggtgaaggaaggggatgccaagaagctctatgaagctaaggtctgggagaaaccatggatggacttcaaggagctccaggagttcaagcctgtcgatgccagtgcaaatgcctaaggcccatctcgtatcctatgtgtatcaagttatcaagaagatggggaataatatggtgtggatatagctattggacatgttaattatccacatgataatatggcttggatataaggatctcacacgataatatggcttggatatatagctattaaagattttacctatggcatatttcaatgtgtattagtactaagtaagaatgattgcaaggtgtattaactacaaatattgcaataaaagtccctgttactacaacttacaagtaaaaaaagttagtcctctgactggatagaactctgtaatcattgttcacgttgccttgttttgaactggatagttttgaaatttgataaaaaaacattatcataaaatcacctgacaccgtttaaaattggctattattattttacctaaacgtgctgcaacattcaatggagtattcagaagttgtactttaaaggata

SEQ ID NO: 3386 - DNA, 2729 bp, Oryza sativa
  Clone ID: PAT_MRT4530_71949C.1
atggcggccgatccctccgcggccgcggcggccgccccggacccggacggccccgacgccgtccgcctcacctggaacgcctggccgcgctccaaggtggaggcgagccgctgcgtcgtgccgctcgccgccgcgatctccccggtccgctcgcccgagtcgctcgcctcgccgccgctcccttacccgccgctccgctgcaagcccccctgctcggccctcctcaaccccttcgcccgcgtcgacttcgctgccaagatctggatctgcccgctctgcttctcccgcaaccacttcccgccccactacgccgccatctccgagtccaacgtccccgccgagctcttcccgcagtgctccaccgtcgagtacctcctcgccggcgccgccccggccgccggcgtgcccctccaccagggcggcccgcccgcgccgccgcccccggtattcctcttcgtgatcgacacctgcgtcatcgaggaggagctcgagtacgtcaagatgtccatgcggaaggccgtcgcgctcctgccggagcacgcgctcgtcggcctcgtcacgttcgggacgcaggtgcatctgcacgagctcgggttctccgatctcagcaagatctacgtcttccggggcaccaaggagatctccaaggagcagattttggatcagcttgggttggcgggtgcggggcgtccgggtttccccaagatgcctcagcagccaggggggcctcagatcaacgggatgcatcccccggcaacggccggggtgactaggttcttgctcccggtgtcagactgcgaatgcacgctcagcacgctgctggacgagttgcagcctgaccagtggccggtggagaccgggaaccgtgcgatccggtgcacgggtgttgcgttgagtgtggcggctggcttgctcggggcttgtatgcctgggactggcgcaaggatcattgcgcttcttggtggtccatgcaccgagggtcctggaatgattgtgtcgaaagatttgtcagagccagttagatcacataaggatcttgataaggatgcagctcctcacttccagaaagctgtcaaattttacgatggccttgccaaacaattggtcagtcaaggccatgtcttagatgtttttgcatctgctcttgatcaggttggccttgccgagatgaaggtcgctattgagagaacaggtggccttgttgtcttatctgaaagctttgggcattcagtatttaaggattcttttaaacgtatttttgagggaggggaacagtctctcgacctttcattcaatggcacgcttgaaataaactgttcgaaggacattaaggttcaaggtattattggaccatgcacatctttggaaaagaaaggagctctatgtgccgacacagttgttggtcaaggaaatacaacagcatggaaaatgtgtggtcttgacaggaatacttcattaacagtattttttgatgtctcaccgagtgagcggtcaagccaaccaggacatcagaatcccgatctgtatatacaatttgtaacaagttaccaacacccagaaggtcaaatgaggattagagttactaccatatgcagaaaatgggtggatggatctaccaacacagaggaattagtcgagggttttgaccaggaaactgcagctgttgtgttggcgagatacatctcgttgaaaatggaaatggaggaagagttcgatgcaacacggtggcttgatggatcggctctaatgcttttttcaagatgaggggattatcggaagcatgatgcatcttcatataacttgcattaagctatgttcttgtttgctcagcttaagttaaagctacgacgttcacaagtagttgaggttactccaggttttgacatactagtcacggctgatgttcgggttttcaataacagtccagatgagacagcttatttccggatgttactcaaccgtgagagtatcactaactcagttgccatgattcaaccatcattaatttcattctcttttgatttgcctccatctcctgtattcctcgatgtggcatcaatagcagcagatcgtatactgctacttgatgcatacttcagtgttgtcatcttccatggtatgacaattgctcagtggagaaacatgggttaccagaatcaacctgagcatcagcaatttgcacaattgttgcaagctcctcacgaggaggctcaaataataattaaaggacgatttcctgctccaagactagttgtctgtgaccaacatggctcacaggcaaggttcttgttggcaaagctgaacccatcggctacatataactcagcacatgatgttcctccaggttctgacatcatattcacggatgatgttagtttccaggtcttctgtgagcatcttcaaaggctggccgttcagtcctaaggacatgtatgcaaagttgtacaccgtatctgatagctatatttactgagtttggtaggtctgagttgtgggagatttctgctttccctttttttgacctcatgtgttcttattacatcgtgtcaggttttccgacatcagacaattttttcgggaaataatcttgaaagcatgtataagttgtccccataatattatttatccatcatatatacttctttatattaacctaactgaaatcttaaggtgtatagccaagtaggttttttgtggtcggatgttgtctcaaaaaaaaaaaaaaaaaa

SEQ ID NO: 3387 - DNA, 270 bp, Oryza sativa
  Clone ID: PAT_MRT4530_72502C.1
atgaagaagccgtacattgtacacaagatcattgcgtaccaggcgttattctatggccagcactcctttgcttgtgctgatcttctctggcacgtgaagggttatgctaaatgcaaattcttcctctggtttgcatttcagcagtgttgttggacggctgatctccttcggaagtgtggcatcgatagccactcggcctgccccttttgcgctcaggagcttgagacggcgaaccacatcctcctcgactgcgtgttcgctcgacaggtc

SEQ ID NO: 3388 - DNA, 1707 bp, Oryza sativa
  Clone ID: PAT_MRT4530_72558C.1
atgcaagatcaacgtgctggtcctgcaaagtctaaagaaaagaaaagagtaagccgccacaagcaggcaaaattaactactgtaattattaaagctgtgcccttaactacaaaagagttgagacaaaaaaaatcagagttgagagttgagagaagaagagttaagatgggtggagatgagcgggcagtggctgctccgttgctgcagcagcagcaagacggcggcggcggcgacggcgagaggaggaggaggcggtggtggtggggatggtgggacggggaggaggcggcggggcagctggcgttcgcggcgccgatggtggcgaccagcatggcctactacgccatcccgctggtctccgtcatgtacgccggccgcctcggagagctcgagctcgccggcgccaccctcggcaactcctggggcaccgtcaccggaatcgccctcatgccatggttaaatattaggggtgttctggctgcaaaagggctgcaaaaggataaattagatactggactaagcgggtctctagagacgctctgcgggcaaggttatggtgcaaaaatgtaccacatgatgggggtgtacctacaagcatccatcatcacatcggccttcttctcggtgctcgtctccctcctctggttttactcagagcctgtcctcatcttcctccgccaggaccctgaggtcacgagaacagcaacgctgttcctgcgttactccatcccggctcagtttgcctatggcttcatccagtgcaccctcaggttcctacagacacaatctgtggtgacaccgctggtggtgtttgcactcctgccactggtgcttcatttcgggatcacccatgcgttcgtgcactacctggggttcggctatgctggggctggtatgtcaacgtcagtgtcgctgtggctctccttcctcatgctcgctgcctatgtgtgcttgtcagaaaggttcaagcacacctgggagggcttctccaccgaggcatttcgccatgttctacctggcctaaagctggctatcccctctgcagtgatggtgtgctttgagtactgggcgttcgaggtgctggttttagttgctgggctgatgccgaattctcatatgagtacttctatcattgcaatgtgtgaaaacactgaagcgatatcatacatgatcacctatgggtttgctgctgctatcagcacaagggtgtcaaatgagcttggagctggtaacgttgcgaaggcgaagaaggcgcttgctgtgacgctggtgctctccctgctgctgggagtggcatttcttctgctcctaggccttggtcatgatctctgggcagggctgttcagcaaaagtgatgcagttataagcgaattcgcttcgatgactccgttgctcatcgggtcagtggtgctggactctacacagggagtcttgtcaggggtttcaagaggctgtggttggcagcacttggcagcatggaccaacctggtggcattctacattgttggcttaccactttctatcctctttggatttaagcttggccttcagaccaaggaccaaatgggaaagattagagctgacaatgaacggcaaagaagacggttttgtctgttgaggcttgaaagatctgaacttaccagtttagcagcagcatacgcctctctggttgaatcgaacattgaagtgaaaagttttagagcttag

SEQ ID NO: 3389 - DNA, 1878 bp, Oryza sativa
  Clone ID: PAT_MRT4530_7261C.1
ctaacaaattacgtaacggctgtcaagtttaatactagtagcagcagaggcagcgaaataagctgcggtagcaataacgaatttaactgtttcaatggttaacccatgaacagcaaacaccgaaggtgcaccggagttgcagagccccatcgccttggcgttgctgatggcgaacccgagagcttcttcagtggcttcgttgtcgaaggccttggcagtggctgcactcagcatcgggatcactcccctgacgatgaggctgtgccgcgcaggagcttcgtcgctgcaggtccagtcgaaggagtcggtctgtttcagctcaggaaccacgacggacagaatcggcatggatggcctgtacttggccaccagcctagcagttgttcctcccctagtcaggaccaagatgagcgccgccttggcagagttcgctgtacgcacagctgatgatgcaaggctctccaatgggctcatgggaattggagctgatgcggtaatggacttgaaaacagcggcatggtcgacgcatgactccgcttgcaggcagatcttggccatggtccgtacagccagttccgggtaagccccagcagctgtctcaccactgagcatgacacagtcagtgccatcaagaactgcattggcaacatcagtcgcttctgctctagtagggcggggagacttgatcatagattccaacatctgggttgcagtcacaactggcttgccctgaatattgcacttgaaaatcatcaccttctgtgcataaaagatcttctctatcggaatttccattcccaaatcaccccttgcaaccataaaagcatcagattgtgccaggatatcatcaaagttagccactccctcttgattctcaacctttgacatcagcattattgactttgcatgcttcccaagcaccttcctgacctctacaaggtctgagcctttacgaacaaaagacagagcaatcatgtcaatcttgtttgggacaccccatttaagaatatcctccttgtccttctcagtaagtgtcgggagatcaacaataactcctggaaggttaacattcttcctctcaccaagcatagcagtgttctcacaacggcagcgaaccaagccttgctctttatcacagtgaaggacagtaagagtgatggtgccatcagcacataatattacactgcctggcttcagatccaccgctagcttcttgtagctcattgatatcatgttgtcatcaccctttatgctataatcagttgaaactgtgatttcttgacccttcttcaactgtacgggttttccatctttcagaaatccagttcggatctctggcccctgtattttaagcaaatccaatataggtttaatgccattgagaaatcctgaacaaagtctttcagaaaattggtcatgtaccacacaaatcttatcatcgtctaagctgattttgagccaacaaaacatgactgatattgtcttttgaccagcagaatagtcagggggtgagaacccaagaatcagggacgagcaacggcctactgtgaaaacgaccgcacaaaagtcttgaagaaaataaaaggtggccaaaattaacaccccaagaacgaaatcacgcgccttggtgtcgagcatgacggcgcagaggatgccggtgctctccatggcggcgcggaggttgtcgagcgtctcctggtggtactcgtgggatccgtgggagaagttgaagcgcgcgacgcacatcccggcgcggagcagccgcccgatcatctccaccgacctcgacgccggccccagcgtgcacacgatcttcgtcttgggcctccgccgcatcacccccgcggctccctcctgctgctcctccatcaccgccat

SEQ ID NO: 3390 - DNA, 1197 bp, Oryza sativa
  Clone ID: PAT_MRT4530_72804C.1
gcgacggcgctgcgggagagcaagcctgtgtacctcagcatcagctgcaatctcccagggctgcctcaccgcacgtttagccgcgaccccgtccccttcttcctcgcccccaggttgagtaacaagatgggtctggaggctgcggtggaggccactgtcgagttcctgaacaaggcggtgaagccggtgctcgttggcggccccaagctgcgtgtggcaaaggcagggaaggccttcgtcgaccttgttgatgccagtggctacgcctacgcggtgatgccgtcggccaaggggctcgtgccagagacgcacccccacttcatcggcacctactggggtgccgtcagcacggccttctgtgccgagatcgtcgagtcggccgacgcctacctcttcgcagggccaatcttcaatgactacagctctgtcggctactccttcctcctcaagaaggacaaggccataattgtgcaaccggagcgtgtcatcgtcgggaatggcccggcgtttgggtgcgtcatgatgaaggagttcttatctgagctggctaagcgcgtcaacaagaacaccactgcttatgagaactacaagaggatcttcgtgcctgagggccagccgctggagagcgagccgaatgagccgctgcgcgttaatgtgctcttcaagcacgtccagaagatgctgaacagtgacagtgctgtgattgccgagactggtgactcctggttcaattgccagaagctgaagctccctgagggctgcgggtatgaattccaaatgcagtatggttccattggatggtcagtgggtgcattgctcggatatgctcagggcgctaaggacaagcgtgtgattgcctgtattggtgatgggagtttccaggtgacggcacaggatgtgtcaacaatgattcgctgtgcacagaacagcataatcttcctgatcaacaacggcgggtacaccattgaggtggagatccatgacggtccatacaacgtcatcaagaactggaactacactggccttgtggatgccatccacaatggagagggcaaatgctggacttctaaggtgaagtgcgaggaggagctgacggaggcgatcgggatggcgctgggggagaaagactgcctgtgcttcattgaggtgatcgcgcacaaggcgacaccagcaaagaactgctggaatggggatcga

SEQ ID NO: 3391 - DNA, 1841 bp, Oryza sativa
  Clone ID: PAT_MRT4530_72817C.1
ctcaccgacaccatccgtaggtcttccaggagctccttcctgccacgtcatcaatggcgatgatgggtggctgacagtcaaacgctccccacgcctcctccccttcccccctctctccctccatggcttccctcgcctcccctcctctcccctgccgcgccgccgccaccgccagccgcagcgggcgtcctgctccgcgcctcctcggccctccgccgccgcccgcttcccctctcctctcctccgcttcggcgcgcttcccgcgtgccccctgcaacgccgcacgctggagccggcgcgacgccgtgcgggtttgctctcaagctggtgcagctggaccagccccattatcgaagacattgtcagacctcaaggattcctgctggagatttttacggccacatacaattcgaggaactgccttgggatccatagcattagttgctagagctttgatagagaacccccaactgataaattggtggttggtattcaaagcgttctatgggctcgtggcgttaatctgtggcaatggttacatcgttgggatcaatcagatctatgacattagaatcgataaggtaaacaagccatatttaccaattgctgccggtgatctctcagttcagacagcatggttattggtggtattatttgcagctgcgggattttcaattgttgtgacaaactttatacttttcattacctctctatactgccttgctctatttcttggcaccatatactctgttcctccattcagacttaagagatatcgtgcgcctgcatgccttatcattgcaacggtccgtggttttcttctcaactttggtgtgtactatgctactagagcagcactgggtcttacattccaatggagctcgcctgttgctttcattacatgcttcgtgactttatttgctttggtcattgctataaccaaagatctcccagatgttgaaggggatcggaagtatcaaatatcaactttggcgacaaagctcggtgtcagaaacattgcatttcttggctctggtttattgatagcaaattatgttgctgctattgctgtagcttttctcatgcctcaggctttcaggcgcactgtaatggtgcctgtgcatgctgcccttgccgttggtataattttccagacatgggttctggagcaagcaaaatatactaaggatgctatttcacagtactaccggttcatttggaatctcttctatgctgaatacatcttcttcccgttgatatagagaccaagcaatctgatatggtctgcatgttgagtgcggcaaaaactagaagcccatatgaacagtgggagtaagggaacgaacatgccatccatgggaagactctgataactctctctcgcccgggctgtaaagggtaagcactgttgtgcatatatatgaaaggaaggtgataaagcagggatgctaaattgctactgggatcctcaaaggcttatagtggtcatcagtggaatgtgccttaataatttggttacctagcagagcaagtttttgcaggttattaggtaatatctttgagggaatgaacttagatttcattgttttaaggtctggtcacacaacgggtagtagtgctggagcggcaaaagacgaccttgttttacactaccaagggaggttaactctagttttcatgtgaccacttaccttgagagttgagaccatggaatcacttgtcgactcctcggcttgtatatttctagtgtcagcatttgcattctcctccacacttgtacttgaagagttgaagacaacttttttgtttgtgtatttctggagtgtcagcatttgcattcc

SEQ ID NO: 3392 - DNA, 348 bp, Oryza sativa
  Clone ID: PAT_MRT4530_73562C.1
atgcaggttggtggcaccgccgccgcggccgctgaggtgtccatgtcgtaccgggagacgaggagagaggaggaaaagaggaggggtaccaagatgaaggtcaagattcttcagtggcatggggtggcttcttggacatggaacgcccaggatgaaacatgcggcatatgcaggatggcatttgacggctgctgccctgattgtaagttccctggcgacgattgtccgctcatctggggttcctgcaaccacgccttccatcttcactgcatactcaagtgggtcaattctcagacatctacgccactttgcccaatgtgccgtagggagtggcaattcaagggctaa

SEQ ID NO: 3393 - DNA, 252 bp, Oryza sativa
  Clone ID: PAT_MRT4530_73807C.1
atggatcttgcgctggtgcggccacccccggccagcagccgcggcggcggcgacggaagcagggacgtcggaggcgatggcggggccggtgctgggaacggcgacggggcactgggggtgcgacgcgccgtgggcgagggccacgatgctgcggagacgggggcaggccggcggagaaggatgcgcgtgggcggcgttggctggagcgccgacgccgtcggcgggggcggtggcatgcttaccttactctga

SEQ ID NO: 3394 - DNA, 412 bp, Oryza sativa
  unsure (1)..(412): unsure at all n locations
  Clone ID: PAT_MRT4530_73817C.1
gccggggctctccgccgcctcctcctcctcctctccacctccgccgccaccaccgccgccgccatggccatcggatctctcatcgcgtcgaggctggccaggtccaccggccacgccctcgcctccgccgcctctcaggctccgatggcccgtcacgcggcggcgtctcctctgttgtccaggcttggatcagtggctcgtgcgttcagctcaaagcctgccgccgcggatgttattgggatcgatttgggaacgaccaactcgtgtgtctccgttatggaagggaaggcaccacgagtgattgagaatgcggaaggcgcaaggacgacaccctccattgttgccaagaaccagaatggtgatcttttggttggcataaccgcgagtcgtcaagncagtgaccaatggccag

SEQ ID NO: 3395 - DNA, 1861 bp, Oryza sativa
  Clone ID: PAT_MRT4530_74258C.1
acatgtcggccaccacgtccaattcccggcggctatgcaacggccggggacaggtcatacctgggcccaccttaccagaggctgtcaagatgggcccacacgccattcggattgtagtcggagggctcggagaaggcgagctctcgaccgccactactgtacacggcccagagcgagcctcctcctcctctgcaccaccggagatggcttccgccgcgctgccggaggccgtcgcgccgaagaagaagggcaacgtccggttcgccttcgcctgcgccatcctcgcctccatgacctccatcctcctcggctacgatatcggggtgatgagcggggcgtcgctgtacatcaagaaggacttcaacatcagtgacgggaaggtggaggttctcatgggcatactgaacctctactcgctcatcggctccttcgcggcggggcggacgtcggactggatcggccggcggtacaccatcgtgttcgccgccgtcatattcttcgcgggggcgttcctcatggggttcgccgtcaactacgccatgctcatgttcggccgcttcgtggccggcatcggcgtgggctacgcgctcatgatcgcgccggtgtacaccgccgaggtgtcgccggcgtcggcgcgtggcttcctgacgtcgttcccggaggtgttcatcaacttcggcatcctgctcgggtacgtctcgaactatgctttctcccgcttgccgctgaacctcgggtggcgcatcatgctcggcatcggcgcggcgccgtccgtgctgctcgcgctcatggtgctcggcatgccggagtcgccgcggtggctggtcatgaagggacgcctcgcggacgccaaggtggtgctggagaagacctccgacacggcggaggaggccgcggagcgcctggccgacatcaaggccgccgccgggcatccccgaggagctcgacggcgacgtggtgaccgtccccaagagagggagcggaaacgagaagcgggtgtggaaggagctcatcctgtccccgaccccggccatgcggcgcatcctgctgtcgggcatcggcatccacttcttccagcaggcgtcgggcatcgactccgtcgtgctctacagcccgcgcgtgttcaagagcgccggcatcaccgacgacaaacacctcctcggcaccacctgcgccgtcggtgtcaccaagacgctcttcatcctcgtggcgaccttcttcctcgaccgcgtcgggcggcggccgctgctgctgagcagcacgggcgggatgatcctctccctcatcggcctcggcgccgggctcaccgtcgtcggccagcaccccgacgccaagataccttgggccatcggcctaagcatcgcctccaccctcgcctacgtcgccttcttctccatcggccttggccccatcacgtgggtgtacagctcggagatcttcccgctccaggtgcgcgcgctgggctgctcgctcggcgtcgccgccaaccgcgtcaccagcggcgtcatctccatgaccttcctgtcgctgtccaaggccatcaccatcggcggcagcttcttcctctactccggcatcgccgcgctcgcctgggtgttcttctacacctacctcccggagacccgcggccggacgctggaggagatgagcaagctgttcggcgacacggccgccgcctcggaatcagacgagccagccaaggagaagaagaaggtggaaatggccgccactaactgatcaaactaaccgcaaaatcaccaaatcctaagggttttcttgcaaaaacgtgtgctgtactggctagctagcaagtagtagcagcaacgtgggaagattcgctgatccggcgttgctggagagc

SEQ ID NO: 3396 - DNA, 1344 bp, Oryza sativa
  Clone ID: PAT_MRT4530_7432C.1
cgcggtggcggcgtctaaactagtggatccccggcctgcgggtccccgggctgcagggcctcgcctcgcctcacctcacctcaccctccgcctcgtctccttcccccctttcctcaacccacgcacgccctctctcccatcccagccgtagccgcgccgtgacttgtctcgatcggcggcgaggaggagggcttccgttccctggccggtgggggaggatcaggcgggggggcggcggggagggggaggagatcggtctcggtcgatccgcgcgcggcggcgatggcgcgggagaggcgggagataaagaggatagagagcgcggcggcgcggcaggtcaccttctccaagcgccggcgcggcctgttcaagaaggccgaggagctctccgtgctctgcgacgccgacgtcgcgctcatcgtcttctcctccacggggaagctatcccacttcgcaagctccagtatgaatgaaatcatcgacaagtacaacacacattctaataatctggggaaagcagaacagccttcgctcgacttgaatttagaacatagcaagtatgcacatttgaatgagcaacttgcggaagctagtctccggcttagacaaatgagaggtgaggagcttgagggattgagcattgatgaactccagcagctagagaagaacctggaagctggtctgcacagggtgatgctgacaaaggatcaacaatttatggagcagatcagtgaactccagcggaagagttcacagctggcagaggagaacatgcaactcagaaaccaggtatcccagatatcaccagctgagaagcaagttgttgatactgaaaattttgttaccgaaggacagtcctctgaatctgtgatgactgcattgcattctggaagttcacagtcgcaggataatgatgatggctcggatgtatccctgaaattagggctgccttgtggtgcatggaagtaactgaaaggaaaaaaaaagcatccttgcagatctggttggagtcgttgcggcatccaggggagaaacgcttgtgttattcccaaacccagactgcaataatataatcttgcgttggaagcgagatcagttaacctgatttatcatccttgtggctgcatgatgcgatgttccgcttgtactgttcgctaggatcttgactaaactttgagatctatgtgccgtttaattatcccatcgctattggcactccttatgcgatacatcatatatgcactttgttgctatcttaattatgatgcgtcttttgcagcgttctaaaaaaaaaaaaaaaaaaaaaaaaaaaaaaaaaaaaaaaaaaaaaaaaaaaaaaaaaaa

SEQ ID NO: 3397 - DNA, 1940 bp, Oryza sativa
  unsure (1)..(1940): unsure at all n locations
  Clone ID: PAT_MRT4530_74368C.1
cggcacgaggggacctcccctgtgccaagcggccgcgcatcgcagccgagacgagccgccccccgcaccgcactctccgccgccggccgcgccgacctcctccgccgcgccgcctccccggcgcgcgcccccgtcaccctctctcgcctcgccgccgccgccgctgcctcctcgtgaggggggacggtggtgggggcctctgcctatggcgagcggcgacggcggcgacgacgcgggcgtgaagcgcgtggcggaccgctacctgaagcgcgaggtcctgggagagggaacctacggcgtcgtcttcaaggccgtcgacaccaagactgggaatacagtcgcaataaagaaaatccggctagggaagtacaaggaaggtgtcaatttcactgcattgagggaaattaaacttcttaaggagctgaaagattctaatattatagagctgattgatgctttcccttacaagggaaacttacatcttgtatttgagttcatggagactgatttggaagctgtcatacgagataggaacattgtattatctccagctgatacaaaatcttatattcagatgatgttaaaaggtttagccttctgccataagaaatgggtgctacacagggatatgaaaccaaataatttactcattggcgctgatgggcagcttaagcttgctgactttggtctggcgcgcatatttgggagtccagagcggaacttcactcatcaggtctttgcacgatggtaccgagcaccagaattattatttggcaccaagcagtatggatctgcagttgatatttgggctgctggttgtatttttgctgaactgctgcttaggcgaccgtttctccagggttctagtgacattgatcaacttgggaagatctttgctgcatttggaactccaaagtcttctcaatggccggacatggtttatcttccagattatgttgaataccaatttgtctctgcacctccacttcgctcattgtttccaatggccagtgatgatgcattggatcttctatcaagaatgtttacatatgatccaaaagcaagaattacagctcagcaggctctagaacaccggtactttttatcagtaccagcgccaacaaaaccatcacagcttccaaggccaccacctaagggtgattcagggaataacaagataccagacttgaacctgcaggacggccctgttgttctgtccccgccaagaaagttgcgcagggtgactgcccatgaagggatggaagtccatatgcatcgggcggatagaacagaagagcatccttcaggggcaaggcacatggatgacatgtccagccagagttctagaataccaatgtcagttgatgttggagctatttttgggacacgacctgctcctagaccaacgttaaacagtgccgacaagtctcgtttaaaacggaaacttgatatggatccagaatttggatacacagagtaaatcaccattttttccatactggcttgttgatttttaaaatattctttggggagatagttccactatctaccaacaaaagaggattgtgtcgaaagccataaaaacttcactgaagggcgctgacaggatggcacagccaactatgctgttatcgtttttgactaccaaagccggctcaggaagaggaaactgaagagttacgtgttacgatgctaatttacaccaggacgtgcacatgccatttcattttggctggcatacataaatctgtaatctttattgcatagatgagtttgcttgtgtgagcatgtttcttccagtgttcgcaaagattattatgaagtttatgtctcaagttctttctggtgtcaattttcgttcacttctngtatggacattgaattttgattgttgtttagtcggtcatcttattcttaggtacaaaaaaaaaaaaaaaaaa

SEQ ID NO: 3398 - DNA, 1520 bp, Oryza sativa
  Clone ID: PAT_MRT4530_74539C.1
atggcggtgggtgaggtcctaacagaaaggcgacgtgaaacactgacaactgatctggtgttgattccaatttgtagacaagaacccaaaatatcttccattgttccagaggaggctgctgctggtgagtacttagccattatctctgcatcctatgtgacaaacagaaactggacagttttaccagtccaaacaaagcaagtttcagacttacagcaacaagaagcaaagctttgcaagcagagttacatcagagttacttgcattacatattctgagaccgatctgagctgcgggccatcgtcgatgacggagctgaccgcggcggcggcgccggctgggtcaggatcgtcggcggcggtggcggcggggagcagcgagaagatggggagggggaagatcgagataaagcggatcgagaacacgacgaaccggcaggtgaccttctgcaagcgccgcaatggcctcctgaagaaggcgtacgagctgtccgtcctctgcgacgccgaggttgccctcatcgtcttctccagccgcggccgcctctacgagtacgccaacaacagtgtgaaatccaccgttgagaggtacaagaaggcaaacagtgacacctccaactctggcacagttgcagaagtcaatgcccagcactaccagcaggagtcctccaaactgcgccaacaaatcagtagcttacagaacgcaaacagtaggaccatagtgggggattctatcaacaccatgagcctcagggaccttaaacaggtagagaacaggctggagaaaggcatagctaagataagggctagaaagaatgagctgttatatgctgaagttgagtacatgcagaaaagggaagttgagctgcagaatgacaacatgtacctgaggagcaaggttgttgagaatgagaggggacagcagccactgaacatgatgggggcagcatcaacaagtgaatacgatcatatggttaataacccatatgattccaggaactttcttcaagtgaacatcatgcagcagcctcagcattacgcccatcagctgcagccaactacccttcaactcgggcagcagccggccttcaattagttttggtgtagacaccgtacgtacacacgtacgttagatgaaatctgaaggcgtcgatacccgcggctacgtaacagcgtgatcaacctgaagaaatcgatgcagtaattctatgtgttcgtcagatcatcataaccagtattgtcattaggcgttgtgaaaaaaaaatgtgtcagcatgcattgcaagctagcgtttgtggctgctcatcagctgcatgcgtaattgcgtacgtgcacaaattaaacagaccttgctaccattgtgccatattgtgtgtgttgtatgatatatatatatatatatatatatatatatatatatatatatatataaacagcacgtttgtgctctgattcgtgtaactgatcagcagatcaaactctaccactgccgatatatatgtgaggaccatggattgatgc

SEQ ID NO: 3399 - DNA, 2309 bp, Oryza sativa
  Clone ID: PAT_MRT4530_75365C.1
cgcaaggcgtaaagtttcaggggaataaccattttcctaagagaattcacgttttctgtgggcatgaagtcaacttacaatttataaatcttccattcacacttacagtatgtaaagagaattcccacccaaaatttctctcatgaacagaccaaaagatgagggcattatattcatgggcatgtgccaaataaatgtcaccttaagcattccatttcagttggaggtgtttcactaacagagaggacgatggtttccagagaagggtgcgcgacttgtgctataatgtattggcaaatgcatgcgctttttattctgtggacatgtcaactcaaactttcttgatcaagtacatgcagctgacagtaacaaaccacaggccttcgtgaagttggatgagaagcaaatctgcaagatgcctgatggtatgtctcgaatgagctagggcaagaatgcccacccaacttggacaatgatcactcgtactcaaattgtacatcaacatgcacatacttcctcatgaggcagactataaatgaagtaaagcttgctagcatctggcgctcttcgcgtgtttttgcctcagaaagaacaccatgaatgacaagtttcttgagatttgggcacctctcgatcattccaaaaacccagggtccaaaatgctcacttataactgtccaaccaagttccaagactgaaacattatccagtggtgacgatccttgcaggctataatgaagtagcccatctcgtaactcataactcaatgaaagatgccttagaagaggaaatgaaacagcaatggtttctgagtccacaatctcatcctcatcatcaaacacaacaccccaaaatcgtagcatccgcaagttagatgctctggatatcatactgtacagctttggccggactatagtaaagttactcacatccactacctccagatgatctgtgctctccccaatatccatatgagtaacactaacatcgtcaatcttgagatgctttagagtacccttcccaatgagctcaaacaaatcaaggttcaaagcatttaggtttagaacttccagattatctgtatcaagtatgatcttgtccacaccaacagattttgcaaataggctcttcaaggtatggctagtcagctccattgtagactgtggatctgaagtgacaacctcaaggaaatcaagtgccagtgactctatctttgggcaagcagccactaaaaggctcaaatccaaggctgaaatgctcacatgccttaaagaaagggatttcagacaggtgaatctctgataacttggttcaacaccagtgattgtgttatggtctaaatccaacacctccaatttctgcctcccacatttctccaggatgttcacgttagggtttgtccgaacattgtaagacaagctccggagtgtttccctggtatacatgagccatgcaatcacaggtgctgccgagaactcatgggtacgatctatgtgaatagagaggcactgcagccccattgtctgaaatatagtctgtgtgatgacaatctccagctggcgtgtagtcatgtcccgagggaagtcatcggaattgaacgataatgaatggaggtgcttcctgcatgccgtccgccacttccggcacaccccagaggcaaccatgacatcacgtgcagcgctaagatgtgcaagaatgttgccaatgacttcaacaggaaggtgctccatattggccgccgaaaaattacccaacctggtcaggtacaacctaattggaaacttttcctatccagaggagcagcggcagacttaacatagggcatggaaaattcagttgaaccacatagatttctggaaaaaaaaggtaactgcgcccgcacctagagtaccaaaattatttggttcaactcatgttgatcttgacctctgaagaagaataagtaccgatttttttaaaaataagaaatcaatccaaacccggatggatctacgctgcacgtgcgctagcccagcacgccgcggaggagtcgggagaggggggggggcgaagggggctgcgacgcctctcgacgagagaaaggcttccggcgcccccccagcgccggcggcgcgcgcgcgaggtcgccgatggcgatgaagcgcgacagatcgcgaggaagaagggcgacaaattcgagacccgagaagggacgaaattggggggagaaattaggggaagagacacattgtgaggacggcgagggaggaggaggaagaacagtggaaagacggggaaaatctcaggagacaagcagacgccaacgaacc

SEQ ID NO: 3400 - DNA, 2177 bp, Oryza sativa
  Clone ID: PAT_MRT4530_75414C.1
attacaagcatacattcctcacatcaccgaattccaccttctcatgcggcttctacccaattgggacaaacgccttcaccttctccatctggctcaccaacacggcgggcaaaacagtcgtctggtctgcgaatcgccggtcaccagtgaatgggcatggatcgaaggtgttgctgcatgatgatggctacctggtcctgatcgatgtcaatggttccacggtctggacgagcaccatgagtgcaggcgaggggtcgacggctgcgctgctggagagtggaaaccttgtggtcagagattcaagcggcacaatcttgtgggaaagcttcacttccccaacggataccttgctacctgcacagcaattgaccaaagacacgaggttagtatctggataccatagcctttacttcgacaacgacaatagccttcgtcttgtatacaacggacctgagttctcaagcatctactggccaaatgatgattacaccatgttccgggatggcatcaaagtcaagaacaactccaggcttgcagtcctcgatgacaaaggcggtttcttctcaagtgatgctcttacagtacaggcttctgattttggtctcgggatcaagagaagactgactcttgactatgatggcaacctccgtatatacagccttgacgcatcagatgggagttggacagtcacatggcaagccatagtggagatgcattatgtgcacggcatgtgtggaaagaatgggatttgtgagtacttaccagaacttcgttgttcgtgtcctcctggattcgagatggttgatccacagaattggagcaagggttgtagaccgacatttagctataattgtgggaaagagaggtacaagttcattgagattccccaaactgatttctatgactttgatcttggctttaaccagtccatctcatttgaagagtgccaaaatatctgcttgagcacgtgctcttgcattgctttctcttaccggctaactggaactggtgtttgttaccctaaaggcctcctgttcaatggttacaagtctcctgcattcccaggaactttatatcttaaagtgccctacagcacaaatttacaggcctcatcaacacaatcagctctcacatgctcccctggcacagagggaggttacatgatgataagaaatcaattcagggggtttacttaccaagagctgaaggaagcaacaggaaaattcagggaagagcttggaagaggtagttctggaatcgtatacagaggagtactcaaagataagagggtcattgcagtgaagaagctcatcgatgtcacacgaggcgaagttgaattccaggcagaaatgagtgttatcggtaagataaaccacatgaatttggtcaggatatggggcttctgctcagaaggaaaacataagctactggtttatgaatatgtggagaatgagtcactggacaggtatctgttcaataccatgggtactgaaagattgctcgtgtggaaagatcgtttcaatattgccttgggagcagcaagggcactggcttatctccaccatgactgtcttgagtgggttttccattgtgatgtgaagcctgagaacatactcttgacccgagatttcgaagccaagatagcagacttcggactatcaaaattgtataagagagagggctccagcttcaacttctcacaaatgcgaggaacaatgggctacatggctccggagtgggcaactaatttgccaatcaatgcaaaggtagatgtctacagctatggagtggtgcttctggaaattgtggctggacagagaatttcaagtcatacaaccagggaagggaaagttaccaagttaaagcaatttatcgagaatgtaaaggaagctcttgctactggggatactaagtgcatagtggatgccatccggttcgggatgaagcagccacgcgccgccgacatcgtccgccccgactccaccaacgatggctgcaactcctgctcgcgcatgccgaggcggcctctgtgctggcgctcctcctgcgcgcgttcggctgcccttggcgagcggcgcacaccttggcctcagcctctgcttcgcgggggccgcgccgtaggccgtggacgtgccgcggctggtgctccacttcgacagcgctgggtcatggagtag

SEQ ID NO: 3401 - DNA, 2319 bp, Oryza sativa
  Clone ID: PAT_MRT4530_75416C.1
ttactcttcacaatccaggagacttttgacaacttcatgcatggtcggcctcttgcttctttcttcttcaagacatgatacagcaactatcaacataaccattgcctgctcagaattaaattgcccatgtagcctaccatccactatgcacttagtatccccagtagcaagagcttcctttacattctcgataaattgctttaacttggtaactttcccttccctggttgtatgacttgaaattctctgtccagccacaatttccagaagcaccactccatagctgtagacatctacctttgcattgattggcaaattagttgcccactccggagccatgtagcccattgttcctcgcatttgtgagaagttgaagctggagccctctctcttatacaattttgatagtccgaagtctgctatcttggcttcgaaatctcgggtcaagagtatgttctcaggcttcacatcacaatggaaaacccactcaagacagtcatggtggagataagccagtgcccttgctgctcccaaggcaatattgaaacgatctttccacacgagcaatctttcagtacccatggtattgaacagatacctgtccagtgactcattctccacatattcataaaccagtagcttatgttttccttctgagcagaagccccatatcctgaccaaattcatgtggtttatcttaccgataacactcatttctgcctggaattcaacttcgcctcgtgtgacatcgatgagcttcttcactgcaatgaccctcttatctttgagtactcctctgtatacgattccagaactacctcttccaagctcttccctgaattttcctgttgcttccttcagctcttggtaagtaaaccccctgaattgatttcttatcatcatgtaacctccctctgctgaattctgaatgtcattccttatggaaagaaaccaccaagctgttagaatgaaaattagttccaaggctccgaatactccagggaatatatagaaatatagccatcttgggtgatctgaaggtgttgcaatctcctgactgccaggggagcatgtgagagctgattgtgttgatgaggcctgtaaatttgtgctgtagggcactttaagatataaagttcctgggaatgcaggagacttgtaaccattgaacaggaggcctttagggtaacaaacaccagttccagttagccggtaagagaaagcaatgcaagagcacgtgctcaagcagatattttggcactcttcaaatgagatggactggttaaagccaagatcaaagtcatagaaatcagtttggggaatctcaatgaacttgtacctctctttcccacaattatagctaaatgtcggtctacaacccttgctccaattctgtggatcaaccatctcgaatccaggaggacacgaacaacgaagttctggtaagtactcacaaatcccattctttccacacatgccgtgcacataatgcatctccactatggcttgccatgtgactgtccaactcccatctgatgcgtcaaggctgtatatacggaggttgccatcatagtcaagagtcagtcttctcttgatcccgagaccaaaatcagaagcctgtactgtaagagcatcacttgagaagaaaccgcctttgtcatcgaggactgcaagcctggagttgttcttgactttgatgccatcccggaacatggtgtaatcatcatttggccagtagatgcttgagaactcaggtccgttgtatacaagacgaaggctattgtcgttgtcgaagtaaaggctatggtatccagatactaacctcgtgtctttggtcaattgctgtgcaggtagcaaggtatccgttggggaagtgaagctttcccacaagattgtgccgcttgaatctctgaccacaaggtttccactctccagcagcgcagccgtcgacccctcgcctgcactcatggtgctcgtccagaccgtggaaccattgacatcgatcaggaccaggtagccatcatcatgcagcaacaccttcgatccatgcccattcactggtgaccggcgattcgcagaccagacgactgttttgcccgccgtgttggtgagccagatggagaaggtgaaggcgtttgtcccaattgggtagaagccgcatgagaaggtggaattcggtgatgtgaggaatgtatgcttgtaatcttccaccgagaaagatgagccggtgtgcaatgtcagccggggtgaagcagaagtgcagaacaccaaaagagagaggaagaatgaaaggatgatcagatagagaaactttgccat

SEQ ID NO: 3402 - DNA, 2411 bp, Oryza sativa
  Clone ID: PAT_MRT4530_75440C.1
cgggctgcaggaattctcctccagtcctcttctcttcttcctccctcccttcgcccactgaatcgccaaaaaaattcccctcctccactccatctctataaaaatcctcccccaaatctcgcctcgtttagccgcacaactcacacaactctctctctctctctctctctctctctctcgtcgtctgcaagcttccgcctcccggatcgcggcgaccaccggaggaggagggagcagccatggcggacatcgacatggcgaacatcgacatggggaagatcctggcggggctggagaacgacgacgcgcgggtgcccaagaccaagctggtctgcacgctcggcccggcctcccgctccgtccccatgctcgagaagctgctccgcgccgggatgaacgtcgcgcgcttcaacttctcccacggcacccacgagtaccaccaggagaccctcgacaacctccgccaggccatgcacaacaccggcgtcctctgcgccgtcatgctcgataccaagggtcctgagattcgtactggatttttgaaggatggcaagccaatcaagctaacaaagggtcaagaactcactgttaccaccgattatgagatcaagggtgatgagaacatgattaccatgagttacaagaaactgccagttgatgtgaagcctggaaatgtcattctctgcgccgatggtacaatctctttgactgttttgtcctgtgatccaaaggctggaactgtgaggtgtaggtgtgagaacacagcaatgcttggcgagagaaagaattgcaatctgccaggaattgttgtggaccttcctacactgactgagaaggataaagaagacattttgggatggggtgtgccaaatgacatagacatgattgctctgtcgtttgtccgtaaaggatcagatttggttaccgtcagacaacttcttggacagcatgcaaagcgcatcaagctgatgtcaaaggttgaaaaccaagagggtgttgtaaacttcgatgagatcttgagggaaacggatgcatttatggttgctagaggtgatcttggaatggagattccagttgagaagatattccttgcacagaagatgatgatttacaagtgcaaccttgctggaaagcctgttgtgactgctactcagatgcttgagtcgatgatcaaatcaccacgtccaactcgtgctgaggcaactgacgttgcaaatgcagttcttgatggaactgactgcgtcatgcttagtggagagagtgctgctggagcataccctgaagtagctgtgaagatcatggcacgtatatgtgttgaggcagagtcttcccttgacaacgaagctgtcttcaaggagatgatcaggtctgcgccccttccgatgagcccattggagtctctcgcatcctctgctgtacgcacagccaacaaggccaaggcagccctgattgttgtcttgactcgtggtggtaccacggcaaagctggttgccaagtatcgtcccagggttccaatcctctctgtggttgtccccgtgttgacaaccgattcattcgactggacaatcagctcggagggcccagcaaggcacagcctaatctacagaggtcttgttcctctcctggctgagggttctgccaaagccaccgattcggagtcgacagaggtcatccttgatgctgctctcaagtcagctgtacagaagcagttgtgcaagcctggtgatgctgttgttgctctgcaccgtattggcgtcgcatccgtgatcaagatctgcatcgtgaagtaatcgctacacggtgtcttcttagcgccattttgctgggttaagtggcaaaacaaaaactgctatgcttgtttttactcccatagtccatctttgggagacaatttaattaccgtatcagcccctgcagttcgcagggtgcctttcgttacatagatttgctggtaaaatgaggagagatagaactccattatgtagagctctatttatcgtcgatgccatgtagtatggcaggtggtttctattccatgcctgcacaattttctggtagctactgtgttgtttgattactgttttttcaggtgatgtcgatggagttgataataatattggcatcattgtcgttgtatacgagttaaaaaagaatgtcccaggattcatcaggaataaaatatacccatatggccatatggatttttgtcttgtttaagattccggtgaccggggtacgaaatcttggttggtaatcggcggcctgagccgtttaacggtatactaattgcatgaactatgtattctgcaacgttatttgtggtaatacattattatgttccatttgctgtatctataaaacaatggttgatcaaaaaaaaaaaaaaaaaaaaaaaaaaaaaaaaaaaaaaa

SEQ ID NO: 3403 - DNA, 3152 bp, Oryza sativa
  Clone ID: PAT_MRT4530_7604C.1
gctcgagcgggacagcgccgacgcgctccgccgcgtcccgctcgcctgccgcgacgcgctccgcctccgcgacgacgccgtctcgctccggtcccatctcgcctccgtcctccagtcgctctcccaggctgagggttcatctgcagagtcaataactgcactagcacgaattgatactgtgaaacaacgaatggaagcggcgtatgcaacattacaggatgcggctggactagctcagttgagccaaagtgttgaggatgtattttctagtggtgatcatggtggtggtggacgcgtcggagttcggggcggaggggttcgacccgaagcggtggatcaacgcggcgctggacgcgcgccacccgtcggagccgctcgaccgcttcctcgccgacgccgaggagcgcctccgctcggccgccgacgacgccgcggccgcgctcgagcgggacagcgccgacgcgctccgccgcgtcccgctcgcctgccgcgacgcgctccgcctccgcgacgacgccgtctcgctccggtcccatctcgcctccgtcctccagtcgctctcccaggtgcgcccccgctcgcctgctagttggatctggatctcacagttcactcgtgcacaattttatgtgcatgtaaactttgagtatgctgtagaggacattcaaatccagcagttcagtgatgcccataaaactatgcctatagtctattataatgggataccgtcacttatatcatttagttcatataggtattcagtcccatctacatttcataaattctgtattactgatgatgatgatttcttcaatcaggctgagggttcatctgcagagtcaataactgcactagcacgaattgatactgtgaaacaacgaatggaagcggcgtatgcaacattacaggatgcggctggactagctcagttgagccaaagtgttgaggatgtattttctagtggtgatcttccaaaagctgcagaaaccctggcaaccatgagacattgcttgtcggcagttggtgaggttgcggagttcgctaatgtgagaaagcagcttgaagtattggaagaacggctagatgacatggttcaacctcgtttggtggatgcactttctaaccgcaagcctacaaattttggttggaaggtcgatgctgtgcaagatcttcgtggaatactgatacgtattggcagattcaagtcactggaggtgcaatatactaagatccatgtcaagcctctaaagaaactttgggaagattttgatctaaaacagagagctaagcgggtagagatggagaagtatggtggagaaagcataaacagtctctcatttgctagctggcttccaaatttctatgatgagacactactttaccttgaacaagaatggaagtggtgcctgactgctttccctgaagaatacaaatcactagtcccaaaagtacttgttgaaaccatgagtgagttgaattcaagttttgtctctcgtgtcaacctagcaactggagatgctgttcctgaaactagatctgttgcaaaaggtatactagatgttttatcaggtgacttgccaaaaagtaccaaattgcagaataagcatcttggagcactgatcgacctgcacaacatgacgggcacttttgctcggaacatccaacatttattttcagagtcagatcttttagttctgctgaatacattgaaagctatttattccccatatgagacttttaaagcaaggtatgggcaaatggagcgtgctttactttctgctgagatggctggtatagatatccgtggggccattgctcgtggtgtgggtgcacagggtatagagctgagtgaaactgttcgtagaatggaggaatccatcccacaaattatagtgcttcttgaagcagctgtcgagagatgcattagtcttactggtggttcagaggcagatgaactggtattggctctagatgacattatgctgcagtacatatcaaacctacaagaaactttaaaatcccttaggattgtatgtggggtggataatactgcacatagtgattcctctaaaaaggaagcaggactagagaaaaaagaagcacaacgattggtcgatgtctctgaagaggaagaatggtctattgtccagggtgctttgcagattcttacagttgctgattgcctaactagcagaacctcagtttttgaagcttctttaagggctactcttgccaggattggaaccaacttttctatttctggttttggttctagcctagataaatcaactgcagcaaatggtgatgagaatgcagaagtgcctatcacagggagggcagcacttgatattgcagctattcgcctcaccgatctaccagacaagtctaagaagctcttcactgtactagaacaggcaagttatatatttttaaattatcttgctagtgtcacaacactagagttatcacatgtttctctgatttgtttgaacagcctgattgcaaacttaggtggtagtattaagctagattatctgtcaaaagatccaaggttccatgctctacctctgacatcacaaagagttgcggccttctcagacacagtaaatgaactcgtctatgacgtgctcatatctaaagtccgacagcgtctcaatgaggttgctcgcctcccaatttggtcatcggtggaggaaccaggtggccttccccttccaagcttcagtgcctacccgcaggcatatgtgaccagtgttggggagtatctcctaactttaccccagcagttggagccacttgcagaaggtatctcaggcggtgaggctggcaacgaggaggctcagttctttgctactgaatggatatttaaggtcgcggaaggcgccaccgcgctgttcatggagcagctgcgagggatccattacatcaccgaccgaggcgcgcagcagctggcggcggacatagagtacctgagcaacgtcctctcggcgctgtccatgccgatcccacccttcctcgccaccttccacacctgcatctccaccccgagagaccaggtccgcgacctcatcaagtctgacggcggcagccagctcgacctccccaccgcccatctggtctgcaagatccggcgcatctcgtcatcagattag

SEQ ID NO: 3404 - DNA, 399 bp, Oryza sativa
  Clone ID: PAT_MRT4530_7616C.1
atgagcgaacacgcagtcaaggaggatgtggttcgccgtctcaagctcttgagcgcaaaaggggcaggccgagtggctatcaatgccgcgcttctggaggagatcagccgtccaacagcgctactgaaatgcaaaccagaggaagaatttgcacttagcagggcccttcgcgtgccagagaagatcggcacaagcaaaggagtgctggccaaagaagaacgcctggtacgccgaacgcgccgagtagcgctagtcactcgtccaacgccagaaaagacgatccccgacacccggcgtaagttgaatgtggagcaccgcatcccaaacaagaagaaattgggagatgaccgggacaatgagggcgccgcggatgtcagaaatccaggcgttgtttgctag

SEQ ID NO: 3405 - DNA, 2029 bp, Oryza sativa
  Clone ID: PAT_MRT4530_76302C.1
gttgttttcacttctaatcttccactattagtagtacggttgccacactgctagccaatccacttcgattggttccaccgcgcctaccgagtttcccttgctaggcagtagagagagtctgtgatcgagagagaagaggatcgagcagctagcaagccggcgggcgccatggtgctctcgcacgcgagctccggccgggacgacgccgtgcgctgcaccttcgcgacgcgctacgcctgcgagacgctgccgcggttcaggatgccggagcagtcgatcccgagggaggcggcgtaccagatcatcaacgacgagctgatgctggacgggaacccgcggctgaacctggcgtccttcgtcaccacgtggatggagcccgagtgcgacaagctcatcatggactccgttaacaagaactacgtcgacatggacgagtaccctgtcaccacggagctccagaaccgttgtgtgaatatgatagctcacctgttcaatgcaccaatcaaggaggatgaaacagctattggagttgggacggtgggatcctcagaagcaattatgcttgcaggactggcattcaagaggaagtggcaaaacaaacggaaggaacaggggaagccatgtgacaaacccaacattgttactggtgctaatgttcaggtttgctgggagaaatttgccagatattttgaagtagaactgaaggaggttaagctcagtgaaggatactatgtcatggatcctgtaaaggctgttgaaatggtggatgagaacactatatgcgttgcggccatcttgggctctactctcactggagagtttgaggatgttaagttattgaataatctcctaacagaaaagaataaggaaactgggtgggatgtgccaattcatgttgatgcagcaagtggaggatttatagcaccttttctataccctgagcttgaatgggacttcaggctaccactggtgaagagcatcaatgtcagtgggcacaagtatggccttgtgtatccaggtgttggttgggtcatttggcgaagcaaagaggatttgcctgaagaactcattttccatataaactatctggggacagaccagccgacgttcactctgaacttctccaaaggttccagccagataatcgcacagtactatcaactaatacgcctgggattcgagggatacaagaacatcatgcagaattgcatggagaacacagcaatactaagggaaggcatagaggcgactggtcgattcgaaatcctctccaaggaggccggtgtgcccttggtggcgttctcgctcaaggacagcggcaggtacaccgtgttcgacatctccgagcacctgaggaggttcggctggatcgtgccggcgtacaccatgccggccaacgccgagcacgtcgccgtcctccgcgtcgtcatcagggaggacttcagccggagcctcgccgagcggctcgtctcggacatcgtcaagatcctgcacgagctggacgcccattcggcccaggtgctgaagatctccagcgccatcgcgaagcagcaatcgggcgacgatggcgtggtcaccaagaagagcgtcctggagaccgagagggagatcttcgcgtactggagggaccaggtgaagaagaagcagaccggaatctgctagtgtggctctgtgagaaatgcttgaataacgtggcatgctcgatttgtgcatgggatggccggatcggatgggactgactggcggtgtacggacatggctgcccttgttcttatgttgaactgttgatgtagaaaaatgtgtggcctttgtatggttgtaagccatctacgtaccatggacttcagctatttggtggtttgttttcaacttttccatgtacacctggggcttgccaatctccttcctcctctttttaatctctataattatgggcaaagttttattattatttaggacgaaataaccaatcgattcaacttgacataccatcttttaataatagaaatggattacatttccagcttct

SEQ ID NO: 3406 - DNA, 3618 bp, Oryza sativa
  Clone ID: PAT_MRT4530_76315C.1
atggatgacggggacctcgatttctccaacccggacacattcctctgcccggccgtcggtggtgctgaccccgacggcagctgctccatggaacagctatttcgacgacatcctcaaggatacggagcaccatgcatgcacccacacccacacctgcaacccgcctgtgcatgacctctcacacacccacacctgcgtccatgtccacaccaagatcgtctccgccccatccgacactccgtcggatgctgccgagaccgccgagtccccgacggagaacaatgcctccaagaagcggccgtcgggtaaccgtgccgctgtgaggaagtacagggagaagaagaaagctcacactgcctcgctggaggaggaggttgttcatttgagggctctaaaccagcagctcatgaagaagctccagaaccatgccacgctcgaggcagaggtatccaggctgcggtgcctgctcgttgatattagaggaaggattgaaggggagattggggcttttccttatcagaggccagtgaagaacatcgatttggtttctagtgttgatcagggaagttatcttggtggtgcccaggttatgaactcctgtgactttcgatgtgccgaccagatgtattgcagtccagggatgcaggtgagaacaatgggcgaggatggcgctgtgagtggtcaggtgttggggcaaggtgcctgtgatattgccagtatccaatgccaaggtgcaaaatctggatctgcaaagctcccagtctgtggggctatggagcatggttattacggcatcccgggtcgacccacgggggcagtcaagccgcggcgaggcgacgaactcatcacctccactctctgctgcaacacgagtgaatcggaggcggcacgatgcgcaagtgggcgctctcctccgcgctcctcctcctcctcctcctcaccacactccccgatccagctaagaagctccaagtcaatgctgatgacagcactgatgagttagttgatccgccgaaggtagaggagaagattggtggtgttccccatggcctgtccacggactctgaggttgttcagagggaggctgagtcaatctcgaggaagaccctcaggagctcagcggagaaatttgagttccaggctgaggtgtccagactcatggacatcatcatcaactcactctacagcaacaaggacattttcctgagggagctcatctccaatgcttctgatgctttggacaagattaggttcctggctctcactgataaggaggttttgggcgaaggtgacactgctaagcttgaaatccagattaagctggataaggagaagaagattctctccattcgggataggggtattggtatgaccaaggaagatctcattaagaaccttgggaccattgccaaatctggaacttcagcttttgtggaaaagatgcagactgggggtgacctcaatctcattgggcaattcggtgttggtttctattcagtatacttggttgctgactatgttgaagtgatcagcaagcacaatgacgacaaacagcacgtctgggagtccaaagctgatggatcattcgctatctctgaggatacatggaatgaacccctgggccgtggaactgaaataagactgcacctccgagatgaagccaaggagtacgtggaagaagacaagctaaaggatttggtgaagaagtactctgagttcatcaatttccccatttacttgtgggcaaccaaggaggttgatgtggaagtgccagctgatgaggatgagtcaagtgaatcaagtgaagaagaggaatcatcccctgagtctacagaggaagaagagacagaagagagtgaagagaagaagcccaagacaaagacagtaaaggaaaccactactgagtgggagcttctgaatgatgtgaaggctatatggcttcgtagccctaaggaggttactgaagaagaatacacaaagttttaccactcacttgctaaggactttggtgatgacaagcccttgtcttggagccacttcactgctgagggagatgttgagttcaaagctttgctctttgttcctcccaaggctccacatgatctctatgagagttactacaactctaacaagtcaaaccttaagttgtatgttagaagggttttcatctctgatgaatttgatgagcttcttccgaagtatctcagctttttgaagggtctcgtcgactcggacacattgcctctcaatgtatcacgagaaatgctccaacaacatagcagcctgaagaccatcaagaagaaactaatccgcaaagctcttgacatgattagaaaacttgctgaggaagatcctgatgagtacagcaacaaagataagacagatgaagaaaaaagtgcaatggaggagaaaaagggccagtatgccaagttctggaatgagtttggaaaatcagtcaagttgggcatcattgaagacgcaactaacaggaaccgtcttgcaaagcttctgagatttgaaagtaccaagtcggaaggcaaacttgcctctcttgatgagtacatttcaaggatgaagccagggcagaaggacatcttttacattaccggaagcagcaaggaacaattagagaaatcaccgttccttgagaggctaaccaaaaagaactacgaggttatctacttcactgaccctgttgacgagtacttgatgcaatacctcatggactacgaggacaagaagttccagaacgtctccaaggagggtctcaaactcggcaaggactctaagctcaaggacctcaaggagtccttcaaggagctgaccgactggtggaagaaggctcttgacaccgagagcgtggactcggtgaagatcagcaaccggctgagcgacaccccctgcgtggtggtgacatccaagtacgggtggagcgccaacatggagaagatcatgcagtcacagaccctctcggatgccagcaagcaggcgtacatgcgcggcaagagggtactcgagatcaaccccaggcaccccatcatcaaggaactccgtgacaaggtcgcccaggacagcgagagcgagagcttgaagcagacggcgaagctggtgtaccagacggccctcatggagagcggcttcaaccttcctgatcccaaggacttcgcctccagcatctacaggtcggtgcagaagagccttgacctgagccccgacgcggccgtggaagaggaagaggaggtcgaggaggccgaggttgaagagaaggaatcatccaacatcaaggaggaggcggagccgtcgtcgtatgataaggacgagctgtagtgatgtgtcgccaccaactgttgtttttttatctagctcttgtgttaggttgtttaaaaatgtgatggtttcgagggacgtccatttttccatgcgaaaatgcatagtaccatgatacggggattttgtcgatgtacgtagtttgtgatactctagttcaaattaatggccgtctaatttcgatcaaaaaaaaaaaaaaaaaaaaaaaaaaaaaaaaaaaagaaaagcccacgtccggaatactaccttatttcatgacgtgattattcagggaacggacttggaagtagc

SEQ ID NO: 3407 - DNA, 1256 bp, Oryza sativa
  Clone ID: PAT_MRT4530_76352C.1
ccggccgggacccccaacccacgcctccctcgcatcgcccctccccgaccccgccgagatcggagcaggcgccgcctccctcctcccgcctcctcctccgccatggcgccgtctctgctcggggggttcaccaagtcgctggccatgacggtgctctcggagatcggcgacaagaccttcttcgccgccgcgattctggccatgcgctatccccggaagcttgttcttgctggttgtctcacctcattaacagtgatgacggctctatcagtttcacttggttgggttgcgccaaatctgatatcacgcaaatggactcatcatgtgaccactctgctattctttgtgtttggcattttgtcattgtgggaaggcttcaaagaagatggagattcagaagaattggctgaagtggaagctgagctggatgctaattttaaaagcaacaaagcagaatcgaaaagtaaatctaaggcaaatgatgataaaaagaagcagcaaagaccatttgttttgcagttcttctcaccaatctttataaaggcattttccattacattctttggagagtggggtgataagagtcaaattgctactattggtttggctgctgatgaaaatccattcggtgttgtcctggggggagttctggcccaagcactctgcactaccgctgctgttatgggtgggaaaagcttggcctctcaaatatctgagaaaatggtcggattgtcgagtggagtgctattcctgctgtttggtatcatgtcatacttgtcaggaccagaaggagaattataatgcccccagaaagtcatgcataaggagaattatcatgttcatcatggccggttaacaagcttgttttcactacgacttgatctcatcttagtaggtggacgatggcgacgaaagcgctgatcctttgcaaggaggatggcgattacttagcttagtcaacacattgtaaacatttcactcatcattcataaataacaagatggtaccaaagactctactggttgcttcgtgttagtcccagcaccagacaacattcagccaaaactgtcggagtagttgctgcatactaccatactatttttttggtcgcaactatgcataagaactgctagtcttcggactaaattgcctggactgaagaggggttacaaatcataaaaagtgatttcagaattagttgtttttctaaaaaaaaaaaaaaaaaaaaaaaaaaaaaaaggggaggggcctcgtgc

SEQ ID NO: 3408 - DNA, 585 bp, Oryza sativa
  Clone ID: PAT_MRT4530_76521C.1
atggggcgcgggaagatcgagatcaagaggatcgagaactccaccaaccgccaggtgaccttctccaagcgcaggagcgggatcctcaagaaggcccgcgagatcagcgtcctgtgcgacgccgaggtcggcgtcgtcatcttctccagcgccggcaagctctacgactactgctcccccaagacctcgctatcaagaatcttggagaagtaccagaccaattccggaaagatactgtgggatgagaagcacaagagccttagcgcggagattgatcgaatcaagaaagagaacgataatatgcagattgagctcaggcacttgaaaggtgaagatctaaactctctgcagcccaaagagctcatcatgattgaggaggcacttgacaatgggatagtgaacgtgaatgataaactgatggaccactgggaaaggcacgtgagaactcaccagcaagatatagcgctgagcgggagcatgagggatcttgagcttgggtaccatccagacagggactttgcggcccagatgccgatcaccttccgcgtgcagcccagccaccccaacctgcaggagaacaattaa

SEQ ID NO: 3409 - DNA, 1287 bp, Oryza sativa
  Clone ID: PAT_MRT4530_76522C.1
gcacgaggagcaaagccaacggaagcaaagtaaacagggcatgcccgttctggacctcccctactgaaccgcctcgaaagcctcctcatcaccattcctcttcctcccatggcgaactcctttactcctcctccacccccaccgcctcgcccatccacaccgacgccaaggcagcgcttgttcttgttgttgttgttgttgttggcttcgctttgctgctaagctagctggaggaaggaggaggaggaggaggaggcgggatggggcgcgggaagatcgagatcaagaggatcgagaactccaccaaccgccaggtgaccttctccaagcgcaggagcgggatcctcaagaaggcccgcgagatcagcgtcctgtgcgacgccgaggtcggcgtcgtcatcttctccagcgccggcaagctctacgactactgctcccccaagacctcgctatcaagaatcttggagaagtaccagaccaattccggaaagatactgtgggatgagaagcacaagagccttagcgcggagattgatcgaatcaagaaagagaacgataatatgcagattgagctcaggcacttgaaaggtgaagatctaaactctctgcagcccaaagagctcatcatgattgaggaggcacttgacaatgggatagtgaacgtgaatgataaactgatggaccactgggaaaggcacgtgagaactgataagatgctggaagacgagaacaagctgctggcttttaaactgcaccagcaagatatagcgctgagcgggagcatgagggatcttgagcttgggtaccatccagacagggactttgcggcccagatgccgatcaccttccgcgtgcagcccagccaccccaacctgcaggagaacaattaagctgctaggttgccccgccacttcgatcagttatctcatccactgatccaccactggattgaatgtcctagtgcattgtcaactgtatccctgttttcatgtctgtttcgatgaactattgagcatgtcatatgtgagttgctttgtgtgccaatatatagtctgtctctagtacaagctctgtgcttgccattctgcctcgctgtagatagcaccagcaatggagctagctcagatatcagtaacttcgtgcaagctgcaaggtatgcttgtgttatcaccgcatttgtcagatggtgaatagtagtttgtgattgtaacaaacaatttatgcaagcttggtttcatgctaaaaaaaaacaaccgaatttcaaaaaaaaaaaaaaaaaaaaaaaaa

SEQ ID NO: 3410 - DNA, 2016 bp, Oryza sativa
  unsure (1)..(2016): unsure at all n locations
  Clone ID: PAT_MRT4530_76548C.1
tttntttttttntnttttttttttttttttttttttttttttttggcaaccaaaaatcgatttcagatttattgacaataatacaggtatgagagtctgaaatcatttctaaccacttacaacacttacaacagcggctaattacatgcgcaacttattcgaagaccactgaaattcacattttcctaatcaaaacatggcaagtcggatatctgacgtactcacctgaggatttggtgggcggctatttgcagcagaaactctggagccccactcaagaagctccttacttgtgtcatccttgtgtacaatcacctctatgaagcacaagcaatccttcttaggtccctgagcttcttcaattgcttccttcagttcctcctcggttcggacctttgccgtgtagcacttcccctcgccattatggaacgcttccaccacaccggtgtagttccaattcttgatgacattgtaaggaccgtcatggatctccacctcgatggtgtaccctccattgtttatgaggaagatgatgcttttctgcccccaacgaagcattgtcgacacttcttgtgccgtcacctgaaagcttccatctccgatgcaagcaatgactcgcttatccttagcagcctttgcatatcccagagttgcacctaccgaccaaccaattgatccatattgcatttgaaattcgtacccacagccctctggtagctttagcttctggcaattaaaccaagagtctccagtctcagcaatgacagccgagttggctgacaacattttctgaatatgctggaaaagtacattcactctcaatggctctccaggctcagacaaaggaggttcacccggaggcacataaatccgacgatagttctcatatgcagccgtgtttttcttcagccgtgctgaaagtgcatgcaggaagtccttcatcagaacacacccaaacgcaggcccatgacctatcaccacccggtctggctggacgatgatggccttctccttcttgagaagtagtgagtatccaaccgagctgtagtcattaaatattgggccagcaaatagatatgcatcagctgactcgacgatctcagcacaaaatggagtgctcacagcaccccagtacgtgccaataaacctaggatggtgctctggcacaagaccctttgcagaaggcatgaccgcaacaggataaccacaggcatcagccagctctacgaaggatttgcatgctttggccaccctcatttttggtccaccaacgaggactggcttgactgctttgttcaggaaagctgcagcagtttccactgctgcctccaggttcatctggtttgataatcttggggacaggaagaaaggaacagggtggcggctaaaggtgggatgtgggatagaggggaggttgcagctgatgcttatgtaaacaggcttgctctcctttattgcagtggagatggcagcatcaatctgctcatgtgcatcctccaagttgttcaccaccgcctgatagcaagtgacagtctggaagcacctgagctcctgcgtgaaatcaggcagcccgatggtgtgatgcaggatgcggttgctcccgtagtcgttgctgttggggcccccaacgatgcacaccacggggaggttctcgctgaacgcgccggcgacggcgttgatggcgctgaggccaccgacggtgaacgtgacggcgcacgccccgaccccgccgccgcgcgcgcgggcgtacccgtcggcggcgtacgccgcgttgagctcgttgcagcacccgacgagccgcaccccgccgtgccccgcccccgcctccgcctcgagctcgtcgagcagcgtgaggttgaagtcccccggcaccgtgaacacgtcgcgcgccccgacctccgccagccgccgcgcgaggtgccgccccagcgtggcctccctcggcgcggagttcgccgcgggggcaggcgccgccgcatcggaggccgtcggcaccgagccgatcgtggtgtccat

SEQ ID NO: 3411 - DNA, 2392 bp, Oryza sativa
  Clone ID: PAT_MRT4530_77185C.1
ctctcatctcctcctcctgtgttcgtgttcttcttcttcttgtagcagcgcttaaccaacccatcattagcgaccaaacctctctccctctccccctctgactaatcaaaattaaacaatttcgatctccaccttcctcttcttgattccagttccaccagagagagacagggtcttctctaatccatgtggtgcttgttggtctcgcttgcttcgtcttcgtcttcgtcttcctcttctcgcacctagtcccgcctcgtcgcctcctccggagaccggagccggacgggacggttgccggcgagcggcggtcgctttcttctctcggccctactcacgttattttcagtgactcttcttccaaaccaagtggtaaagccaggattctaccattacaatgacgatctgcagctgtgaggagacgatcaatgagtttgagatgttaacgcgtgatgctgcgcgtgtgcagaaggatacactgaaaaagatccttgagataaatgctagtgctgagtacctgcagaactttgggcttggggggaggactgatgccgagagctacaaatcctgcatcccattgtgtgtgcacaatgatattgagccctatatccagcggattgttgatggcgatacctcaccagtggtcactggagaacccatcaccaacctctctctcagttccggtacaacacacggaaagcccaagttcattccattcaatgatgaattacttgagaccacacttcaaatataccgtacatcttacgcgtttaggaaccgtgaataccctattggccaaggaaaagcactgcagtttgtttatggtagcaagcaagtcataacgaaaggtggcattcttgcaacaactgcgacaacaaacttgtataggagacagcgctataaggaaggcatgaaggatatccagtcgcagtgttgcagtcctgatgaagttatctttggccctgatttccaccaatccttgtactgtcacttgctgtgtgggttaatatactcagaggaggtccattcagtgttctcaacatttgctcacagcctagtccatgcattccaaacattcgaggaggtttgggaagatctatgcactgatataagagacggtgttctctcaaagaaagttacagcaccatcaattcgtgaggctgtttcaaaaatcctgaagcccaatcctgaacttgctgactcaatatacaagaagtgtattggtttgagcaattggtatggagtgatcccagcactgtggccaaatgcaaagtatgtgtatggtatcatgacaggatccatggagccatatctgaaaaaattaaggcattacgcagggaacttgccacttataagtgctgactatggcgcatcggaaggatgggttggctctaacatagaccctactgtgccaccagagcaggtgacatatgctgttctcccacaagttggttattttgagttcattcctttggagaaaccaataggggaggagacagaaaactccgcctccattcattacatagaatcagatccagttggcttgactgaagttgaggtcggcaaaatctatgaagttgtaataactaactttgcaggtctatatcggtacaggctaggagatgtcgtgaagatagcacgcttccacaactccacacctgagctccaattcatctgtcgcagaagcctagtgctgagcatcaacatcgacaagaacaccgagaaagacctccagttggctgttgaggaggcatcaaagttcctggaaggagagaagctcgaagtcatggatttcacgagcttcgtggaacgatcaagcgatccagggcgctacgtgatcttctgggagctgagtggcgatgcgagtgatgaggtcttgagcagctgcgcaaatgccttggatctagccttcattgacgcaggctacacgggctcgaggaagatcaagacgatcggcccccttgagctccggatcctcagaaagggaaccttcaaggagatcctagatcatttcctaagccttggtggtgcggtgagccagttcaagacaccaaggtttgtgaacccatcaaacagcaaggtgttgcagatactgagtagaaatgtcacccaaagttatttcagtactgcctatggattttgatacaaagaaacatattagatgctagcagctgcatgtaattacctttttacctcttgtttttcagctttactgtagtctccaccggaagaaaacgtttggtttagtctcttgaataatctattttcttatcctgtttgtgactatctagaatctatgtaaatggcccagctctagtgaaagttatggtgatgttatcaggaaagaaaatgtaaaatattacgttaattataaactatccttctttttacc

SEQ ID NO: 3412 - DNA, 909 bp, Oryza sativa
  Clone ID: PAT_MRT4530_77608C.1
atgtcgacgtgcgactcaatgaaaagcccagactttgagtatattgataatggggattcctcctcagttctaggttccttgcagcgaagagcaaacgagaacctgcgtatctcagaggatagagatgttgaagaaactaagtggaagaaggatgctccttccccaatggaaatcgaccaaatttgtgatgttgacaataactacgaggatccgcagttgtgtgctactcttgcttctgatatctacatgcacttgcgcgaggccgagaccaggaaacatccatcaaccgattttatggaaacactccaaaaggatgtaaacccaagcatgagagcgatcctgatagactggcttgtggaagtcgctgaagaatatcgtcttgttcctgatacattatacctgacagttaactacattgaccgttatctttctggcaatgagatcaatcgtcaaagactgcaattacttggagttgcttgtatgcttattgctgcaaaatacaaggagatatgtgcacctcaagtagaagaattctgctatataactgacaacacatacttcagagatgaggatccagcattgcatcttgagttcctagccaattatgttgctgagctatcactgctggagtacaatctactttcttaccctccttcactagtagcggcatcagctattttcctggccaaattcatactgcagccagcaaagcacccttggaattccacccttgctcactacacacaatacaagtcgtcagagttaagcgactgcgttaaggcattgcaccgccttttctgtgttggtcctgggagtaaccttcctgcaatcagggagaagtatacccaacataagatatatgcagctgatgtgatcgacttaaacatgatgattcagcgagattcttag

SEQ ID NO: 3413 - DNA, 1494 bp, Oryza sativa
  Clone ID: PAT_MRT4530_77611C.1
atgtcgagcaacctagcagcctcccgccgctcgtcgtcgtcgtcctcggtggcggcggcggcggcggcgaagcgacccgcggtgggggagggaggaggaggaggaggagggaaggcggcagcgggcgccgccgcggcaaagaagcgcgtggcgcttagcaacatcagcaacgtcgccgctggtggtggcgccccagggaaggccggcaatgcgaagttgaatttagctgcctcagctgcaccagtgaagaagggatctttggccagtggccgcaatgtgggcacgaatcgggcctcggcggtgaaatcggcttccgccaagccggctccggccatatcccgccatgagagcgccacacagaaggagtctgttcttcctcctaaagtgcctagcattgtgccgactgctgcactggcacctgtcactgtaccctgcagcagcttcgtctcccctatgcattcaggagattcagtttcggttgacgagacgatgtcgacgtgtgactcaatgaaaagcccagaatttgagtacattgataatggggattcctcctcagttctaggttccttgcagcgaagagcaaacgaaaacctgcgtatctcagaggatagagatgtcgaagaaactaagtggaagaaggatgctccttccccaatggaaatcgaccaaatttgtgatgttgacaataactacgaggatccgcagttgtgtgctactcttgcttctgatatctacatgcacttgcgcgaggctgagaccaggaaacgtccatcaactgattttatggaaacaatccaaaaggatgtaaacccaagcatgagagcgatcctgatagactggcttgtggaagtcgctgaagaatatcgtcttgttcctgatacattatacctgacagttaactacattgatcgttatctttctggcaatgagatcaatcgtcaaagactgcaattacttggagttgcttgtatgcttattgctgcaaaatacgaggagatatgtgcacctcaagtagaagaattctgctatataactgacaacacatacttcagagatgagtgctggaatgaatcgaactctaataactctcttattgcctacaacaggagatttgtccgtgttgcacaagtatcggatgagcttttcatcgtgcaggatccagcattgcatcttgagttcctagccaattatgttgctgagctatcactgctggagtacaatctactttcttaccctccttcactagtagcggcatcggctattttcttggccaaattcatactgcagccaacaaagcacccttggaattccacccttgctcactacacacaatacaagtcgtcagagttaagcgactgtgtaaaggcattgcaccgcctttttagcgttggtcccgggagtaaccttcctgcaatcagggagaagtatacccaacataagatatatgcagctgatgtgatcgacttaaacatgatgattcagcgagattcttag

SEQ ID NO: 3414 - DNA, 2189 bp, Oryza sativa
  Clone ID: PAT_MRT4530_77613C.1
cggcacgagggccgcccccgggtccggtcgctcccccccccccccgcctcctcccccgcacctctccgctccggctctccccgcctctgtcgggaaggaaaggatccaagccctcgccctcctctgcctctgatccccgccggccgccgccgccctcgcaaccctcgcagcagcagcaggaggaggagggttcaggtggtggttgccgtcggccgatgtcgagcagcctagcctcccgccgctcgtcgtcgtcgcggcggcgaagcggcccgcggcgggggagggaggagggaaggcggccgcgggcgccgcggcggccaagaagcgcgtcgcgctcggcaacatcagcaacgttgccgcggccgccaacaatgcgaaatttaattcagctacctgggctgcacctgtgaagaagggatctttggccagtggccgcaatgtgggcatgaatcgggtctcggcggtgaaatcagcttccgccaagccggctccagccatatcccgccatgagagcgccccacagaaggagtcagtccttcctcctaaagtgcctagcattgtgccgactgctgcacttgcacctgtcactgtaccctgcagcagcttcgtctcccctatgcattcaggagattcagtttcggttgacgagacgatgtcgacgtgtgactcaatgaaaagcccagaatttgagtacattgataatggggattcctcctcagttctaggttccttgcagcgaagagcaaacgaaaacctgcgtatctcagaggatagagatgtcgaagaaactaagtggaagaaggatgctccttccccaatggaaatcgaccaaatttgtgatgttgacaataactacgaggatccgcagttgtgtgctactcttgcttctgatatctacatgcacttgcgcgaggctgagaccaggaaacgtccatcaactgattttatggaaacaatccaaaaggatgtaaacccaagcatgagagcgatcctgatagactggcttgtggaagtcgctgaagaatatcgtcttgttcctgatacattatacctgacagttaactacattgatcgttatctttctggcaatgagatcaatcgtcaaagactgcaattacttggagttgcttgtatgcttattgctgcaaaatacgaggagatatgtgcacctcaagtagaagaattctgctatataactgacaacacatacttcagagatgaggttttggaaatggaagcttctgtcctgaattacctgaagtttgaagtgactgcacctacagcaaaatgctttttgaggagatttgtccgtgttgcacaagtatcggatgaggatccagcattgcatcttgagttcctagccaattatgttgctgagctatcactgctggagtacaatctactttcttaccctccttcactagtagcggcatcggctattttcttggccaaattcatactgcagccaacaaagcacccttggaattccacccttgctcactacacacaatacaagtcgtcagagttaagcgactgtgtaaaggcattgcaccgcctttttagcgttggtcccgggagtaaccttcctgcaatcagggagaagtatacccaacataagtacaaatttgtggcgaagaagccctgcccaccctcaataccgaccgaattctttcgcgacgcaacatgctgaactagaaaaataaaccaaggattagttacagttgctgactgaattcttcctccagaggcacctatgccaggttgtgccgtagaccgttcagataaccttgatgcaaggcatgctgcttgccccccccccccccccccctggttctttcaggcggtttggctgagtgtagatagatcgatgcttctgctgtgtgtggtaacttttatggtactgatgtgctttcttctatcttcttttccctgtacctagatgatccatggttttcagtactttgtacatcggagtcctgcagcaaagctttaaacatcttgtttgatattagctgccaacctgggcgtctcctaggttgatgtatgatagagtctctgttcgtgttgcttttgtgaaattctcaataagagcaccacattttcaacagtgctcattctgaataaaaaaaaaaaaaaaaaaaaaaaaaaaagggcaaacaatataaaaaaatccaagataaaaaactcga

SEQ ID NO: 3415 - DNA, 891 bp, Oryza sativa
  Clone ID: PAT_MRT4530_77697C.1
atgccggtggtggcagcgtccggccacggcctcaggaggacgatgtactccttgtactccaagggatccttcctcctgctgctggggcgccgatgcattggtggtggtggagcgccgccgggggaaggaatgggcatgcggtgcagtggagacgacgaggatcatctgatacctcgcaagtatcatctgatacgtggccgcgcgcagtgcacgcttcgcggaccaaacgtttccgtggtggccgtgcaccagcagaacacgccgcgcgtacgcgagagcgcagcagccgcgacgagcaacagagacgtgtaccgatccgtcacgacgtgcgcgcgcgcgagcgagaggatgagcgcggcggaggagagaggagatcggcaggagcgggacgatggggaaggtggagaggaggagcggcgggagcgaggcggggtgggcgggctggtggacagggccaaggggttcgtggcggagaagatcgcgaaaatccccaagcccgacgcgacgctggaccgcgtctccttcaagggcgtcagccgcgagtgcatcacgctccacagccacctcgacgtcaacaacccctactcgcaccgcatccccatctgcgagctcacctacaccttcaagagcggcgacaaggtgatagcgtccggcacgatgcctgacccagggtggatcgcggcgagcgggacgacaaatctggagctgccggtgaaggtgccgtacgacttcatcgtgtcgctgatcaaggacgtgagcggggactgggacatcgactacgtgctggaggtcgggatcaccatcgacctccccgtcgtcggcagcttcaccatcccgctcgccaccgagggtgagatgaagctccccaccttccgggacctcctcttctga

SEQ ID NO: 3416 - DNA, 492 bp, Oryza sativa
  Clone ID: PAT_MRT4530_77850C.1
gtggatccccgggctgcaggctcgatccgctctctctctctgcttcgattcgattcgattcgatcttctccacctcgtcgccgccgccgccgccgacaaggactggctcaggggctccatcttcctcatcatcgccaccctcgcctgggcctccctcttcatcctccaggccgcgacgctgaagaggtacgacgcgccactgtccctgaccacgctcatctgcttcgtgggcaccctgcaagccatcgtcgtcaccttcgccatggagcacagcatgtccgtgtggaagatcggcttcgacatgaacctcctcgccgccgcctacgccggtatcgtgacatcgagcattgcctactacgtgcaagggctggtgatgcagagcagggggcccgtgttcgcctcggcgtcagcccgctcatgatgatcatcgtcgccatcatggggtcgttcatcctcgctgagaacatctacctcggagggatcattgggtcg

SEQ ID NO: 3417 - DNA, 1371 bp, Oryza sativa
  Clone ID: PAT_MRT4530_77859C.1
atggggccctccgcagccgcgctgagggccgccgccgtggtggggctggttgtggcggtcgggctcgcgctcccgccgctggccgcggcgctgcggccgctcagggagcgcgtcgcgtccgcaggggccgcctcctcctccggatcgtggggcgatgagcatgcattcttcaagagggatgagaatgagataagtccgtactcatggaatatcacagggacatataaaggaagttggaactttgctggttccacaaatggttcttctaggtttcttgagtttacaaaattgaagggcgatgcggttttggaactattaagtacaccgacaaagataagcggggtgcactatgttcagggatctgttacattccatgatgttctagacaatgctcatgatcgtggagttgctcagataagtggtgcagatggcgagccacttcaagaagaggattacttcttatcaaatccatatcatttgaatatgtcagtacaatttggacctcttgcttttcataacctcaaagattccagttttgaggtagtttatatcattttgcagggagctgccaaggtttcaattctaatgatagggcaacaagctatcatggatgcatatctttgtctactgcatctgactgctgggatattggttgagtctctctttaacgcattcgcaacggctgctttcttcaagtttgtcgtattttctatatttgagatgcgatatctccttgccatatggaaagccagtagaccattgaacagtggagaaggctgggaagtaatgaggagagaattgtctgttctttacagccgcttttatggcattcttttgggagggatccttctcatgtatgagttgcacaattttctgcgcccacttcttttcctgatgtactccttttgggttcctcaaattgtcacaaatgtcatccgggatacaagaaaacccctgcaccctcagtatattttaggcatgacgatcactcgccttgctattccactgtatatatttggttgccctagcaatttcatgcgcattgagcctgacaagacatggtgcatagctgtgacaatattcatgggtatccaagcggcagtgctcctgctccagcactattttggttcacgctgctttattcctcaccagattctccctgagaaatactgctaccacaggaaggtagaggataacacaaatcagcccattgattgtgttatttgcatgactacaatcgaccttacccaaagaacaagtgaatacatggtggcaccttgtgagcatatattccactcaggctgtttgcaacgttggatggatatcaagatggagtgcccaacttgcaggcgctccttgccgccagcttag

SEQ ID NO: 3418 - DNA, 1882 bp, Oryza sativa
  Clone ID: PAT_MRT4530_77861C.1
ggagcgcgtcgcgtccgcaggggccgcctcctcctccggatcgtggggcgatgagcatgcattcttcaagagggatgagaatgagataagtccgtactcatggaatatcacagggacatataaaggaagttggaactttgctggttccacaaatggttcttctaggtttcttgagtttacaaaattgaagggcgatgcggttttggaactattaagtacaccgacaaagataagcggggtgcactatgttcagggatctgttacattccatgatgttctagacaatgctcatgatcgtggagttgctcagataaggttagaaggcgtgtacatatggccttttcggcaacttcggatggttgcaaacagtggtgcagatggcgagccacttcaagaagaggattacttcttatcaaatccatatcatttgctgcggattttctcctctcaagtgttccaagaaacctctgaagagaagaaccggaggaagaattctcttacttacgacatggagaagcattgtagcgtcgaaatagctgctaaggtggtccgtgtgtcctctaacctaaatgagggagagcatgagaaataccgtttggagggattgatggagagtacagcagtggatgatgatggagagtgtttctcaccgatcttattaaatgcaacatcattgaatgttgaagtttattacaacaaagcagtcaattatacactgatggtcacttttatctccttcctccaagttttgttactgattagacaaatggaacatagcaacacccaatctggagctgccaaggtttcaattctaatgatagggcaacaagctatcatggatgcatatctttgtctactgcatctgactgctgggatattggttgagtctctctttaacgcattcgcaacggctgctttcttcaagtttgtcgtattttctatatttgagatgcgatatctccttgccatatggaaagccagtagaccattgaacagtggagaaggctgggaagtaatgaggagagaattgtctgttctttacagccgcttttatggcattcttttgggagggatccttctcatgtatgagttgcacaattttctgcgcccacttcttttcctgatgtactccttttgggttcctcaaattgtcacaaatgtcatccgggatacaagaaaacccctgcaccctcagtatattttaggcatgacgatcactcgccttgctattccactgtatatatttggttgccctagcaatttcatgcgcattgagcctgacaagacatggtgcatagctgtgacaatattcatgggtatccaagcggcagtgctcctgctccagcactattttggttcacgctgctttattcctcaccagattctccctgagaaatactgctaccacaggaaggtagaggataacacaaatcagcccattgattgtgttatttgcatgactacaatcgaccttacccaaagaacaagtgaatacatgtggcaccttgtgagcatatattccactcaggctgtttgcaacgttggatggatatcaagatggagtgcccaacttgcaggcgctccttgccgccagcttagatgagcactactttgtaccatatagttaacaagtaggtagctcagcatattcaaggtgggaattgaggtgcaataagacgagttgcaaccatgggtggtttctcgaagatagctgtagaaaatctgttacgcttttaatctcaagtgatctctgtgttgtacacaaatcattgtaccaattctcccacggaggaaaaaaaaattttacttaaaaaaaaaaaaaaaaaaaaaaaaaaataaaaaaaaaaaaaaaaataaaaaaaaaaaaaaaaaataaatataa

SEQ ID NO: 3419 - DNA, 1485 bp, Oryza sativa
  Clone ID: PAT_MRT4530_77880C.1
gatggtgagccaagtggtcgccgaggagaagccgcagctgctgtccaagaaggccgggtgcaacagccacggccaggactcgtcctacttcctggggtggcaggagtacgagaaaaacccgttcgaccccgtctccaacccttccggcatcatccagatgggcctcgccgagaaccagctgtcgttcgacctgcttgaggagtggctggagaagaacccccacgcgctcggcctccggcgagagggcggcggcgcctccgtcttccgcgagctcgcgctgttccaggactaccacggcctcccggctttcaaaaatgcattggcgcggttcatgtcggagcagagagggtacaaggtggtgttcgaccccagcaacatcgtgctcaacgccggcgccacctcggctaacgaggcgctcatgttctgcctcgccgaccacggcgacgccttcttcatccccaccccatactacccagggttcgaccgcgacctcaagtggcgcaccggcgcggagatcgtacccgtgcactgcgcgagcgcgaacgggttccgggtgacgcgcgccgcgctggacgacgcgtaccgccgcgcgcagaagcgccggctgcgcgtcaagggggtgctgatcaccaacccgtccaacccgctcggcaccgcgtcgccgcgcgccgacctcgagacgatcgtcgacttcgtcgccgccaagggcatccacctcatcagcgacgagatctacgccggcacggcgttcgccgagccgcccgcgggcttcgtcagcgcgctcgaggtcgtggccgggcgcgacggcggcggcgctggcgtgtccgaccgcgtgcacgtcgtgtacagcctgtccaaggacctcggcctcccggggttccgcgtcggcgccatctactccgccaacgccgccgtcgtgtccgcggcgaccaagatgtccagcttcggcctcgtgtcgtcccagacgcagtacctcctcgcggcgctgctcggcgacagggacttcacccggagctacgtcgcggagaacaagcggcggatcaaggagcggcacgaccagctcgtggacgggctcagggagatcggcattgggtgcctgcccagcaacgccggcctcttctgctgggtggacatgagccacctgatgcggagccggtcgttcgccggcgagatggagctctggaagaaggtggtgttcgaggtcggcctcaacatctcccccgggtcgtcgtgccactgccgcgagcccggctggttccgcgtctgcttcgccaacatgtcggccaagaccctcgacgtcgccatgcagcgcctcaggtcgttcgtcgactccgccaccggcggcggcgacaacgccgccctccgccgcgccgccgtccccgtcaggagcgtcagctgcccgctcgccatcaagtgggcgctccgcctcaccccgtccatcgccgaccggaaggccgagagataatcgccaagaacaaaaccaca

SEQ ID NO: 3420 - DNA, 823 bp, Oryza sativa
  Clone ID: PAT_MRT4530_77902C.1
aagcacaatattgtaccaacaatggcagccaaaatattttgcttccttatgctccttggtctttctgcaagtgttgctaccgcaaccattttcccacaatgctcacaagctcctatagcttcccttcttcccccatacctctcaccagcggtgtcttcaatgtgtgaaaacccaattgttcaaccctacaggatccaacaggcaatcgcaacaggcatcttaccattatcacccttgttcctccaacaaccgtcagccctattacagcagttacctttggtccatttggtggcacaaaacatcagggcacaacaactacaacaacttgtgctagcaaaccttgctgcatactctcagcaacatcagtttcttccattcaaccaactggctgcattgaactctgctgcttatttgcaacaacaattaccattcagccagctagttgctgcctacccccagcaatttcttccattcaaccaactagcagcattgaactctgctgcttatttacagcagcaacaactactaccattcagccagctagctgatgtgagccctgctgccttcttgacacaacaacagttgttgccgttctacctgcacgctatgcctaacgctggcaccctcttacaactgcaacaattgctgccattcaaccaacttgctttgaccaactcaacagtgttctaccaacaacccatcattggtggtgccctcttttagattgcttatgagttatagttcaataatgaagttttttggatgatgtttgtggcgtcccagaaataagaaagtacatttctagattcttaaaacaccaaaa

SEQ ID NO: 3421 - DNA, 379 bp, Oryza sativa
  Clone ID: PAT_MRT4530_77952C.1
atgtttctatttatggtcactaacatctcattctcctaatggtcatcactagctaatagctagcttaattacatcaatacgccatggcggccgagaagcaccaccaccacctgttacaccacaagaaggacgtcgtgccggccacctgtgtcgactccgaccgcgagggcgtatacacgtcggagacggtgaccaccgaggtggtcgccagccgacagcactagtgcgaaaggtacaagaaggaggagaaggcagcacaagcacaagcagcaccatcgctaggcctgtgccctcggcgcagcgccttcggccttgttgagaagcactaagcgaaaaacgacccggagaacgcgcacaggcacaagatcaccgaggagat

SEQ ID NO: 3422 - DNA, 2066 bp, Oryza sativa
  Clone ID: PAT_MRT4530_78529C.1
gtctcgccttgccgttgcgtctcgtataaaccctaagtctctctcttatccattcgtctctcttctctcatcagaagcggagcccgcggcgagagagcacagaggtatagtggtgggagggggaaggccatggcgccggcgctgagcaggagcctgggggcgtcgtccgttgcggcgctgaggccgaccccgtcgcggggccggggtcccacgctgcggagcgcggtcgcggtgcaggggaggggagcggcggcggtggccgcgagaggggtgaggtgggaggccgggaggaggaaggggaaggggaggatggtcggggtcaggtgcgaggccgccgtcaccgagaagcccgccggggaggaggaggcggccggcgagcagttcgagtaccaggctgaggtcagccgattgctggatttgattgtccacagcctgtatagccacaaggaggtttttctccgtgaactcgtaagtaatgcaagtgacgcgctggataagctgagatttctcagtgtaactgattcctctgtattgtccgatggcggtgagttggaaattaggatcaaacccgacccagaggctggcacaattactatcactgatactggcattgggatgaccaaagatgaactcaaagattgccttggaaccatcgcccaaagtggcacctccaaatttttgaaggctcttaaggagaacaaagatcttggtgcagataatggacttattggtcaatttggtgtgggattttattcggcttttcttgttgcagagaaggttgtggtttccactaagagtccaaaggcagacaaacagtatgtatgggaagctatggctgacagcagctcatatgttattaaggcggaaacgtgggctgagaaaatgttgacacgcggaacacagattactctgtttttaagagatgatgataagtacgagtttgctgaccctggacgtattcaaggtttagttaagaactattcccagtttgtttcattccccatatatacatggcaggagaaatcaagaacagttgaggttgaagaagaagaaccgaaagaaggtgaagaggcaacagagggtgaaaagaagaagaaaaagaaaacaatcactgagaagtactgggattgggaattggctaatgaaacaaagcccatatggatgagaaatccaaaggaagttgagaaaactgagtacaatgaattctacaagaaggcattcaatgagtttttggatcctcttgcttacacccactttacaacagagggtgaggtggaattcaggagcgtcctctacattccaggaatggcacctcttagcaatgaggagataatgaaccctaagaccaagaatatccggctgtatgttaagagagtcttcatatcagatgacttcgatggcgagttgttccctagatacttaagctttgtaaagggtgtagtggactcaaatgatcttcctctcaatgtttcccgtgagattcttcaagaaagtcgtattgtcaggatcatgcgcaaaagacttgtcaggaagacatttgatatgattcaggagattgctgagagagacgacgaggaggactacaaaaaattttgggagagttttggcaaatttgttaaacttggctgcattgaggacacaggaaatcacaaacgcctttctcctctgttgcggttttactcttccaaaaatgagacagatttgataagtcttgaccagtatgtagagaacatgccagaaaaccaaaaggcaatctactacattgctacagacagtcttcagagtgcaaagactgctcctttcttggaaaagttggttcaaaaagacattgaagttctctaccttatcgagccgattgatgaggttgccattcagaatttacagacatacaaagagaaaaaatttgttgatatcagcaaagaagacctggaattgggtgatgaagatgaggacaaggaaaatgagagcaagcaggaatacactcttctatgtgactggataaagcaacagcttggtgacaaagttgccaaggttcagatatcaaaacggcttagctcttcgccatg

SEQ ID NO: 3423 - DNA, 1317 bp, Oryza sativa
  Clone ID: PAT_MRT4530_78867C.1
gcccgcgcctcccaccgcacggcgcacgctcgcgatcgcgaacccccccagcgagggcaaggaagggagaggagacgaggaatctgagcgcgcgcgagcgagcgagcgcaagggtgggtggttccggccgcggcgggggggttgccccgggtgttggatgagaaggagggcgtcggcgtcggcgtcggcggcggcggtggaggcggtggcggtggtggcgggggtggaggatgcggaaggcgtacaaggactcgctcaaggtgctcgaagctgacatccagcacgccaacaccctggcctccgaatttccccgggagtacgatggcgcgtgcctgcagatgcggctctcgtatagccccgcggcgcatatattcctcttcctggtgcagtggactgactgcagcctcgccggggctctcggcttgctgaggatcctcgtctacaaggtttatgtcgacgggacgacgacaatgtctacccatgagaggaaagccagcatcaaagaattctacgctgtgatatttccttctctgctgcaactgcaaagggggattactgatacggaggacaaaaagcagaaggccgtgtgcatggagaggtacagaaggagagatgaggatgaaagaaacatcttatccgaaattgatgccgagagagaagaggagtgcgggatttgcatggagatgaacagcaaagtggtgttgcccaactgcacccataatatgtgcctcagatgctaccaggactggaattcaagatcacagtcttgtccattctgccgtgacaacttgaagaagactgaccctggtgacttatggatctatgttgaggaccaagatgtggttgacttggagacagtgtcaagagagaacctcagaaggctgttcatgtacataaacaagctgcctctgattgttccggatgtcatcttcagtatttatgattcccacataaaatgactcgcaacgctgcttcgtcgacagccttcagccaatgctctgttctgattaagctatgcccccaagttctccatttccatgcttagactcaagctcttggaaatgcctgaaccgttgtggagacacaaacctcctggttgtgttgtagaacttatttagtggttacatgcgtcctatcttcaagcatatcaaagccagcttgtatatatctgacatggctctgtcaatagagaacttgtgcatgccccaaatggaggcagtgctgtttgttactgttattctgagctctgttgtagcttgctcttgctgtttacaacatgatggctctgccaacatttgcatcaaaaaaaaaaaaaaa

SEQ ID NO: 3424 - DNA, 1450 bp, Oryza sativa
  Clone ID: PAT_MRT4530_79066C.1
tccccgggctgcaggaattcggcacgaggcgcaaatcgcatcgacttcgattcgcttcgtttcgttctcgctgttgatttgttcgtgagatttgaattctagcaatggctcctctcggtgacggagcggcggcggcggcggcggcggagcccaacctggtggtgtcgttcggggagatgctgatcgacttcgtccccgacgtcgccggcgtctcgctggccgagtccggcggcttcgtcaaggctcccggcggcgcccccgccaacgtcgcctgcgccatctccaagctcggtggctcctccgccttcgtcggcaagtttggtgatgatgagttcgggcacatgctggtggacatcctgaagaagaacggggtgaacgcggaggggtgcctgttcgacgagcacgcgcgcacggcgctggcgttcgtgaccttgaaaagcaacggcgagcgcgagttcatgttctaccggaacccgagcgccgacatgctcctgacggaggcggagctcaacctggacctgatccggcgcgccaagatcttccactacggctccatctccctcatcaccgagccgtgccgctccgcccacgtcgccgcgatgcgcgccgccaagtcggccggcatcctctgctcctacgaccccaacgtccgcctcccgctctggccgtccgaggacgccgcccgcgccggcatcctctccatctggaaggaggccgacttcatcaaggtgagcgacgacgaggtcgccttcctcacccagggcgacgccaacgacgagaagaacgtgctctcgctctggttcgacggcctcaagctcctcatcgtcaccgacggcgagaagggatgcaggtacttcaccaaggacttcaagggctccgtccccggcttctccgtcaacaccgtcgacaccaccggcgccggcgacgccttcgtcggctccctcctcgtcaacgtcgccaaggacgactccatcttccacaacgaggagaagctgagggaggcgctcaagttctcgaacgcgtgcggagccatctgcaccaccaagaagggtgccatcccggcgctgcccaccgtcgccgtcgcgcaggagctcatcagcaaggcagccaactagagctcctcggtttcgtcgtcgatcgccgccattgggggcctcggaattttaggtcgatttaatttagttgctgcttcgttttagacaaggaagaggaggggcttgggtgtgttcatgtctgtcttttgtgtgctaagttagttgcttccgtgtgagaacttttggcgtttatttttactattattattaataagaagctcttggatttgcggtggatattttggtctgaatttgtgtaatgaggcagctacttggcgaaatttattgtgtcatgtctttgttcagaggaaaagaaaatcttttcgtgtgctaaaaaaaaaaaaaaaaaagcggcc

SEQ ID NO: 3425 - DNA, 516 bp, Oryza sativa
  Clone ID: PAT_MRT4530_79068C.1
ccggccgggaagcaaaatccccaaatcctccagatcgtcttcgtcttccacctcgagctcttacgcatcgtcagccatgtcgggccgcggcaagggaggcaagggtcttggcaagggcggcgcgaagcggcacaggaaggtgctgcgcgacaacatccagggcatcaccaagccggcgatccggcggctgatctacgaggagacccgcggcgtgctcaagatcttcctcgagaacgtcatccgcgacgccgtcacctacacggagcacgcccgccgcaagaccgtcaccgccatggacgtcgtctacgcgctcaagcgccagggccgcaccctctacggcttcggcggctgagttcccggccccctgtgctcgatccagatctgatgccgttagcgttgcttagggtttcgttgcggaaattgtactacttcgttgtttctgcttgtgcaaagtgaatggatggttggattaaatgaatcattttctctcctaaaaaaaaaaaaaaaaaagcggcc

SEQ ID NO: 3426 - DNA, 1317 bp, Oryza sativa
  unsure (1)..(1317): unsure at all n locations
  Clone ID: PAT_MRT4530_79070C.1
ggaggagagggtggaggggtggatgagggagtcatcgcagagatcgtgcggcacatcggggaggcgccgttcctggtgcacctgttcaacgacgacgacggcggcagcgggcggggaggcgcggggcgcgtgacggtgcggcgggagacggcgtcggcggagagctggcccgacgtgcggcggcggtggggcccgggcgggatgcggcgtcccgacggaatcatactggtcgagcagatcgccgcggcggtcgaggagggcggcgcgtccgccggcgccggcgccgccgaggcggcgcggcaggtgtggggcctggtggtgcangcccgcgggatggagtgcgcgtcgtgctacgtgctcgacacctgccgcgtccgctccccggcggggctctgcacccacttctgcctcgccagggcgcagtgcttcggcgacccccggcagggctagctccgcaacgcctggctcaaccgcctttcccctctctggtagtcaccgccgccgccgccgccgcggcgtactaatgtactaaagctaccggccttgatgcgtccgattcttgctgtgaagaagagcaaacgaagcgtgcagattgcaacggaagaacatattcagattctttctttgttttctttcgttccggtttctcccaaatgcggatttgtacagattattggttgcgaatttgcaatttgctacctcgattattccaacgaggagcgattcatcctgtcatcgaggcattgccccatgtactatgacaacatatgacaacaattttatgagaaatttttttagtatactttcttgatcggcaggacagatcaaccaaaaatcgccaccaaaaatccccaattccatcgtcgtcgatgtcggggcgcggcaagggagggaagggtctcggcaagggcggggcgaagcggcaccggaaggtgctccgcgacaacatccaggggatcacgaagccggcgatccggaggctggcgaggaggggcggggtgaagcgcatctcggggctcatctacgaggagacccgcggggtgctcaagatcttcctcgagaacgtcatccgcgacgccgtcacctacaccgagcacgcccgccgcaagaccgtcaccgccatggacgtcgtctacgccctcaagcgccagggccgcaccctctacggcttcggcggctaggagccttttgcattgtgtttgtcttgttaggaatctgcttgtttcggatgtagccctgtatcctgtaatgaagaaaatgctagcagtaaaacttgtttgaattcacctgaaaaaaaaaaaaaaaaaacccgcggcc

SEQ ID NO: 3427 - DNA, 1045 bp, Oryza sativa
  Clone ID: PAT_MRT4530_79072C.1
accgtatccttccccaaaatccccaatccccgagctgtttcacctccagcgagcgagcgcggcggccatgtcggggcgcggcaagggcggcaaggggctcggcaagggcggcgcgaagaggcatcgcaaggggctgcgcgacaacatccagggcatcaccaagccggccatccagaggctggcgaggaggggcggcgtgaagcgcatctccgggctgatctacgaggagacccgcggcgtgcttaagatcttggtcgcatcgcacccccgcgaatccccccccacaggccaacagcaaagcagaggcgaagggaagaagaagaagaagaagcggcggcggcggcggccatggcgtggcgtgcgaaccccgcccggcgcgactccaatcaccaccacctcttctccaattccactcgcttttctctctctctcgtgcgtcgagccaccggaatcgtcgtcgtcggcggccatgtcggggcgcggcaagggaggcaaggggctcggcaagggcggcgccaagcgtcaccggaaggtgctccgcgacaacatccaggggatcaccaagccggcgatccggaggctggcaaggaggggcggcgtgaagcgcatctccgggctgatctacgaggagacccgcggcgtgctcaagatcttcctcgagaacgtcatccgcgacgccgtcacctacaccgagcacgcccgccgcaagaccgtcaccgccatggacgtcgtctacgcgctcaagcgccagggccgcaccctctacggcttcggcggctgatcgatcttgcctccctccgccatctctcccatgtcgtctggccgtgcccacaagtcttgcggtcaagaaaaaaagtttgatggaaagccgtggaatccaccttgttcagttcgctgtttagtttttctagtgtttacctgaatcatgaaattgtgaagcaaatgatgtttgcaactgggatttgaattgaaacatgtttcagagccaaaaaaaaaaaaaaaaaagccggccgatgtgtgaaaaaaaaaaaaaaaacccgcggcc

SEQ ID NO: 3428 - DNA, 1015 bp, Oryza sativa
  Clone ID: PAT_MRT4530_79077C.1
atgaggggactaggaaaccgtgcgcgcctaccggaaccacgaaattttcaatctctccccacaccgcaaaacgcgaaattttccacggcccccgcgcgcgggctccactccaccgaaaacccagccaaacgcgccagatccgcgcctcctccactcacacgcggatcgctccccgatccaacggcaggcgctgcccccccgcaccactcacgcggatcgctccccgatccgacggctgcccactcccctcccaactctatatatatccacccctcccaaaccaaccggcctccacatccaaatctcgccaccaaaaaaatccccaattccgccgtcgtcttcgtcgccgtcgccgcgaggatgtctgggcgcgggaagggagggaagggcctgggcaagggaggcgcgaagcgccaccggaaggtgctccgcgacaacatccaggggatcacgaagccggcgatccggaggctggcgaggaggggcggggtgaagcgcatctcggggctcatctacgaggagacccgcggggtgctcaagatcttcctcgagaacgtcatccgcgacgccgtcacctacaccgagcacgcccgccgcaagaccgtcaccgccatggacgtcgtctacgcgctcaagcgccagggccgcaccctctacggcttcggcggctaggctccccccaaatatttctctctcttcgtgtcgaggcgtcgcgtgttggttgccctgtgtagattgctgatttcaatgtagtacttagattctggcagtgaagaactgcaagtaaacttgtttgaaattcaccttgttgctattaatctaatgcaagtttttgcaattttttttggcggtcaattaaaaaaaaatcaattccaagtttgtcgatcatcttaggatgtcctcctagagaaaaagaagagaagaaaattgggagataaaaaaaaaaaaaaaaaaaaaaaaaaaaaaaaaaaaaaaaaaaaaaaaaaaaaagaaaaaaaaaaaaaaaaaagcggcc

SEQ ID NO: 3429 - DNA, 859 bp, Oryza sativa
  Clone ID: PAT_MRT4530_79079C.1
gactcctatagggcgattgggcattcacgagccggccgggaaaaaaaaacccgccaccaagagccacagcgatttcagatctccccaagtagtagacttctctcttcttccatctcggattcgtctcggtctcgtctcggtctccggcgatgtctgggcgcggcaagggaggcaaggggctgggcaagggcggggcgaagcgccaccgcaaggtgctccgcgacaacatccaggggatcaccaagccggcgatccggaggctggcgaggagggggggcgtgaagcgcatctccgggctcatctacgaggagacccgcggcgtgctcaagatcttcctcgagaacgtcatccgcgacgccgtcacctacacggagcacgcccgccgcaagaccgtcaccgccatggacgtcgtctacgcgctcaagcgccagggccgcaccctctacggcttcggcggctgagccctccggtcctccctcgccctcgcgctggccgcctctgccgccgccgcctcctggactggctgttgctggtgttttagctcttgttgtgtccttttgctttgctggtgtagagagacccggatgtgccacgggtgggtttttagtagtaggattagtagtatcccaactcctggttgtgatttgctcatttccatagatgtaatgacattacgatttcaatcgtagcaaaattatttgtttcctgctaaaaaaataaaaagttggttgacctgtgtagattgctgatttcaatgtagtacttagattctggcagtgaagaatgcaagtaaacttgtttgacattcaccttgttggtatcactctaacgcaagtttttgcaattttttttggcggtc

SEQ ID NO: 3430 - DNA, 867 bp, Oryza sativa
  unsure (1)..(867): unsure at all n locations
  Clone ID: PAT_MRT4530_79080C.1
nnttcgagcgccgggccgggaattccacacaaggcttcttccacatctccacccaaattccaaatctctcggtgatcggagcggttagctgcggcgatgtcggggcgcggcaagggaggcaaggggctgggcaagggcggcgcgaagcgccaccgcaaggtgctccgcgacaacatccaggggatcaccaagccggcgatccggaggctggcgaggaggggcggcgtcaagcgcatctccgggctcatctacgaggagacccgcggcgtgctcaagatcttcctcgagaacgtcatccgcgacgccgtcacctacaccgagcacgcccgccgcaagaccgtcaccgccatggacgtcgtctacgcgctcaagcgccagggccgcaccctctacggcttcggaggctagacgagtacagattcgatggtgttgggcgtagcagcgctagcattattatgtcgtgtgctccgtgtgtgtcgttgtgtctgtgactccttgtgttctagtcgtcggtgtgtttcatcaagtttcgacttctggtcgactggatgtaataccttgttctgttcaatgaaaccttgtttatgaccgaaaaaaaaaaaaaaaaaagcgggccgatgcgatgctttttcacgcgattggatagggattcgattagtgccatgttcttcagttcgtcgtagtagcctagcctcttctcctgtagctgttgtttcatctcgtctcctgttccttcattaattagggatgtatgaactactggttcgttcgttcgaatggaataggaaatctgcagtgatttaccctctaaattcagttgcaatctcttgccgtgctatgtgaacgttttgcaacctgcattgttct

SEQ ID NO: 3431 - DNA, 1063 bp, Oryza sativa
  unsure (1)..(1063): unsure at all n locations
  Clone ID: PAT_MRT4530_79083C.1
ggtccggnaatcnnncccgggccggccgggatctaaaccaaaaaaatccccaaatctcaaatcctcctccgtctccaagctctcgtcgtcgtcgtcagacatgtcgggccgtggcaagggaggcaaggggctgggcaagggaggcgcgaagaggcacaggaaggtgctgcgcgacaacatccaggggatcacgaagcccgcgatccggaggctggcgaggaggggcggcgtgaagcgcatctccgggctgatctacgaggagacccgcggcgtgctcaagatcttcctcgagaacgtcatccgcgacgccgtcacctacaccgagcacgcccgccgcaagaccgtcaccgccatggacgtcgtctacgcgctcaagcgccagggccgcaccctctacggcttcggcggctgattccttccttccttccttcctggtggcgtgcgggtggtggtggtggtgtaggagctagggtttcgatgggattcggggggaatttctgctttgtgttggcttctgtgtagcgactcttctgtttaaatgaattcgatgaatctgaactgaaaaaaaaaaaacaaaaagaggccctaataaaatatatatgtcttccctgatgccaatttagccgaaagtcgtgaaactgcctttctgatgaatcgaatttttgtttttttcaaaacatgctttggagccccgtcgagtgcctctttctgatctcgacggtgtattcggtgtttgctctcagcgcgttcacagttcccacacccggtccgggaagcacaggctttgcctaccccggcggcgtcgtcgacggggcgggcgtcagcttgttggccggcgcaggtcacattccggacttccccggctcctccttcaccgtgcgcggaacgcagacggcgcccgccggcggcggcgccacggcggtgaaaacgacggcggcgaggaggacgcaggcgacaagcggcggcgacgacgccatggcgacgagatggaggttgcaaaattgcagtggttgtgattaacgtgttactaataataatttgatggattttttcggacgcgtgg

SEQ ID NO: 3432 - DNA, 1050 bp, Oryza sativa
  Clone ID: PAT_MRT4530_79084C.1
ccggccggactcactgctcacaaccaccgaatccttccccaaaatccccaatcccccatctctttcacctccagcgagcgagcgcggcggccatgtcggggcgcggcaagggcggcaaggggctcggcaagggcggcgcgaagaggcatcgcaaggtgctccgcgacaacatccagggcatcaccaagccggcgatccggaggctggcgaggaggggcggcgtgaagcgcatctccgggctgatctacgaggagacccgcggcgtgctcaagatcttcctcgagaacgtcatccgcgacgccgtcacctacacggagcacgcccgccgcaagaccgtcaccgccatggacgtcgtctacgcgctcaagcgccagggccgcaccctctacggcttcggcggctgaggtccgccgctgcatccgcctggccgtggggacaagtcttggctcgcggtcaagaaatccgggaggatatctccaattgatctgggtctcagttagtagtagtagcagtagtttgtgttggcatcgttcttgtgcctggggcaagtttgctttcgtgttctgaacttgtgctgtgtaaatccgtatggtgttttagctattaacaaagttgggtcattcgctgcgaaaaaaaaaaaaaacatcgtcccttcttacttttttcctgcatgctttggagcttggtcgagtgccactttctgatctcggacgtttatttgttggctgttctttgccatgttcacagtccacagagccattgatttcagcacaggcgttcggagccgcggtggcaggggcgacgggctgctgcggcggcggcggcggctgtagcgccgcctgcggaggagcgggcgtcgtccagtagaagcctccggcgggggcggcgtcgaagccggcggcggcggcgaggtcgtccatcagaggacagtcgaagacccacgtggagccctccggggaggccatggctgcgggggggtggggccgctcaccgtggccggcgacggtggccggaggaggctagggtttcgaggtcgcgaggagatttgga

SEQ ID NO: 3433 - DNA, 2880 bp, Oryza sativa
  Clone ID: PAT_MRT4530_79184C.1
ggacccaaaactcacctaggatcccattgaaacgtaagaaaagaaaacaagaaacacattgcgtttgggcattacagtacgaaaatttgaagaacgcattgacaggcgaaggtatgccatctcaagctcttgaattgatttatgttttacaaagctgaccgtctcagattatgctcccggaggccggaattacatttataacatacacaataggggtagcaggtttataaagcattgcagtaggtagagtgaggacagaaataaatttttccactttgacgtcgaataagcgtagagcaatcaagtgttgaggttctggaacagctcaggcagatgggcgttcgtgagcttggtccggcgtgtgatctcacgctgcttcttcttaggcttagccttgggctgcaccccattgatctgtgctgcagcccgccgtttagctgtgttggtcatgggcttgatgccattcttctggagctccttctcgatatccaccatgtcccgcggtaactccatctcccggaagagctgcttcaggtcatcgtcgaccttgatctttgcctttgggtcgttaggatacacaatgtcctcctgggaatccatgttcgataacagccaaacttcacctgctgccttcagtgcctgcaaatcttccattacagttgggtacgcatccttgacttccaccacagcaagaccctccggatactttcttaccaaaacaagtagttgatcttttcccttcaaatcatgcttggacttgtaagagaaacgtctcccatcataatgtactttaggattgttcctcagactgtcaaagacagacttattcccatggatatcaacataagttgtttcatttatttgctccgcagtaaaagcttgtcttgtcggatcagctgcgctttccggttggtacgggtacggcggcgggcgggcggaggcgtcggaggaggaggggatgggggtagaggagaggagcgcggcgatcggatcggggattgtcaccggaggcttcgccccgccggcgagcacggggtgggtggaggcggcgggaggggggagagcgccgccgcggtcggcctcatcagcgtaggctggctcgaggatggcggcctcggcttcctgcacctccttctcagtcttccttcccttcttggacttgtagtagacgctcataaaggtaccgacggcaccatacttttggcggcaatgctcgtagtgagaagcatcaaacatcctccagaagtccttctcgttgagctcagatacagcgtactgtggctggtagctgtggttctcaatcagccactgctccagcctgtggacagctagagcgccattgaactcctcgcccctcaggacagcaccaggagcatagtacacaccaacatcggtgaacatctgggcatagctagtgtcaccttgcctgtggtggtgctcaaagccaggctctgggtacaccatggttttcacagggagcttgtagagccggtgcgggcacagccacagtggataaacctccatttccttgtgaacaaactcaagagcatctccaactttgtacaagggaaccagcatgtcttgaatcacatggttgtcatggtagtaattcctgatagattcaccctgtgtggccttgagcagagacacctttggtggcatcagccagcccaagaggaacctgaaccagaattggtcgccgaatggcaagatcagcttcccctcccagtacagacaccgggtgtgacggtggtagtactctcttgttggaatgtactccacaaactcacccttcttgagtgctgtctgagcatgttggtaaaaccaaggcttgaaccaccacccgacacagttgatcttattgcccttcttctttgcctcttctttggaagcataaacaccagtcatcatgacaccctcattttctgtgtacaccattccctcaacgaagtctgggacctttgcaggatcaccatctcgtggtgcaaacgaatcacaataaccttgtgctatctccttcagtgaccctttaactggagtatatgtgagcctcatgtattccttgatgggaatgagtttgatctcagcggaaacaagaaacccaagtgttccctgggaccagggaatgccatagaaaaggtcagagtactcattatccttagtggctctaacaactcgaccgtctgcaagaacaacttccacggcgacaacagtgtcagagaaaagaccatagaggtgagagctcccttcaataccatacccattgatcagtcccccaacagtaaggtcatcaagctcagcaacaactgcaagggcaaggttcattgggcatgtagctctggttatctggcccatgttgacaagaggctcaaccttggcaaccattctctctctgtcaatctcaagaatgttcctgaaggcggaaaggtcaacctcaaaatgcctagcacgcttgtagtctacattgcgcatgccaacagcaatccagggcttcctagctgtgcaaacaaggccatccttctttgggttcctctgcttgagccgcttcacaactttttgcacattgtcatcatgttccttctggcgacgtttctcagatttcatggcagaccagacatcgcccaaatagatattgaagtagatcagagcggaaatggggagcaccacaaagatcaccagaatccatcggaactttaccaagtagtccaccaaaaccttcttcctcttcggacgaacgaggggctcctgcagatctgccattcttcttaggcttagccttgggctgcaccccattgatctgtgctgaagcccgccgtttaatcttgtgttgttcatgggcttgatgccattttttaggagctcttttttgattttcacata

SEQ ID NO: 3434 - DNA, 2846 bp, Oryza sativa
  Clone ID: PAT_MRT4530_79187C.1
atggctagcatgcacgcacgcacgcacgcagcaaaacatgctcccacacggagacaccacagatctgttcaggcggggacctcagaaacctcacgggttcagctaaaccctccccaagaacccgaaccaaccaaacccccccaaatccctccctcgaaaaacaagccgctaccaacactaccactacgactacgactctacaccgcaagaacccggaagaaacgggactggatccgtcgatccgagcgggaagaaatcccctcaaggcaatctccggtggctcatgaagcggcggggaggagggagagaagacgagtggcatatatttttgctaaagttcacctcatctgatgctacagctcaaattaatagctgaggaaattaactagtccagtagccacaaaattattcagatcttgggttaaataccacttaagtcctgactaagttcagcaacttgatcaagggtgaaagaagtaccaagagcagacggacgacgatgacaggattacaaagtgctacaaacactgcacatcaagttctaagcaaaaggatagttcagatgaaaaatcccatttggaatggggagaaaacccggacgactaaaccatcaaaggtctcaacgaaattacgcctcatcagcgtaggctggctcgaggatggcggcctcggcttcctgcacctccttctcagtcttccttcccttcttggacttgtagtagacgctcataaaggtaccgacggcaccatacttttggcggcaatgctcgtagtgagaagcatcaaacatcctccagaagtccttctcgttgagctcagatacagcgtactgtggctggtagctgtggttctcaatcagccactgctccagcctgtggacagctagagcgccattgaactcctcgcccctcaggacagcaccaggagcatagtacacaccaacatcggtgaacatctgggcatagctagtgtcaccttgcctgtggtggtgctcaaagccaggctctgggtacaccatggttttcacagggagcttgtagagccggtgcgggcacagccacagtggataaacctccatttccttgtgaacaaactcaagagcatctccaactttgtacaagggaaccagcatgtcttgaatcacatggttgtcatggtagtaattcctgatagattcaccctgtgtggccttgagcagagacacctttggtggcatcagccagcccaagaggaacctgaaccagaattggtcgccgaatggcaagatcagcttcccctcccagtacagacaccgggtgtgacggtggtagtactctcttgttggaatgtactccacaaactcacccttcttgagtgctgtctgagcatgttggtaaaaccaaggcttgaaccaccacccgacacagttgatcttattgcccttcttctttgcctcttctttggaagcataaacaccagtcatcatgacaccctcattttctgtgtacaccattccctcaacgaagtctgggacctttgcaggatcaccatctcgtggtgcaaacgaatcacaataaccttgtgctatctccttcagtgaccctttaactggagtatatgtgagcctcatgtattccttgatgggaatgagtttgatctcagcggaaacaagaaacccaagtgttccctgggaccagggaatgccatagaaaaggtcagagtactcattatccttagtggctctaacaactcgaccgtctgcaagaacaacttccacggcgacaacagtgtcagagaaaagaccatagaggtgagagctcccttcaataccatacccattgatcagtcccccaacagtaaggtcatcaagctcagcaacaactgcaagggcaaggttcattgggcatgtagctctggttatctggcccatgttgacaagaggctcaaccttggcaaccattctctctctgtcaatctcaagaatgttcctgaaggcggaaaggtcaacctcaaaatgcctagcacgcttgtagtctacattgcgcatgccaacagcaatccagggcttcctagctgtgcaaacaaggccatccttctttgggttcctctgcttgagccgcttcacaactttttgcacattgtcatcatgttccttctggcgacgtttctcagatttcatggcagaccagacatcgcccaaatagatattgaagtagatcagagcggaaatggggagcaccacaaagatcaccagaatccatcggaactttaccaagtagtccaccaaaaccttcttcctcttcggacgaacgaggggctcctgcagatctgccatggctgcagtccggctcttgggcccgatccgaaccgggaaggaggaggaggaggaggccggcggcggctcggcggcagcgccgcgcgggcggagacggcgaggcgaggcgaggagctcggcctcactgcctctgctctggcgccgctggtcggggtggggagccggaggtggtggtggcggagtctggggacgggggactcaagggggatgggggactcaagtagtggagtggagcgcacagcgcaggggcggaaagggaaattccttttcggcgccacagcctccacgtgcctcctcaccgccgtggcctcccgctcattgtcgccccaatgatgctgccatagcacgggcgacgacctccctttcttcggcgtcagccacccctacctcgcactcaaggatcctccaccaccatccaccttcgcacggacatcatcgctgcggagagggagtgggccgggaggagctctgggatggccccagtgagagaagagggagagagggagaaagaggagaaagaggggggagaggg

SEQ ID NO: 3435 - DNA, 1540 bp, Oryza sativa
  Clone ID: PAT_MRT4530_79269C.1
gtcgctcgcctccgctgctggtgtcgagccgcttccgatccccccccctcccgacgcgaggccgaaaccctaccgccgatgacgtcatccggcgctcccccgccggcggcgatggccgtggacgacgcggaggacgaccagctcgcctccatgtccacggaggacatcgtccgtgcctcccgcctactcgacaacgagatccgcgtcctcaaggatgagctgcagcggaccaacttggagctggaatcgttcaaggagaagattaaggagaaccaggagaagattaagctcaacaagcagcttccctacctcgtcggcaacatcgttgagattctggaaatgaaccctgaggatgaagctgaggaggatggtgctaatattgatttagactcacaaaggaaaggaaaatgtgttgttctgaagacttccacaagacaaactatattccttcctgtggttgggctagttgaccctgataaactcaagcctggtgatttggttggagtaaacaaagacagctaccttatactggacacactgccatcagagtatgattcacgagtaaaggcaatggaggtggatgaaaaacccacagaggactacaatgatattggaggtcttgaaaagcagattcaagagcttgtggaggcaattgttttgccaatgacacacaaagatcggttccaaaagttgggcattcgcccccccaaaggagttcttttgtatggaccacctggaactgggaagacattgatggctcgtgcatgtgctgcacagacaaatgcgacgttcctgaaattagctggtccacaattagtccagatgtttatcggtgatggagcaaagctggttcgggatgcttttcagcttgctaaggagaaagctccctgcatcattttcattgatgagattgatgccattgggactaagaggtttgacagtgaggttagtggtgacagagaagttcagaggactatgttggaattgctgaaccaactcgatggatttagtagtgacgagcggataaaggtcatagcggcaacgaatcgtgctgacattcttgatcctgctttgatgcgatctggtcgtttggaccgaaagattgagtttcctcatccatctgaagaagcaagagctagaatcttgcaaattcactcaagaaaaatgaatgtaaacccagatgtgaattttgaagagctggctcgctcaacagatgacttcaatggagcgcaactgaaagctgtttgtgtcgaagctggtatgcttgcactgcggcgagatgctacagaggtgactcatgaggacttcaacgaaggcataatacaggtgcaggctaagaagaagtctagcctaaattattacgcttaacaagctatgctagaatcatcagggctctggagttgtttgtaaccatactgtttggataatcgaaaatatggcttcacgtttcatttgaggtataacttttttacactataaagtcatcacttgcttcttatgtgatggaaagttggaaaaaaaaaaaaaaaaaaaaaaaaaa

SEQ ID NO: 3436 - DNA, 1602 bp, Oryza sativa
  Clone ID: PAT_MRT4530_79285C.1
atggccggaggaggggcggcgccgccgccgaagcaggaggagttgcagcctcaccaggtgaaggaccagctgcccagcgtgtcctactgcatcaccagcccaccgccatggcctgaggccgtcatacttggattccagcactacattgtgatgctgggcacatcagtgattattcccagtgctcttgttccccagatgggaggtggaaatgaggagaaggctcgggtgattcagacgctgctgttcgttgccgggataaacaccctctgccaatcgttcttcgggactcgtcttccagctgtgatgggaggatcgtacaccattgttgcgccgacaatttccatcatattggctggccgctatagcaatgaagcagatcctcatgagaaattcttgcggacaatgcgaggaacacaaggtgctctcatcattgcatcgacaatccagatcatacttggtttcagtggtctctggcgcaatgtagttagacttcttagtccattgtctgctgttcctttgatctcacttgctggatttggcctctatgagcttggttttccaggggttgcaaagtgcgtggaaattgggctcccagaaatcattctactgcttgtattttctcagtatttaccccatgtcatacatgtggcaaagcccgtgttcgaccggtttgctgtgattttcaccattgctattgtgtggctgtatgcatacattctaactgctagtggcgcatacaagaatgcccggccgaagacacaagtgcactgtcgtgttgatcgctctggaattatcagtggagctccatggataagagttcctttcccttttcaatggggggctccaacatttgatgctggtgaatcttttgccatgatgatggcctcatttgttgctcttgtagagtcaactgggaccttcattgctgtgtcaagatatgcaagtgcgactatgatacctccatcagtgcttggtcgtggaattggttggcagggtattggtactttaataggtgcatttttcgggacagccaatggaactgctgtatcagtggaaaatgccggtttgctagctttgacacatgttggcagccggagagtagtgcaaatatctgctggcttcatgatcttcttttctatccttgggaaattcggagcaatctttgcgtcaattcccttaccaatattcgctgcactgtattgcatcttctttgcatatattggtgcctgtggtctgagcttccttcagttctgcaatctcaacagcttcaggaccaagttcattgtggggttctcgttcttcatgggcttatcggttcctcagtacttcaacgagtatacatcggttgccggttatggtccagtgcacaccggcgctcgatggttcaatgacatgataaatgtacccttcgcgtcaaagccgttcgtcgcagggctcattgcgtacttcctagacaacactatccagaggcgcgacaatggggtgaggagagacaggggataccactggtgggacaagttcaggagcttcaagacggacacccggagcgaggagttctactctctgccgttcaacttgaacaagttcttcccttccgtgtga

SEQ ID NO: 3437 - DNA, 2441 bp, Oryza sativa
  unsure (1)..(2441): unsure at all n locations
  Clone ID: PAT_MRT4530_79466C.1
tcccgggngtacgacccatcgccgtccgcccattaccacctccacctcgcgcactcagtctgtactacctgtacgtacgtggccgccgctagctaagctaggaattgaaatggggatggagaggccgcaagagaaggtggccaccaccaccaccgccgccttcaacctcgccgagtccggctacgccgaccgccccgacctcgacgacgacggccgcgagaagcgcacagggacgctggtgacggcgagcgcgcacataataacggcggtgatcggctccggcgtgctgtcgctggcgtgggcgatagcgcagctggggtgggtgatcgggccggccgtgctggtggcgttctcggtcataacctggttctgctccagcctcctcgccgactgctaccgatctcccgaccccgtccatggcaagcgcaactacacctacggccaagccgtcagggccaacctaggtgtggccaagtacaggctctgctcggtggcacagtacgtcaatctcgtcggcgtcaccattggctacaccatcactacggccatcagcatgggtgcgatcaaacggtccaactggttccatcgcaacggccacgacgcagcctgcttggcatctgacacgaccaacatgatcatatttgctggcatccaaatcctcctctcgcagctgccgaattttcacaaaatttggtggctctccattgtcgctgctgtcatgtcactggcctactcaaccattggccttggcctctccattgcaaaaattgcaggtggggcccaccccgaggcaaccctcacaggggtgactgttggagtggatgtgtctgcaagtgagaaaatctggagaacttttcagtcacttggtgacattgcctttgcatactcctactccaatgtcctcatagaaattcaggacacgctgcggtcgagcccggcggagaacgaggtgatgaagaaggcgtcgttcatcggagtctcgacgacgacgacgttctacatgctgtgcggcgtgctcggctacgcggcgttcggcaaccgcgcgccggggaacttcctcaccggcttcggcttctacgagcccttctggctcgtcgacgtcggcaacgtctgcatcgtcgtccacctcgtcggcgcctaccaggtcttctgccagcccatctaccagttcgccgaggcctgggcgcgctcgcggtggccggacagcgccttcgtcaacggcgagcgcgtgctccggctgccgctcggcgccggcgacttccccgtcagcgcgctccgcctcgtctggcgcacggcctacgtcgtgctcaccgccgtcgccgccatggcgttccccttcttcaacgacttcctcggcctcatcggcgccgtctccttctggccgctcaccgtctacttccccgtccagatgtacatgtctcaggccaaggtccggcgattctcgccgacgtggacgtggatgaacgtgctcagcctcgcctgcctcgtcgtctccctcctcgccgccgccggctccatccagggcctcatcaaatccgtcgcacattacaagccattcagcgtctcctcatgatcaaattaataattatttgttaatactgatgatgatgatgatatgatccatcgatcgatgaagaacaaatatatatatatagcgagatcgatcgatcgatcaagatcgtgaatgatatatataatacatagttaatcaatcagatgttaattaagtcgtgttcgtgcgtgtctttcagagttcagatcgacaggttgatttgagatgagtgctcaagtgtttcgtcagatgtaattaactatgtaagtggtaaatttagcctgatgatgatgatgatcagtctgaatggatgtcatgtaagtggtaaatttgacatgaatgtaacaaagtagtagcttagttgcagaatttcagtacaccaaacgaattaaatcacagtctcaacttcaataaaaagttaacagctagatgtaagtaaaccgggggatgacgcagcggcggcgagggagcgggcccaccgcgccccccgccccctcgcccctcgccgcgtcccgctcccccgccccccccgacccccaccccccccgccgcccgccgccagacgcgcgcaggtacccccgcgcccgcgcccgcgcacccaaccgaggcgctgccccgtgccggcgctgccccgcgggacagcgcggcacgcgcgggggctcggccattcggtccggccgccctgctggcgtccgccctggtgccgccccacgctccaccccgctcgctcccgagctcccgaccccccccaccccgtccgctgccacgcccacggccctgccggcaggccccaccgcggcgtggcctgggccaggcccggcccgctcccgcggcacgtccgtctcgtcggcgtcaccattggctacaccatcactacggccatcagcat

SEQ ID NO: 3438 - DNA, 1509 bp, Oryza sativa
  Clone ID: PAT_MRT4530_79467C.1
atggggatggagaggccgcaagagaaggtggccaccaccaccaccgccgccttcaacctcgccgagtccggctacgccgaccgccccgacctcgacgacgacggccgcgagaagcgcacagggacgctggtgacggcgagcgcgcacataataacggcggtgatcggctccggcgtgctgtcgctggcgtgggcgatagcgcagctggggtgggtgatcgggccggccgtgctggtggcgttctcggtcataacctggttctgctccagcctcctcgccgactgctaccgatctcccgaccccgtccatggcaagcgcaactacacctacggccaagccgtcagggccaacctaggtgtggccaagtacaggctctgctcggtggcacagtacgtcaatctcgtcggcgtcaccattggctacaccatcactacggccatcagcatggggtacctactgtctactatgactaattactctagtaaatttgggcatgcgatcaaacggtccaactggttccatcgcaacggccacgacgcagcctgcttggcatctgacacgaccaacatgatcatatttgctggcatccaaatcctcctctcgcagctgccgaattttcacaaaatttggtggctctccattgtcgctgctgtcatgtcactggcctactcaaccattggccttggcctctccattgcaaaaattgcaggtggggcccaccccgaggcaaccctcacaggggtgactgttggagtggatgtgtctgcaagtgagaaaatctggagaacttttcagtcacttggtgacattgcctttgcatactcctactccaatgtcctcatagaaattcaggacacgctgcggtcgagcccggcggagaacgaggtgatgaagaaggcgtcgttcatcggagtctcgacgacgacgacgttctacatgctgtgcggcgtgctcggctacgcggcgttcggcaaccgcgcgccggggaacttcctcaccggcttcggcttctacgagcccttctggctcgtcgacgtcggcaacgtctgcatcgtcgtccacctcgtcggcgcctaccaggtcttctgccagcccatctaccagttcgccgaggcctgggcgcgctcgcggtggccggacagcgccttcgtcaacggcgagcgcgtgctccggctgccgctcggcgccggcgacttccccgtcagcgcgctccgcctcgtctggcgcacggcctacgtcgtgctcaccgccgtcgccgccatggcgttccccttcttcaacgacttcctcggcctcatcggcgccgtctccttctggccgctcaccgtctacttccccgtccagatgtacatgtctcaggccaaggtccggcgattctcgccgacgtggacgtggatgaacgtgctcagcctcgcctgcctcgtcgtctccctcctcgccgccgccggctccatccagggcctcatcaaatccgtcgcacattacaagccattcagcgtctcctcatga

SEQ ID NO: 3439 - DNA, 2436 bp, Oryza sativa
  Clone ID: PAT_MRT4530_79494C.1
ttccacatttcctctagaatgtctgtcgtctattaacagcagcccgccatggccacgctgcaaagcgctgtggtgtttgctgatgccgccgacaccgtcgccgccgaccggccgttgtccggcagccagaggctgctggtgtccagccgtggcaagttcgcgctcggtttcttccagccagagaactcaatacattggtacattggcatctggtacaaccaaatctccaagcacacgccggtctgggttgcaaacaggggctctccaatctcgaatccggatacctcacagctaaccatagcaaccgacggcaacatggtattactcgacaattcaagaactgcaatttggtccacgaacatctccaagatcgcctccaactcaactgtcggtgttatcctcgacaccggtaaccttgtcctagcagacgcatcgaacacctccatcatccactggcagagcttcgaccatttcggcaatacctggctccccggcggcaagctcggccggaacaagctcgccggcgtgagcactggtctggtcgcatggaaggcacgcaatgacccagcccccggcgtgttctccctcgagctggacccgaacggcacgagccaatacctgctcgaatggaacagtacacagcagtagtggacaagcggcaactggaccggccgcatcttcaccggcgtgccggagatgacgccgaccggcatctacccgaactcgctgtacaccttcgactacgtcaatggcgagaacgggagctacttcgtgtacgatctcaaggacgactcggtcctcacgaggttcgtcttgggcgagatggggcagatccagttcttgacatggatgaacggcgccaacgactggatgctgttctggtcgcagcccaaagcgcagtgcgacgtgtactcgttgtgtgggccgttcagtgtctgcaccgagaatgcaatggcaccttgtagctgcctccgtggcttcggtgagcaaaacgttggcgaatggttgcagggagatcacacttcagggtgcagaagaaacgtggagctgcagtgcagcagcaatggctcggtggtaggaaggagtactgatcggttctacacgatgggcaatgtaagattaccaagcgatgcagagagtgtggtggccacaagtactgatcagtgtgagcaagcatgcctaagaagttgttcttgcactgcttactcctacaacggcagctgctcactgtggcatggagacctcatcaacctgcaggatgtgtctgccatcggtagccaaggaagcaacgctgttttgattcgcttggctgcttcagaattgtctagccagaagcagaagcatgccaagaagttgatcactattgccattgttgctactattgttgcagcactcatggtagctgccttggttgtcatcttgagaagaagaatggtaaagggaacgacacaagtggaaggttccttgatatcattcacataccgtgacctgaaatctatgacaaaaaatttctctgaaaaactcgggggaggtgcattcggttcagtgttcaaagggtcgttgcctgatgcgaccatggtggccgtgaagaagctcgaaggttttcatcagggcgagaagcagtttcgcgcagaggtgagcacaatcggcaacatccaacacgtcaacctgattcgattgctcgggttttgttcggagaaatcgcgacgactactcgtctacgagtacatgccaaatggttcactggacaagcaactttttgacggcagaaaacatgtcctgagctgggacacgaggtaccagattgctcttggaatcgcaaggggattagactatctccacgagaaatgcagggattgcatcatacactgcgacatcaagccagagaacatactgctggatggctcgtttgctcccaaggtcgccgacttcggcctcgccaagctcatgggccgcgacatcagccgcgtgctgaccacggcgaggggcacggtggggtacatcgagccggagtggctcgccggcacggctgtgacggcgaaggcggacgtgttcagctacggcatgacgctgctcgagatcgtgtcggggaggaggaacgtggagcggagggaggacggcaccgcggacattctcccgttgctggcggcgagcaggctcgtcggcggcgtcggcgacggccgccgggaggagctggtcagcgccgtggtggacggccggctcggcggcgacgccgacatgggcgaggcggagagagcatgcagggtggcgttctggtgcatccaggacgacgagaacgcgaggccggccatggcgacggtggtgcaggtgctcgaagggctcgtggagatcggcgtcccgccgattccgagatcacttcaactccttgccgatgaatcgaattatttgcagttctccgatttattaccgtcgaag

SEQ ID NO: 3440 - DNA, 2152 bp, Oryza sativa
  Clone ID: PAT_MRT4530_80152C.1
atgtctctccagggagggtttgtcaagacccagaagacccatgcctacttcaagcgattccaagtcaagttcaagagacggaggcagggcaagactgactacagggccaggattaggctcaccaaccaagataagaacaagtacaacacaccgaagtaccgcttcgttacaaacaaagatatcacagctcaaattgtctatgctaccattgcgggtgatatcgtgatggctgctgcctactcccatgagctgcctcgttatggtcttgaagttggtctcaccaactatgcggcagcttactgcactggcttgcttctggctcgtcgtgtgctcacgctccgtggtttggaccaggagtacgagggcaatgttgaggccactggggaggactactatgttgaaccagctgatgaaaggaggcctttccgtgctctcttggatgttggcctcattaggacaaccactggaaaccgtgtctttggtgccctcaagggagctttggattgtggtcaacggtcacccgagggtcttcacctgaagcaacacacatccaccgagtgacctggatacccagtgccctactgcagaagactggcctctttggaggagccgctttcctggcccttgatgctgctctcttctggcttgtttgccagatgctagctctcaatgcaaggtctgactatctggatgaggatgacaagggcgattatggccaggtttttgcttctgatgttgatggcacaaaggtctgaggctttgactgggcagggtttcatatttagtgtcacttagctatattatcttatcgacaaagctggttcgattagctctctaaaatctgtagatatgtgctatgccagttccaaagtcgaatatataagggtatttgctcattgcacgtttaagcttacgttgtgaaacaataacagtattttcagtatggtccgtctgttagtaatctccgtggagctaaaggacataaaaataaaaaaacaaaaaaaaagcacgggaggatgcggcacaggggttgttgaccgtgcgtcgctgggagggtttgtcaagacccagaagaccaatgcctaccacaagcgtttccaagtcaagttcaagagacggaggcagggcaagactgactacagggccaggattaggctcaccaaccaagataagaacaagtacaacacaccgaagtaccgcttcgttgtgagatttacaaacaaagatatcacagctcaaattgtctatgctaccattgctggtgatatcgtgatggctgctgcctactcccatgagctgcctcgctatggtcttgaagttggtctcaccaactatgcggcagcttattgcactggcttgcttttggctcgccgtgtgctcaagctccgtggtttggaccaggagtacgagggcaatattgaggccactggggaggactactatgttgaaccagctgatgaaaggcggcctttccgtgctctcttggatgttggcctcattaggacaaccactggaaaccgtgtctttggtgccctcaagggagctttggatggtggtcttgacattcctcacagtgacaagaggtttgctgggttcaagaaggacgagaagcagcttgattctgatattcaccgcaagtacatctacggtgggcacgtggctgactacatgaggtctatggcggaggaggaacctgagaaattccaagcccacttcagtgagtacctcaagaagggaattgatgctgatggcatggaagcactgtacaagaaggtccatgctgccatccgtgctgatccctaccatggccaaatcaaccaagaaggaaccggcgacccacaagagatacaacctcaagaagctaacctacgaacagaggaaggccagtcttgtcgaaagattgaatgctctcaactcctctgctggtgctgatgatgatgacgaggaagaggatgatgagtgaaagagtttagccttatcacagtagttccatctttatgctgccaaacaaactccatatggttaagttcacctgtatagtcttgcaagttgcaacaggcatttttgtttatgttcggaactccgctcaaagaacctatttctttcggtttttggttctcaacctggagtgtgagaagctgccgtttggata

SEQ ID NO: 3441 - DNA, 2829 bp, Oryza sativa
  Clone ID: PAT_MRT4530_80157C.1
ggctttatttggagtgtcacttacctgttttatcttgtcgtcaaagctggtgcgattagctctctaaaatctgtagatatgggctatgccagtggcaaagtcgtatatataagggtattcgctcatcgcacgtttgagggtcagatgtgattccactcgcgtcttatgggtaggtgccttctgttcggtatttcagtgctgtattagtgccaactttcagtctttcatgtgtgccattcgtcgaaaaaaaaaaaaaaaaaaaaaccggccgggaaaccctaaccattccttctcccctaccaggcaaatcgaccaacaccttctcccttctcctcgctcctccccctccgccgccgccgcagcggagcagcaacagcaggcgagcgacatgggagggtttgtcaagacccagaagacccatgcctacttcaagcgtttccaagtcaagttcaagagacggaggcagggcaagactgactacagggccaggattaggctcaccaaccaagataagaacaagtacaacacaccgaagtaccgcttcgttgtgagatttacaaacaaagatatcacagctcaaattgtctatgctaccattgcgggtgatatcgtgatggctgctgcctactcccatgagctgcctcgttatggtcttgaagttggtctcaccaactatgcggcagcttactgcactggcttgcttctggctcgtcgtgtgctcacgctccgtggtttggaccaggagtacgagggcaatgttgaggccactggggaggactactatgttgaaccagctgatgaaaggaggcctttccgtgctctcttggatgttggcctcattaggacaaccactggaaaccgtgtctttggtgccctcaagggagctttggatggtggtcttgacattcctcacagtgacaagaggtttgctgggttcaagaaggacgagaagcagcttgattctgatattcaccgcaagtacatctacggtgggcacgtggctgactacatgaggtctatggctgaggaggaacctgagaaattccaagcccactttagtgagtacctcaagaagggaattgacgctgatggcatggaatcactgtacaagaaggtccatgctgccatccgcgccgatcctaccatggccaaatcgaccaagaaggaaccggctacccacaagagatacaacctcaagaagctgacctacgagcagaggaaggccagtctcgtcgaaagattgaatgctctcaactcctccgctggtgctgatgatgatgacgaggaagaggatgacgagtgagagagtagccttatcacagtagtttcatcttatgctgccaaacaaactccatatggcatttaagtttacctgtagtcttgcaatttgcaacaggcatttttgtttatgttctgcactctgctcaaagaacctatttctttcggtttttgattctcaaccttgagctatcagttatcttatttatgtgagaagctgccgtttggatattgatataattgtgttctgcctgcctcttcaaaaaaaaaaaaaaaacgcggcctgctccggttacttgtgttaaccaccatcttttggcatgccgctgtcttctatccatacaagagcaagtctgttcctcgcggagcattatttcgaagcgccagcttatctgcgttcttcgttattgctgagcttgtctcagctctggcgtttgcaatgttgctctgggcaacggtcaccgagggtcttcaccgaagcaacaacatccaccatgacctggatacccagtgccctactgcgaagactggcctctttggaggagccgctttcctggcccttgatgctgctctcttctggcttgtttgccagatgctagctctcaatgcaaggtctgactatctggatgaggatgacaagggcgattatggccaggtttttgcttctgatgttgatggcacaaaggtctgaggctttgactgggcagggtttcatatttagtgtcacttagctatattatcttatcgacaaagctggttcgattagctctctaaaatctgtagatatgtgctatgccagttgcaaagtcgtatatataagggtatttgctcattgcacgtttaagcttacgttgtgaaacaataacagtattctcagtatggtccgtctgttagtaatctccgtgaagctaagtgtcctactattaatttttctggtgttactctgtgtttttctgtgacgctgattcttgaagtataaatctaccattgtgggaggtatcaccgcaagtacatctacggtgggcacgtggctgactacatgaggtctatggctgaggaggaacctgagaaattccaagcccactttagtgagtacctcaagaagggaattgacgctgatggcatggaatccctgtacaagaaggtccatgctgccatccgcgctgatcctaccatggccaaatcgaccaagaaggaaccggctacccacaagagatacaacctcaagaagctaacctacgagcagaggaaggccagtctcgtcgaaagattgaatgctctcaactcctcagctggtgctgatgatgatgacgaggaagaggatgacgagtgagagagtagccttatcccagtagtttcatcttatgctgccaaacaaactccttatggcatttaagtttacctgtagtcttgcaatttgcaacaggcatttttgtttatgttctgcactctgctcaaagaacctatttctttcggtttttgattctcaaaaaaaaaaaaaaaaaaaaaaaaaaaaaaaaaaacaataaaaaaaaaaaaaaaaaagcggcc

SEQ ID NO: 3442 - DNA, 466 bp, Oryza sativa
  Clone ID: PAT_MRT4530_80270C.1
cacccagtaaatttttttttcccccatttttttttggggggaaaatttctttttacttgcgggggggcaactaggaaaaacccccccccaactaaagagggtaaaccggaccaaagggggtggtaaatctacaaattttacagggtagtcggaccacatcaccctgggtcactcactagggttcatccggacagaacaacccatttttcccgaacctttatcaaaaggtcctcctggtttttaggccttggggaggccccatctgatgttcggaaaaatataggccctatcaacacctaattagcagcagccaaactttacaaaccaaaagctggccttctctctttgggtgaacattttacaggtattctcctaatcaaccatcccattttcattttttggccctgttaatcttcctccatggttctgctcggtgggtgacccaggggaaaagggcacaaacccg

SEQ ID NO: 3443 - DNA, 1982 bp, Oryza sativa
  Clone ID: PAT_MRT4530_804C.1
tggctttgctccctgttttttttttttttttttttttttttttgaacacatgaacagattggaatggattcattttaattcgtctttgccgagacatcaaagacgaaacagcaaagcaccggagaagaagagagtgggcccccccatccatcgacaagcagagagcaggacaggctggcatttgtcctcgcctttcgtctctcccaaagcccacagagcctggcactgggccccacccccacatcacacactctcgcgcttaattaccatttaccaccactaatcactccttgatctggctaattaagttaagccatcgctgctaatgacttagcacttgttggtggtgaagccgacggtggacttggccgtgtcgaagctgacgcgggtcccctgctgctgcacgttcccgatgatggacaccgccgcgttcgtcggcgcgaacgccaggcagtacgtccccgcgccgtccaccgggatcaggtagttcttcgccggcagccggagctcgccgccgccggcgaaccgcagcgacaccgcggggacctccacgctcgtccggtccgacaggtcgtagcacgtgtcgaacagcgacacgccggaggtgcgcggcagcgactgggtgccccggacgaacgcgtcgcgcagcgccgcgtacgccgacgactgcagccgcgtcaccgccgtgccggagtccacgatgacgccgccggcgcccgtgctgtccatggcgaacgccgagggtgggatggagaggatctggccaccgacggagaggcccgagaggcccacgtagtagaacgtgctcgtccgcgggctgcggatcagcggcgccgtcacctccgcgtcggcggcgtcgccgaactggagggttgacgaggagggggagtcacggtcgacgaggcagtaggagaaggtggtggcggagatctgggacgggaaggagagtggcccgccgccgagggcaagcagccccgccgcgccgacgaacagcccctcgttgtcgtggccgcagcctatggcgacgctggagaccggggcggagtcgccgagcgtgagcgtctcggtggcgaagtcgccgacggtgtaggagccgtcgccgtacgcgacctcgtagaggcaggcgccggtggagttgcggcaggcggcggcgtcgaggtcgtggcagcgcgggttgtcgcaggcgacggaggcgtaggaggtggagagggaagggtcgaacaccgggtcggactgctggtagcagtcggcgcacggctggcattgcacccaggtgacgtcgctgccggtgtcgagcaccatgtacagctgccgcgcggggctgccgacgccgacgcgggagaagtactcgccgctgccgagcccaaccccggacaccacggggccctgtatctccgccgccgacgcctcgaacgccgtgacgttggccggcaccaggtcgaaccgactcaccccgtccgccgccatcgccgcgcgggccgacaccgcggcggcgcgggcggagtcgcggcggaggcgagccagcacgagtgacctgtagctggcgtgccgctgccgcccctgctcctccggcaagaagtcccgggagtggagccgcagggccaggcgcccctcctcgtgctcctccccgacgacctccgtggacacggcggcggcggcggactggtggagcggcacggcctccgcggataccgcggcccgcgcccgggacagcgacgcggcgacgtcgagcgtctcggtggcgagcggcggcgaggcgtggcggcgggagagaaccggccgtggcgaggcggcggcgaggaggaggaggaggaggagaagcgggaggaggatgggaggctgcattgctgctgatgctgccgtgcagctggatggagtgaggagagtgaaggggaatttaaggggagaggagacgaagttgcagtggtcagtcaaggtgaatgaaggaatggaatggatcacgtcattcttcttctttcttc

SEQ ID NO: 3444 - DNA, 3123 bp, Oryza sativa
  Clone ID: PAT_MRT4530_81538C.1
atggtgagcggcaacctcttccactgccggaggaactcgtggccggccgaggagtacgtcggccgaaccgccctgcagttgttggacttcgacggcgggtcgcctccggagcaggcatggcggcggcgtctgaacagccacgccaacttactcaaggaattcagcgtcaccttcatggaagcaatgaggatgatgagccttggcctgaggctatggtcgtatgtccgagaggaggcttctcatggaaggaaagctccaattgatccgtttaccaaagagaaatgtaagccgtctgcttcgcagggcgtaccgcttggtgggatggggagtggtagcatttcaagaggtttcaggggagagttcaagaattggcatatcattcctggtttatgtgagacttccccgatatttgtatctcgcgatggggggaacaaaaagtactcatcggtattgtctcccggacaccatgaaggtttaaagaaatgtaatgactctggaatttcttcatgggactggaacttgagcggtcaacattctacctatcatgctttatttcctagggcatggactgtttatgatggtgaaccggatccagaccttaaaatctcatgtcgtcagatatcaccattcattcctcatgattacaaagatagcagcctcccaacttctgtctttgtgtacactctagtgaacactgggaaagaccgtgcgaaagtgagcctgttaatgacatgggcgaattctatcggaggtttttctcatcactctggaggccattttaatgagcccttcataacagcaaaggataatcctccggttacttttgctattgctgcctgtgaaactcagaatgtgaatgtgacagtcttgcctgtatttggcctctctggagaaggccatgattcagccaagcaaatgtgggatagaatgaaacagaacggccactttgaccgtgaaaatttcgaagctggtaccagtatgccttcatcttcaggggagacactttgtgcagctgtctcagcatcaacctgggtagagccacatggtagatgtactgttgtatttggtttggcttggtcctctcctaaaataaagtttcagaagggctgcacatacaacaggaggtacactgaattttatggaacttctgaaagatcagctgttaatttggtacacgatgccttgacaaaatataggatttgggaagaggagattgagaagtggcaaaaccccatactcaagaatgaaaaacttccagaatggtacaagttcacactttttaatgagctttactttctggtagctgggggtactgtttggacagatggccaaccaccagttatcgatgaaaaaccaagtcctggttctaatcaacagaaatcttcaaaaaggggcactagagacactaaacaggaatcagttaaagataaccatgtcaaactgacagcagagcaagtcactaatggtggtgacctggctaatggcgaagagcaaagtgtgtcaaagtatgcagcagtacatggaccacaaatggctaaggcaaccaacggacttgggtcacaagagccaattccatacttgctttccaagaatggccctgaaaatgttggcaaatttttgtacctggaaggagtggaatacatcatgtggtgcacctatgatgtgcatttctatgcttcttttgctctgcttgatctgtttcccaaaatagagttgagtatccaacgtgattttgccaatgctgttctctatgaagacagacgaagaatgaaatttttggctgatggtacttctggaattcgcaaggtcaaaggtgccgttccgcatgacctaggaacacatgatccatggcatgaaatgaatgcgtacaacatacatgatacaagcaaatggaaagatctaaatccaaagtttgtgctccaggtatacagagacttcgctgctacaggtgatatgtcatttggtagagatgtttggcctgccgtctgtgcagtgatggactatatgaatcaatttgaccgtgacggtgatggtctcattgagaatgatgggtttcctgatcaaacctatgatgcttggactgtacacggaattagtgcttactgtggcggtctctggcttgctgcacttcaggctgcagctacaatggctcatcggcttggtgatcggccatttgctgaaaaatacaagctcaaattcatacaagcgaaagcagtatatgaggctaagttatggaatgggtcttacttcaattatgacagtggcacaagcagtaatagccgatctattcaggcggatcagctggcagggcagtggtatgctgcttcttcaggcttgcccccgcttttcgatgagaataaaataagaagtgctctgcagaaaatatttgaattcaatgtaatgaaggttaaaggaggacgattgggagctgtaaatggtatgactcctaatgggaaagtggatgagacatgcatgcaatctcgggaaatctggaccggtgttacatacggtgttgctgcaaacatgctgctccatggaatggagcatcaaggattcaccactgccgaaggaatttttattgctggttggtcagaagaaggatatgggtattggttccaaacaccggaaggctggaccatagacgggcactacaggtcgctcatctacatgcggcctctcgccatttgggcaatgcaatgggcacgttctccacccaaggcaatccttgatgcccccaaggtaaacctgatggacaggatacacctatccccacaaatgatccgggcaatgaacgagattaatgttagaaagatagcacccgacaatagatgtttccctagctctgcatttcgttgtgaatgctgaccacaaaaaaaaaagagaagcaaaatgcaacaactgagtagtaacatacatatatatactttccttttcggcttttccttggccccttacaagtttcagtggggttcatggggttttccttgaaatcagagggcatataaatctacggaaccactaagctcagtagctcacactctcacagctcgaaaagagctcttgttgtataattgtacagtaaactacaaaatcatatcgtcagcatcatctttgctctgcgtc

SEQ ID NO: 3445 - DNA, 1349 bp, Oryza sativa
  Clone ID: PAT_MRT4530_81540C.1
aatataggatttgggaagaggagattgagaagtggcaaaaccccatactcaagaatgaaaaacttccagaatggtacaagttcacactttttaatgagctttactttctggtagctgggggtactgtttggacagatggccaaccaccagttatcgatgaaaaaccaagtcctggttctaatcaacagaaatcttcaaaaaggggcactagagacactaaacaggaatcagttaaagataaccatgtcaaactgacagcagagcaagtcactaatggtggtgacctggctaatggcgaagagcaaagtgtgtcaaagtatgcagcagtacatggaccacaaatggctaaggcaaccaacggacttgggtcacaagagccaattccatacttgctttccaagaatggccctgaaaatgttggcaaatttttgtacctggaaggagtggaatacatcatgtggtgcacctatgatgtgcatttctatgcttcttttgctctgcttgatctgtttcccaaaatagagttgagtatccaacgtgattttgccaatgctgttctctatgaagacagacgaagaatgaaatttttggctgatggtacttctggaattcgcaaggctgcagctacaatggctcatcggcttggtgatcggccatttgctgaaaaatacaagctcaaattcatacaagcgaaagcagtatatgaggctaagttatggaatgggtcttacttcaattatgacagtggcacaagcagtaatagccgatctattcaggcggatcagctggcagggcagtggtatgctgcttcttcaggcttgcccccgcttttcgatgagaataaaataagaagtgctctgcagaaaatatttgaattcaatgtaatgaaggttaaaggaggacgattgggagctgtaaatggtatgactcctaatgggaaagtggatgagacatgcatgcaatctcgggaaatctggaccggtgttacatacggtgttgctgcaaacatgctgctccatggaatggagcatcaaggattcaccactgccgaaggaatttttattgctggttggtcagaagaaggatatgggtattggttccaaacaccggaaggctggaccatagacgggcactacaggtcgctcatctacatgcggcctctcgccatttgggcaatgcaatgggcacgttctccacccaaggcaatccttgatgcccccaaggtaaacctgatggacaggatacacctatccccacaaatgatccgggcaatgaacgagattaatgttagaaagatagcacccgacaatagatgtttccctagctctgcatttcgttgtgaatgctga

SEQ ID NO: 3446 - DNA, 297 bp, Oryza sativa
  Clone ID: PAT_MRT4530_81543C.1
atgagccttggcctgaggctatggtcgtatgtccgagaggaggcttctcatggaaggaaagctccaattgatccgtttaccaaagagaaatgtaagccgtctgcttcgcagggcgtaccgcttggtgggatggggagtggtagcatttcaagaggtttcaggggagagttcaagaattggcatatcattcctggtttatgtgagacttccccggtcatggagaaccagttttcagtaatgctttcttcttctttctgctgttgctggttaatcaacttggtttatggtgatgcataa

SEQ ID NO: 3447 - DNA, 1992 bp, Oryza sativa
  Clone ID: PAT_MRT4530_81921C.1
gcacgaggccaaacctgaaacgccatccacccccccgcgccaggctcccccttctccctcctctccgcctcctcccatccacatccgcggccgcgccgatcgcacagctttgtgcggtcggggtggtctcggtgccgatggcgaggaagcagcatatcgccatattcaccacggcgagcctgccatggatgactggaactgccgtcaaccccctcttccgagcggcctacctcgcgaaggccggggactgggaggttacgctggtggttccatggctttcgaagggggaccagctgctggtttatcctaacaagatgaaattcagtgtgcccggggagcaagaaggctatgtgcgacggtggctcgaggagcgaattgggctgctgccgaagtttgagataaaattctatcctggaaagttctcaacggagaaaagaagcattctacctgctggggacatcacccagactgtatctgatgataaagcagacattgcagttcttgaagagccagagcatcttacatggtaccatcatggacgaaggtggaaaaacaaattcagaaaagttataggtgttgttcataccaactatttggagtatgtcaagagagagagaaatggatatatccatgcatttctcttaaaacatatcaattcctgggtcactgacatctactgccataaggttataagattatcagcagcaactcaggaagtcccaaggtcaatagtttgcaatgtccatggagtaaatccaaaatttattgaaattggtaaactgaagcatcagcagatatctcaaagagaacaagcattcttcaagggtgcatattatattggaaagatggtctggagtaaaggttatacagaactactccagctgcttcagaagcaccagaaggaattatctggtcttaagatggagctgtatggcagtggagaagattctgatgaggttaaagcatcagccgagaaactaaatcttgatgttcgagtctatcctggtcgtgaccatggagattccatatttcatgactacaaggttttcataaacccaagcaccacagatgtggtatgcacgacaactgcagaagctttggcgatggggaaaattgtgatatgtgcaaaccatccttcgaatgaattcttcaaaaggtttcctaactgccacatgtacaatactgagaaagagtttgtgagattgactatgaaagcattggctgaagagccaatcccactgtcagaggaactgagacatgagctttcctgggaggcagcaacagagagatttgtcagggttgctgatattgcaccaatcatgtctatcaagcagcattctccctctccccagtatttcatgtatatatctccagatgaactgaagaagaacatggaggaggcgtcggcattttttcataatgcgatttctgggtttgaaacggcccgttgtgtttttggtgccataccgaatactctgcagcctgatgaacagcaatgcaaggaacttggctggaggctccaggaatgacagtcatttcttcccacgctgttgtcaatgacaatagaatgccaactaacagcccagggaacttggcttggggaactaactacgtaacgcaattatcttttgctccaaaactacgaaggactgaacagacaagggtgattcttgttttctgctatggtggtacactggtattgcaattctccttcacaattgtggagtgtccatcagacatcagttactgtaatgcatcatatcttggaattgtaaatgtgcggcagttgaagtgattaccaatgctgtcttttcatgtagcctgtgtaatgtaaagcttactgttgcttcccgagtttggcacaattttaaagatatcttgtctggtgtttcacaaccaaaaaaaaaaaaaaaaaaaaaaaaaaaaaaaaaaaaaacctgatcattgtatccgtgtgaagggggcgtaacacatacatgacaacatcataaa

SEQ ID NO: 3448 - DNA, 1464 bp, Oryza sativa
  Clone ID: PAT_MRT4530_82365C.1
tcacattgcatgatcctcgaggttcagtaaccaaccatatggccttgcttctggtttcatgattgaatcgtcaggatttttggagtttgtcaagatctcacctagaggtccaccttgaggcatctcccaagaacttgagatgctatcctcttgcatttgtgccatattaggtgcatggcagctgacgcgtgggtcctctggcgaggaatagaaagttgatggaactgtcatgacattggaatctttgcttttctgaaactccattttctcgtccttaggcaagctgaaattctgaaggactgactgaaggcatccacgatcatgcatcttggtgaaaggaatgcttttgttgttctgctggttgctgctctcccaaggcttcaacatggtatttgaagaaatcgattcactgtctcctgctgtattgaacttctccggtttgttctgttgcttcaactgagagaacagggacaatgttggctgttgattcgttaaatttagcagtgggccattgttttcttcagcagctttgtttcctttctctttgttcgccattgtcctgttcaaactatctgtccaatagctgatactgcgtggcttcatttcattaacttttgccttcttgaagctgccctgcccgacagaagatggcaatgagccagcacacggtgtctctttcacagtctttctactttggttttccacaggctttcttgaacggtggcggtttctgttgatgtgcctctcacaatacttgtggtcggccatggcctcctttgaacaccgccatttcttgccatctgttcgacggcatcttccaggttctgggtcagagtctgcatttgggaagccttgatagagaggcctccagctcattctgttagctgatgatctgaagcttttgctgattgaaatgagcaggctggaaggtataggggcctttgcattgagatacttgtaaatgagagcctggtgctccagctccatccactgtgagggagtgaaaggcctcttggtcctagacaacaagaacctctgctcattttccctcccaaaatccaaacctgatggcaatgtgtgagcagccttggcgaatctgagcatcttctgttcatcaagaaagggggaagggtatgatgcagcagcagcctgggtgaagctaccagcagcagctctcttgatgaggctcagatcaccctccttggtggatggcactgtgagtccttgcaagcccaacacctctccaagctccatggcagcagcagagaagtcagcaaacatcttggaaggacaggaggaggggagaggaggaagaagaagaagaagaggagggggtgagcattgctggggacagtcacagtgaggctgaggttgagagtgaggcagggtgtagtgtgtgctttctagtaggaggcaggaagtgtgtggtgatatattatgggatcctcgtgccgaattcctgca

SEQ ID NO: 3449 - DNA, 2259 bp, Oryza sativa
  Clone ID: PAT_MRT4530_82807C.1
tggatccccgggctgaggacgccccgcgggcctttctccacctcggtggtcataagctaagacagctatcgcgcgccgtcccaccaccagcttgctccactacgcggaccaccgcgcgcgagcagagcatctcctcactctctagcttgctccagtttcgcgtagctgcgtgacagttcaattgaactctctggattcgttggttacttcgtctgagctgctgcagcgttgaggaggaggaggagcaatggcgctcacgacgttctccatttcgagaggaggcttcgtcggcgcgctgccgcaggaggggcatttcgctccggcggcggcggagctcagtctccacaagctccagagcaggccacacaaggctaggcggaggtcgtcgtcgagcatctcggcgtcgctgtccacggagagggaggcggcggagtaccactcgcagcggccaccgacgccgctgctggacacggtcaactaccccatccacatgaagaacctgtccctcaaggagctccagcagctcgccgacgagctccgctccgacgtcatcttccacgtctccaagaccgggggacatctcgggtccagcctcggcgtcgtcgagctcaccgtcgcgctccactacgtgttcaacacgcctcaggacaagatcctctgggacgtcggccaccagtcgtaccctcacaagattctgaccgggcggcgcgacaagatgccgacgatgcgtcagaccaacggctttgtcgggattcaccaagcggtcggagagcgagtacgactccttcggcaccggccacagctccaccaccatctccgccgccctcgggatggcggtggggagggatctcaagggagggaagaacaacgtggtggcggtgatcggcgacggcgccatgacggccgggcaggcgtacgaggcgatgaataacgcggggtatctcgactccgatatgatcgtgattctcaacgacaacaagcaggtgtcgctgccgacggcgacgctcgacgggccggcgccgccggtgggcgcgctcagcagcgccctcagcaagctgcagtccagccgcccactcagggagctcagggaggtggcaaagggcgtgacgaagcaaatcggagggtcggtgcacgagctggcggcgaaggtggacgagtacgcccgcggcatgatcagcggctccggctcgacgctcttcgaggagctcggcctctactacatcggccccgtcgacggccacaacatcgacgacctcatcaccatcctccgcgaggtcaagagcaccaagaccacaggcccggtgctcatccacgtcgtcaccgagaaaggccgcggctacccctacgccgagcgcgccgccgacaagtaccacggcgtggcgaagttcgatccggcgacggggaagcagttcaagtcgccggcgaagacgctgtcgtacacgaactacttcgcggaggcgctcatcgccgaggcggagcaggacaacagggtcgtggccatccacgcggccatggggggaggcacggggctcaactacttcctccgccgcttcccgaaccggtgcttcgacgtcgggatcgccgagcagcacgccgtcacgttcgccgccggcctcgcctgcgagggcctcaagccgttctgcgccatctactcctccttcctgcagagaggctacgaccaggtggtgcacgacgtggacctccagaagctgccggtgaggttcgccatggacagggccgggctcgtgggcgccgacgggccgacgcactgcggcgcgttcgacgtcacctacatggcgtgcctgccgaacatggtcgtcatggccccgtccgacgaggcggagctctgccacatggtcgccaccgccgcggccatcgacgaccgcccctcctgcttccgctacccaagaggcaacggcatcggcgtcccgctaccacccaactacaaaggcgttcccctcgaggtaggcaaagggagggtactgctggagggcgagagggtggcgctgcttgggtacggttcggcggtgcagtactgcctcgccgcagcgtcgctggtggagcggcacggcctcaaggtgaccgtcgccgacgcgaggttctgcaagccgctggaccaaacgctcatcaggaggctggccagctcccacgaggtgctcctcaccgtcgaggaaggctccatcggcgggttcggctcccacgtcgcgcagttcatggccctcgacggcctcctcgacggcaaactcaagtggcggccgc

SEQ ID NO: 3450 - DNA, 2905 bp, Oryza sativa
  unsure (1)..(2905): unsure at all n locations
  Clone ID: PAT_MRT4530_83072C.1
cacccaagggaagagccaagagccacatcttcattgcagcataggtaagccnacccgggacaaaggggaagacatgatcngcgggcctcccagcaggaataacaggggaggggacaaccacggcagcagccaacacattatctgagagcaacgcatagtgatagagcgggggatcggccaaccccgcgacaggggggaacccgcgaccgccggagcgggataangagcacgcagcggcaagccgcagcggaaggcaangaagcacccaggaaacgggggggggtttttttttttttttttcttttgaaagatgacgattataacatttaacattataaaaaaatttagagcacttcacacatacaaatacaatgcaagatattagactgccaaatttcaaaatccagaagcattgtttaatttattcattattgaattaaatataatattccagtttaaaagatagtaagaattgatcgcaactgattgtcgcaaaaaaggggataatatattcagttccaaatgactaaaactgatcccaaattatggttactacatagtcaaaagaaagaaggctgcggaagacggatcgatgatggccatgactgtacttgaaacaggacatataccaccataccggcctgaaaacacacgcagaaccttaaacgagtacctcattttcaaataagtcaggcaacctaaactgactttaagctctccaattacatccataaacagccggccgagaagtactttcatttgcaagaagatccaactattggcataacaatgtcctcaagcaacggtatcaaaaaccaaagaaaccaagctcagttgccctctctttctcgaatgtctcgaagtactggtagatgatagtaacagcaagcagaataccagttcctgaaccaatagcacccatgaaatcagctagaacagtcaatgcaccaatgcacactccaccaaatgcagcggcagtggggatgtatctgttcaattccttctgcaagtttgactcacgatggccaggcatcaccatttgctgttccttcagctgtttagcaacatcctttgcagatgagccagatacttcaatccatgtctttgagaagagagcacaagctgacagcatgaagaccacatagaacaacgcatggaacggatttgcaagaacatcagccaaacttgatggagcagttacatagtaagcgagaccaccaacaggaacagaatggccagagtactcagattccttccatttcccaagaaggttaaccagaaaatttccactgtacctcctgtagagaagctgtgatatgaagtagaggttggtaatcagtgcagaatgcagaatgatgggcatgtttgaagtgtagaacagcttaattgggtatgagccttgttgaccgctggcattcttggatctcactggtagcacaacacggaagccttggaagtagataactatgaggaagactaaaacagtagcaagcaagttggtcacattcggaagattctggcggtagaaagcttcgcgcaaggcacggactttgtcggttctagtaatcaacaaatggaacaatgcaatgacagctccttcaaattcagcaccacgcccactgttgatggttgtggggctaaacgccttccagatgatatatgccagcaaagaaaagctgaagtataatgaggatgagatattggtagcaatgaagagagaaatgccagaaccctaaccataacctttctggagaagttcatcaaggcagataacaatgatgccagcaaagaaaagctgtaggatgatgagaatggcatttccagttccaagttggcttacactaccatacattccagacagcacatatgccacagcttccccaatagcaatcaagatgcccagcagcttttgtgcgccattcagaagtgcacggtcctctctcacactgttgtcaacttcaataatctttgatcccactagaagttgcattaccattccagatgtcacaattggggtaatacccagctccataacagtaccacggtttgatgcaagaataacacgcatccagtagaaaggatctgctccagtagttgagtgaattccatagagtggtagctgactgcacaccaggaaaatgaagagagagataacggtatagatcactttttctctgaatggtattttcctatcagcactctgtacttctggcaggaaagccagaaagggcctgacaagatgcagtactcgaaaaccaccagccatctttctggccggcgccgccgccgaggcgagtggaagcttctcgccgccgccgccgggatcggagggcgcgaaaccctaggaagcgagagagagagatgaggggggcaagagcacgagacgggaggaggggggatcctggaggccatggcccatcaattgaactgttgttccttccttgctggacctcattatggcccatctcgaataacgtcgagagaggtagcgttgggcagcagcagtagcagaagtccacttgacatccctcgtatttacgtcgagtttaatgggcattcctgtcagataaggggtccggaccagggtgacagagcctgtctccacagaaatgtgcgagaacccatgatctactgcagctcgcaacgcatgcaaacaagcaacagcctcggcacttagagcatccatcgactccaaccttgcagagctgaagaaaccatagcgtccaacgttctcggtggcgacctcctcggagacggaagaggaccgctccagggttttaccgcactttccaagtccgctcctctctttcgtctcgcccggtggcggcggcacgccgtcgtcgtcaacgtcgtcggggatgaacctgtaccaccccgaggaaatctccgagtagaacgcctccat

SEQ ID NO: 3451 - DNA, 2091 bp, Oryza sativa
  Clone ID: PAT_MRT4530_83074C.1
gagacataacaccagattagtttccagtgatcagaaacattagtcacgaaggttgcagcaaaaaagagatcaggaatcaaatatactatccagtttaaaagataataaaaattgatcgcaacacatccagttactacgatggccattgctgtactcggggcaggagcaggacaaataactccatacactggcatgaacaaaacgcatactgctacaagattctcattgtaagtaagtcggcaacctaagctgattctgaggtctcccattacatgacagccggccaagcagcactgcgactcgcaagaagttccagctaggagttatacagctaaggtgatcaaaacccaaagaaacctagctcggtagccctttctttctcgaatgtctcaaaatactggtagatgattgtaacagcgagcagtatcccagttcctgaaccaattgcacccatgaaatcagctaggacagtcaatgcaccaatgcagactccaccaaatgcagcagctgtagggatgtatctgttcaattctttctgtaaattcgactcacgatggccaggcatcaccatttgttgttccttgagctgtttagcaacatcctttgctgatgagccagatacttcaatccatgtctttgagaagagagcacaagctgacagcatgaagaccacatagaacaacgcatggaacggatttgcaagaacatcagccaaacttgatggagcagttacatagtaagcgagaccaccaacaggaaccgaatggccagagtactcagattccttccatttcccaagaaggttaaccagaaaatttccactgtacctcctgtagagaagctgtgatatgaagtagaggttggtaatcagtgcagagtgcagaatgatgggcatgtttgaagtgtagaacaacttaattggatatgagccttgctgccccctagcattctttgatctcactggaagcacaacacggaagccttggaagtagatgactatgaggaagaccaatacagttgcaagtaaatttgtcacattcggaaggttctgacggtagaaagcttcacgcaaggcacggactttgtcagttctagtaatcaacaaatggaacaatgcaatgacagctccttcaaattcagcaccacgcccactgttgatggttgtggggctaaacgccttccagatgatattctcactgtgcaacagcaagttcaccaataataagcagatattggtagcaatgaacagagaaatgccagaacccaaaccatagcctttctggagaagttcatcaaggcagataacaatgatgccagcaaagaaaagttgtaggatgatgagaatggcattgccagttccaagttggctcacactaccatacattccagacagcacatatgccacagcttccccaatagcaatcaagatacccagcagcttttgtgcgccattcagaagtgcacggtcctctctcacactgttgtcaacttcaataatctttgatcccactagaagttgcattaccattccagatgtcacaattggggtaatacccagctccataacagtgccacggtttgatgcaagaataacacgcatccagtagaaaggatctgctccagtagttgaatgaattccatagagtgggagctgactgcacaccaggaaaatgaagagagagataacggtatagatcactttttctctgaatggtattttcctatcagcactctgtacttctggcaggaaagccagaaagggcctgacaagatgcagtactcgaaaaccaccagccatctctctggccggcgccgcctccgaggcgagtggaagcttctcgccgccgccgccgcgggatcggagagcgtgaaaccctaggcgaggagagagatggtggggcaagagcacgaaagggtttttttttttttttttttttttttttttttttttttttttccggccgccgcctccaccatcaacaacatcaccacccaccacgacgacgacgacgccattatcaacgaggagataactgccgacgcgaggaggagaagatatggagatgaagatggaatggaattggaggggga

SEQ ID NO: 3452 - DNA, 4285 bp, Oryza sativa
  Clone ID: PAT_MRT4530_83242C.1
gcatcaaatcagcttgtgtaaccttggataagcaatacccatgaattgaataccactgcaaaattgcactcttgcagtatatactgcatgagttaaggtacatcctatgttacaaatgtacagccgtgagttcaatacgtaatcaaaattcatcagagttaaaaaaaaaatgtttctgtagttctgttgccgatatatactattttgttgctataaactatggctgtgtttggagctgccgttcttgtagctttggcagtgacttgtggcctcatctggtcgaggtcaagaaggctatcaaaggagatgagagacatccccggaacaatgggctggcctgtcgtcggcgagaccttctccttcatctccggcttctcgagccctgctggcattctgagcttcatgcgtgacagacagaagaggttcggcaaggtgttcaagacgtatgttcttgggaggatgacggtgttcatgacggggagggaggcggccaagatcctgctgtccgggaaggacggcgtggtgagcctgaacctgttctacaccggcaagcaggtgctcgggccgaccagcctcctcaccaccaacggcgacgagcacaagaagctgcgccgcctcatcggcgagccgctctccattgacgcgctcaagaagcacttcgacttcatcaacgacctcgccgtccagacgctcgacacctggctcgacaggagagtgcttgtgctcgaggaggcctcatctgtaattattaagctcttcacgctcaaggtgatcgccaacatgctgataagcttggagccagagggagaggagcaggagaagtttcgcgccaatttcaagatcatatcgtcttcgttcgcgtcgctgcctctcaagatcccaggaactgcatttcaccgtggcctcaagaaggccaggaaccggatgtacgcgatgctggactcggtgatcgccaggaggagggacggcggcgaggtccgcaacgacttcctccagacgctgctgcggaagcacgccaaggacggcaccgccgccgacgaggacgacggcggcggcggcggcgatcgagacgcggacaagctgacggacgcgcagctcaaggacaacatcctgacgctgctcgtcgccggccacgacacgacgacggcggggctgacgtggctcatcaagttcctcggcgagaacccggaggccctgcagaaactcagagtgatgaacgagacactgaggagagcgaccatcctgccatggttctcacgaaaagccgctcaggacttcagcattgatgggtacgagatcaagaaggggacgtcggtgaacctggacgtggtgtccatccaccatgacccgtccgtcttcgccgacccctacaagttcgatccaaacagattcgatgggacgttgaagccgtacagcttcctgggattcggcagcgggccgcggatgtgccccgggatgagcctggcgcgcctcgagatctgcgtcttcatccaccacctcgtctgcagatacagtactccagcaggcagccaagaaataaagcagcaggagctactccgtggcaaagtgacgaggaacagctacttcagtggcaaatgtgacaaagaacagcaaccacgtagcatcgctcagatattcaggtcgcttaaacatgatcacagcagggcagtaacaaggaatggcacaatccaagaagcaacacaacagcagcaactccggaagggccagggtcaatggaacaataaccaggtagcaaagccaatcagagtaacaaagaaacactatgcaaggcagcagtggccttcccacgctaaaccgcacatgatagattgatgccaacgaacaagccggtcataagactagaacaaatcgctgttaagacagtagtaaccaatccagaacaagagaacaaagaactcaaacaaacctgccaaaacaaaacaaacatttgagaacacctggtttacaatgagttgattaagaagagttaaagattacatggcaatttcccgtaaggttcagtagaatgcttcctctcccaagagaacagaaacaaaacaatttaccggtccaatcccacatatcccgtttccaaaggtgctatgccgcatgagcacaaccaacgtaacagagcatcaacaagtaatgtgacaaaaaccacctctcaagtctcaaccaagaaaagaatcacccaacagcatatcatgcatatatgtaggaccaagcgccaagcactatgaacaagtcatatgcctggcaacaagcaggaaacaataataagaatgtcagtaatacagtcgataataaagtagatgctttctcatggtacaccatagttctcaaactacatgaacacaaagttccagacacaaggaaacacagctcacaatagtagatagacttccatacctggatggaacatacttcttagagatttgataggccatcaatagggaccagaccggtcacgactgtaacggtcacccccacctccaccgtagccaccaccatctcgactacgaccagaataacggtcaccaccacggtcagatccataacggccgccaccgccaccaccaccaccgtacctatcatctcggccaccatatctatcacctctaccaccaccatctccagatgggcactctctagcaaagtggccaggttttccacacttgtagcaatccccaccaccacctgagccacgtggtgcacgcccaccaccaccaaagtcacggccacggtcataacgagatccacggtcacgatcataatcacggtctccattacggtctctaccaggtccttgtggctgagctttatcgacagtgatcgcccgcccatccaaatccaatccattcattccttcaatagcatcttccatggctttcttctcatcaaaggtcacaaagccaaaaccacgagaacggccagaatacttgtcaaaaaccacctttgcttcagtgaggttgccaaatttgccaaaggcatccttgaggctttcatcagttgtggaccatgacagattcccaatgaagcaacggtactcctccacgtccgccatctctgcgaggaagacgaaggcggcggcgaatcggatgctcttgccctcggtttggttcggaggtctagtattttttttttttttttttttttttttttattaaaccagcaaatctaatctagtacaatttcctggatataattcaggaaaaagacacatatagtccatggtggtacaggaagttacatatagtgatgtgacacgaaatttagcataaaactaacagttgctttccaaaatattacatgtaattactctttgtctaaacatagattttttaaaaaaatcatttggtatcagccttctgatttcactgaatgtttgcctcttcactcctttgacaaattccaggtgccaaatgcatgggtaaaaagaatcatagactgacactgtaggagactttggtgaggcctttcttgactcttatgtttgtgacctttatgttgttgatgatagagatatcggcaacatgtgtaccaccacaagggccaccaggataatcaccaaatttcacaatgcgaggggtgctatcttttgaaatgtagctaggcagagcacctccacacaattgagctgcctcctcataaggtaaaatataagctaatacttttgctcctttagtaattaactcatttgcttctttttccaactcgtttttcttatcctgcaactgatctggtggaatgactcctttatactcaacgaaaggtccatcagggaaatgatgtcctttcccagggtcgaaatgtgataagccaatattgctcatgcagatgtctatcaaatgccctgcagaatgaagcctggaatttaagttgcggcgttccgcatcgacttccaagctaacgctctgcccttcactgaacccggaattgcatccatctccagcatcctcaaatctcccatagtggaaaaccactccatccttcatccgcacatcatcgacgatgaacctggtgccgccgccagcggagatgacgccggtgtcggccggctggccgccgccctgcgggtagaagacggtggagtccaccaacaccgctcgccggcccccctcctcctggaggagggagacgacggtggcggtggagctgagggcccacatgtcatcgaagtacgcgagcttggtggggcccatggccctcgccggagctgcggcctccgttcccatctccgcgggggtggagatcaccgcacggttgggcaagaattagaagcgcc

SEQ ID NO: 3453 - DNA, 1731 bp, Oryza sativa
  Clone ID: PAT_MRT4530_8325C.1
atggaggtacccattgctgccatgacttttgcccacccagccaatgttatgactctggcttcaaggcagccaaagagtaaaaggtcccatatctcccctgctaccacggctcaccgtaatctacagactcgcctggctcaccaccaccatgcaacaccagcttcattgcctatggcaatctgcaacacagtagacaaagtgatcaataggttcattgacctgccggagcagcgaccaacggtggatccgcggcgtgtgctctctggcaacttcgctcctgttgatgagctgcccccgacaagctgccatgtcatccgcggctccatcccaagctgcctcgccggtggggtctacatccgcaatggtcccaacccacagcaccggcttccccagcgaacacaccacctcttcgatggtgatggcatgctccactcccttctcattccctcggcctcgtcaacactgttgtcggagcctgtgctttgttcacgctatgtgcacacgtacaagtatctcttggagcgtgagaccggaggaccggttttaccaaacttcttcgctggcttccatggagtggccggcttggctcgtgcagtggtcatgatcgcaagagtgcttgctggtcaaattaacctgaacaagggcttcgggctggccaacactagcatcactctttttgcagattgcctatatgcgctatgcgaatctgaccttccctactccatgcacatcaacccagccaacggagaagtcaccacacttggtcgatgtgactttggtggtgatctttcttttaggatgacagcacaccccaagaaggacccggtcaccatggagttgtttgcttttcgctacaatgtcttccaaccattcataacatacttctggttcgatcgagcaggcagcaaggtcgcagatgtgcccatcttgtccttgcagaaaccatcggtgatgcatgactttgcaataacagagagatatgcaatctttccagagtcacaactcatcgttaatcccatggacatggtcatgcgggggagctcgttggtaggattggaccgtaccatggtgccacggattggcgtgcttccaaggtacgccaaggatgagtcagacatgagatggtttgaggtgcctagatttaatatgttgcacacgacgaatggttgggaagaggctgatggagaggagattgtgctcgtggcacccaatatcctatctatcgaacacatgctaggaaacatggagctcatgcgagctcgtgtcgacatggtacgtatcaacctctgcaccggtgacgtgtcgtgcactgcactctcaccggagagccttgagttcggtgtcatccaccaaggttatgttggtcgcaaaaatcgctatggctactttggtgtaagtggtccgttgcccaagatcaaggggataagaaagcttgactttgatctcgtcggctctggtgattgcacggttggacgtcgtgactttggtctagggtgctttgctggggaaccattttttgttccagacaacatcgacgggtatggaaacgaggatagtggttatgtggtgtgctacacccatgaagaggacaccggagagagttggtttgtggtgatggatgcaaagtctccagagctagacattgttgcagaagtgcaacttcctagtcgtatcccctatggctttcatggtatttttgtcaaacaggccgaacttctcgcacaacaataa

SEQ ID NO: 3454 - DNA, 948 bp, Oryza sativa
  Clone ID: PAT_MRT4530_83609C.1
tcctcgccgcgcggtggaattcgaaattcgcccaaaacccccgcgtcgcccgcgaaaatttccctccaaaacctccgcgcgctcctcccaaaccgacataaattctacagcgaggaagggggagagagagggagagagagcggacgcgaggcagccgaaccaccaacgcgagcgagagagggagagggagaggaggaggaggagcaatggcggggaagggagggaaggggctgctcgcggcgaagacgacggcggcgaaggccgccgccgacaaggacaaggaccgcaagaaggcgcccgtctcccgctcctcccgcgccgggatccagttcccggtggggcgtatccacaggcagctgaaggggagggtgtcggcgaacggccgcgtgggggcgacggcggcggtgtacacggcggcgatcctcgagtacctgacggcggaggtcctggagctcgccggcaacgccagcaaggacctcaaggtgaagcgcatcaccccgcgccacctgcagctcgccatccgcggggacgaggagctcgacaccctcatcaagggcaccatagccggcggcggcgtcatcccgcacatccacaagtccctcatcaacaagaccgccaaggagtaggagaggcagcggcggctatgtgttcttggaagttttctatgacctctctgctaggggattagtgagaaaaaaatcccagttatcttttcactagtagtcttaatcatttaggacttgttgttatggtgattacctgaattaggtgttcctgaatctgtgtaatggctggctaaacctttggtaatttggtggtagggctgaagacttgacttgcagcagcttggtgtagttgtgatgtgaaactgcttatatttttctctctgttgggtgactagctaatgcttggttgttacttgttgatgacaaaaaaaaaaaaaaaaaa

SEQ ID NO: 3455 - DNA, 1727 bp, Oryza sativa
  Clone ID: PAT_MRT4530_83782C.1
gctcgcggctcatctcaccctcgccgcgcgccgaggaagacgcgcatctcctctctccctctatataagcgcgcgcctcgccacctcacccgaaaaaattccccaccattccatctctctctctctcgaatcttgatctctctctttcatcgcctcttgtgttcgcgcgcgcgagcagggtggttgttgttggtgggggtgcaatggcggggaggagcgagctggtggtgagcttcggggagatgctgatagacttcgtgccgacggtggcgggggtgtcgctggcggaggcgccggcgttcgtcaaggcgccagggggggcgccggcgaacgtggccatcgcggtggcgcggctcggcggcggggccgcgttcgtcggcaagctgggggacgacgagttcgggcggatgctcgcggccatcctccgcgacaacggcgtcgacgacggcggggtcgtgttcgacgccggggcgcgcaccgcgctcgccttcgtcaccctccgcgccgacggggagcgcgagttcatgttctaccgcaaccccagcgccgacatgctcctcacccacgccgagctcaacgtcgagctcatcaagagggctgccgtcttccattatggatcaataagcttgatagctgagccctgccggtcagcacatttgcgtgccatggagattgcgaaagaagctggtgcgctgctatcttatgacccgaatctcagggaggcattgtggccctcccgtgaggaggctcgcaccaagatcttgagcatctgggaccaggcagacattgtcaaggtcagcgaggtcgagcttgagttcttgaccggcattgactcagtagaggatgatgttgtcatgaagctatggcgccctaccatgaagctcctccttgtgactcttggagatcaaggatgcaagtactatgccagggatttccgcggagctgtcccatcctacaaagtacagcaagttgatacaacaggtgcaggtgatgcgtttgttggtgctctgctgcgaagaattgtccaggatccatcatcgttgcaagatcagaagaagcttgaggaagcgattaaatttgccaatgcgtgcggagcaatcaccgccacaaagaaaggggcaatcccatcactgcccaccgaagttgaggtcttgaagttgatggagagtgcttagatcgatcagtagcattatggtcactagcttcagcttccgcaaattgtattgtatgctgatctggatcaggagcaggggggtactccaagatgcctgcctttttgttgccaacttcccttcctggcaggatttttgatttggaactctaatttgaataagcagagccgttcaatgtcagtttctactatatgattaaataatcggtccttaattgtaatgcatcattctttttttttttttaactgaatccttgttccatgctgtatgaactcctttgagttccatttgtatatggtgctcttgccattataagagtagtgtttggtccaaaattttgtcagacaaacagaattatagttacttcttatgtgatcatacacagtgctggaagcctggaagtattgtgatgcagtgatgctcctggtaagagatattcaatgttcactcatagctatttcaattgtcttggtagctgagatatgaaattcactggtaccgtatatcagatatttctgaaaaaaaaaaaaaaaaaaaaaaaaaaaaaaaaaaaaa

SEQ ID NO: 3456 - DNA, 2712 bp, Oryza sativa
  Clone ID: PAT_MRT4530_84339C.1
aactaaaaccgcatttttttcttttttctggcacagggcaaatgaaacgagaacaaataatgtaagattcacttaatactactatttcatagagcaaataaatacccatttagcatccaggttaactcaggagtgccaaggacatacataaaagcatactgatgatatgcataataacggcatggttagcacctgcgcttaacagtgaccaagtgcctcacttatccagccgatatgccctgctaccgttttatctttgagattatcatcattctcctatccgatgacgcatgtacaaaatgagaccagaccagccagtgctgcagccagggaagaccgcggtacatcgtaacatagaaatgcccaaaaaaacaccgcatgaccacgaaatcgttgatgaagcatcatgacaccgctgcagcgaagctcgcgagtcagcaaagcttagctgtttcttgacttagcatcaaccaccaatcaagccaggtatctgtacacattagcgttgtccttctcgcgttccaggtaatcccttgtgatgaggtcctcgattcgcttcttgatggctttgaagtcaggcttgaacatgcggctgagctgctccacacattccgcaactagctgctgatggcccataactttgcgactcttcataatgcgcacaatcgatgcatcaattgcataccgcctgtccttgtcaacatcttcgacaacctttttcttttcatcaacaggaggtaggggtatcttaattcttctcatcctgtcagtgaattttgaattgaactcaaaaacatcgttgggagaaatagatctattagctggttccttgttaagaatcttgtattttgcacaggagagagaatggagcaaacgcactacatcatcatctgataagtttagctgtgttacaatctcagaataagtaagcctgtcagatccgttgaatagcagcagcaacgcagcctgatatgttgtgacaatgagctcaatagtttttgcctcaaactttgcattgatattgcaggttcccaaggaatatatccaggtaagctttctgtgttttgttcttgtttggtaaaactccttgaaaacctccacgcatttcaccatctcagcaggaaggttaatatcgaaagtcttgtaacttggccagaatcctgttgtcaaaacagtgacagccaagtctatcccaggattcaactcctgatgtgcagccacaaactcttcaaacttagtttgatggtcccttgcaacagtaagatcagtaaccattccctccattttagaagtaaattgtccaccacactgctgcttgagtttggtaagtatgcttctttcatgttcatcattggcactcttatcaaaaagcaatctccttgcaagttttttcctgtaaaactcagcaaagaggtctttatcgctgatgtatgcaagcaatcgcaccaccttctcaagagcatcttcgatggcttcatcactgagcttttcactgcaacctttcttcagaatattgtcacagaaggtggcaagcagttcagcacttgaactgccagagacacccttgttacagaagacctcgaatgcttctttaagggccttatgaaagagggtgtgaccctggaaacattctgtgacataagctacatacttgtcatggagctcaatgattttccagacaaaaacctgttcctgcataccaaccatgtcctttttctcgggcttcttattactagcagaatcttctgcttgcttgaccaaggctgtgccctcatttgtaacatgcgttttaaacatgttagcaataggttctagaccgcggttaattttggagaagagcctgtacatcctagaaaggtcttcctccttgtcatcacgaagcaatgcaaaacacccagaatgctccttctccaacaggggagttgcatattgtgcaagcaattcattttgcactttctccagtaacttctgttcactactaatatgcaagtagtgaccaactcgctccttctctttcttcaagcactcctcagcctttatcatgtaatcaggacaagagtcctcgagaatccagctttgagccttgagagagtagtaatctgtagtatccttaagcaagaaatcttcaaagtcattctcataacattccatactgcctagtccaatttcaacaaatatgcccaggacattcttcagcagggccctgtctatctgttcgccttcacgctctttgtcaatcagagctatcactgcacctttaacttgtcctttgatttcttggtatatcaaatctcggaagcaagtaagcccaacttgttcaagtggtataagcgacctccgtgagatgaagtatcgatcaagataaaagaagaaacgtgacagccaccgaaccatgattttatggtttgaccacctctttactagttccctcagcataaactcgtcatgtttatctcttaatgaaggtaagaccatggaggtgatgtactcctcgaatgactcccggtacttgtcgtagagctgctgcgagtagtcgtgcggcggcttctgcgtgcacatgttgtatatcgtcgtgtagagcatcatgtagtcctcggagctgaactgtggctcgggcttgccctcgaggatgttcttcagcttggtgatgcccttctgcatgaacgcccatccctcctccagatcgatcgtcctccgctcctgccccgccat

SEQ ID NO: 3457 - DNA, 838 bp, Oryza sativa
  Clone ID: PAT_MRT4530_85095C.1
gcacgaggacttgttcatttcccgcaccccccccgcccctcttcctccatctgcctctttaaaacagtaaaaataaccgtgcatccccctggggcaagaatctctcccatacatacactacagcggcgaacctttccttattctcgcaacgcctcggtaacgggcagcgcctgctccgcgccgcggttgcgagttcgggaaggcggccggagtcgcggggaggagagggaggattcgatcggccagaatggggagggggcgcagcgagataaagaggatagagaaccccacgcagcggcagtccaccttctacaagcgcagggacggcctgttcaagaaggccagggagctcgccgtcctctgcgacgccgacctcctcctcctcctcttctccgcctccggcaagctctaccacttcctctcccccaccgtcccctccgtgagggagtttgtcgagaggtacgaggccaccacgcacaccaaggtttgggcagatatcaggcaggagaggcgcgccgagctggagaaggtgggcagcatgtgcgacctcctggagaaacagctgaggttcatgacggtggacgacggcgaggagtacacggtgccgtcgctggaggcgctggagcacaatctggaggccgccatgcgcaaggtgcgctccgagaaggaccgcaagatcggaggcgagatctgctacctccagaacattattagggggcgacaagaggagcggtacgggctgtgcgacaagattgctcatgcacagactctgaaggatgtggaatgtggatccacctcactaagcaatggcttggaccttaaactggggttcaactag

SEQ ID NO: 3458 - DNA, 761 bp, Oryza sativa
  Clone ID: PAT_MRT4530_85350C.1
aacaaagaagaagaagaaagaagaagcagcagcaaaaaagttgaaaggttaatcagcaagtgtgttgttctttctattggtaagagagagagagagagagagggagagagagagagagagagagagagagagagagatctcagaatggtgaatccaggaagaacagctagggcactctgcctcctatgccttgctctcctcctgctaggtcaagatacccattccaggaagctcctgttgcaggagaagcacagccatggcgtcggcaacggcacaaccaccacccaggaaccaagcagagagaatggaggaagtacaggttccaataacaatgggcagctgcagtttgattcagccaaatgggaagaattccacacggattatatctacacccaagatgtcaaaaagccataatggctgttcatttatgatttgaactagtactagtagcttataccttctgcgcgtcttttgttcgtttggagaggggattttcttgggatttagcatatgaactaattaaattaaatcccaggcaaatcccactcagcccattttgtgcagaagttgtcagtgttgcactgtataattatttagtcatacacaactactcctggtaactactcctatcttcgatgaattttctggttttgccagacgtgacaatagtccagtagcatgcagtaccctctcagaatccctgtaatttttagcaaaaaaaaaaggaagaaaagaaaagaagcttccctactactttctcc

SEQ ID NO: 3459 - DNA, 2100 bp, Oryza sativa
  Clone ID: PAT_MRT4530_85425C.1
cccggttgcttccaggttcattgaaccaagccaccccgacacgaatcgctcaggcctcccccctgttgttcatccctcactcaacttttgggcagcttggctttattcaattccccttcctttttattgcgaatttgcgactgcgagcgagcttttcttcctcaaaggaagacgacgacggaggagcagccctgcagagcataaagagaggagaggagaggagagggggccggtcaaggaagaggagggaagatgagcagcacagctccactcctcacaccctacaagatgggaagatttgatctttcccacagggtagttctcgcaccactgacaaggcagcgatcctatggtaatgttcctcagcctcatgccattctgtactatcagcagagaacaaccaaaggaggccttttgattgctgaggccactggaatctcggacactgctcaagggtacaaagatactcctggtatttggacaaaggagcaagtggaagcgtggaagccaatcgtagacggcgttcatgccaaaggaggaatatttttctgtcagatttggcacgtaggaagagtctctaataacacttttcagcctaatgggcaggctccaatttcgagcaccaataagtcactaaaacctgcagtaagagccaacggcatagatgtggctactttctcaactcctaggcgattagagactgatgagatcccttttgtcgtgaatgattacagggttgctgctagaaatgcaattgaagcaggatttgatggtgttgaaatccatggagctcatggttatttgatcgatcagtttctaaaagaccaagtcaatgatcgttctgacaaatatggtgggagcttagagaatcgctgccggtttgcgctagaagtggtccaagccgtaactgatgaaattggagctgacaaggttgggataaggctgtcaccctttgccagctattcagaggcagcagactcaaacccagaagctctaggcctatacatggcaaatgcactaaacaagtttggtatcctctattgtcacatggtggagccacggatggtaaagcttggtgaaaagtttgaaaccccccatagtcttcgtccaatcagggatgctttcaagggaacgtttattgctgctggtggctacaataaggaggatggaaataaagcagtctccactggatatactgatttggttgcttatgggcgcttgtttttgtctaatcctgatttgcctgagaggtttgaaatagatgctcctctcaacaaatacaacagagagactttctacatctctgatccagttattggatacactgactacccatttcttccatcagatgtctaaatgtgcctttcagtactcgaattctcttccgcctctcatcaaagcagctcagcagccaccatttgtgttgttacttggtaggattgaagaaatatggccattgatctgaaagctgtttttcatgtgtgtgggcaaagcattgataaaataatgtgacattgtgatttcagcacggcacatgaatacaaagggagatgataggtagatcaagcagtgttgagaaattattttagtttgtatgcacaaatattgtgagcctgatataatatcagggagcttgcctgtcttactttgctctcaaatatgttctcagtcattcacatggttgtcagcgactgcaaatcttttacgtattcctgatatgtgtcactgactgagagatgggagtacagttggaataaaaagtggaagttgaatgtatgcagactgctattcctagcttatcatgtttgatgtttcaggataccttttgggtctgaagttctgagctgttcttctggcagttactgattacaggggcatactggacaagtaattaggatacagactgcacagaaagagcttacgaaggcaagaaggacctctccctgcccatctccgtatgtttttactaaacaaaaatttgtgtatcctgtatttgtgttgtgaaaatcatcctggcctaatttccagtcctttacaaatgattcatcatccactaaaaacttgagcttatcataaaagtaatagcttaaggatgctttt

SEQ ID NO: 3460 - DNA, 2445 bp, Oryza sativa
  Clone ID: PAT_MRT4530_85672C.1
atggctggattggtcatcggctgcctggccgtgcagctctcgctggcgtctctgctgctgtgctcgtccgcgtcgacggcgcagcacacgctcggcaccggctcctccctgtcggtggcggaccggtcgcggccgttcctggtgtcgccggacggcaccttctcctgcggcttcattcaggccggcgacgacggcgacaacgccttctccttctccgtatggttcaccgccgccagggacggcgccgtcgtctggacggccaaccccgacgcccccgtgaacggcaggggctcgacgatctcgttccgccacgacggcgagctggccctcgccgacaccaacgggaccacggtgtgggcgagccggacgggcggcggcgggcggggcctgaccgtctccctccgcgacaccgggaacctcgtcatcgaggacccgtcgaccggccgcgccgtgtggcagagcttcgactggccgacggacacgctgctcccgtcgcagcggttcaccaaggacaccaagctcgtcgccggctacttcagcctctactacgacaacgacaacgtgctgcgcatgctctacgatggcccggagatcgccagcatctactggccgttgccgggggtgagcattttcgacttcggccggacaaactacaacagctcgaggatcgccatcctcgacgacgccggcgtcttccgctcctccgacaggctgcaagcccaggcctccgacatgggcgtcggcgtcaagaggcggctcaccatcgagcaggacggcaacctgagaatatacagcctgaacgcgtccaccggaggttgggcggtgacatgggcggcgctcagccagccgtgccaagctcacgggctgtgcggcaagaacggcctctgcgtgtacctgccgagcctccggtgctcgtgcccgccagggtacgagatgatcgaccgccgggactggaggaaaggctgccagccgatgttctccgtcggcaactgcagccagccggcggcgcctgagcggttcaagtctgtggtggtgccccaaaccgatttctacggctacgacctgatgttcaacgggtcctcgataacattcgagctatgcaggaaccagtgcctgagcgattgccagtgcgtcgccttctcctacaggttcgacggcgtcggcagatgcttcacgaaaggcaggcttttcaacggctacacgtcggcgaatttcccggggaacatctacctcaaggtgtccatcgacttcgacgaatcgtcgccattggtcagcgcgcggagcgccgccggcctcacgtgcaatcccaacgtctccatcgtgacagtgcccgctgccgtgtacgggatggctccaagaaacagcgggaagtggacctacctgtttgtgttcgccggtgtgctcggtgtcctggacctcctcttcatcgcgacagggtggtggttcctgtccagcaagcagagcatccccagctcgctggaggcagggtacaggagggtgatgacgagccagttcaggcggttcacgtaccgggagctcaaggacgtgacggccaacttcaaggaggagctcggccgcggcggctccggcgtggtgtaccgcggcgtgctcgacggcggtaaggtggtggccgtgaagaggctggcggtcgacgtgacgatgcagggggacgaggagttctgggccgagatgacggtgctcgggcggatcaaccatatgaaccttgtgaggatttggggattctgctccgagcgcaagcacaagctgctggtgtacgagtacgtggagaaccagtcgctggaccggcacctgttcgacacggccgaaggcggcggcggcatgtcgacgacgacgctggcgtggaaagatcggtacaagatcgcgctgggcacggcgaggggcctcgcctacctccaccacgagtgcctcgagtgggtcatccactgcgacatgaagccggagaacatcctcctgacgagggacttcgacgccaagatcgccgacttcgggctggccaagctgtcgaagcgggaccgcggcgccggcgtggagctcacccacatgagggggacgtcggggtacatggcgccggagtgggcgctgaacgtgcccatcaacgccaaggtggacgtgtacagcttcggcattgtgctgctggagatcgtggtcgggagccgggtggcggaccagaggacggaagccggcgagcggctgcagctgccgcagatcgcgcaggcgctgaggcatgtgctggacagtggcgatgtgaggtctctagttgatgccaggctgcaggggcagttcaaccctcgtcaggccatggagatggtgaggatttctctggcgtgtatggaggacaggaacagcaggccgaccatggacgacatcgccaaggctctcacggcgttcgatgacgaggacgaacaccccgcttaccggtcatga

SEQ ID NO: 3461 - DNA, 1788 bp, Oryza sativa
  Clone ID: PAT_MRT4530_85748C.1
atgaccaagatcgtggggacgctgggtcccaagtcgcgcgccgtcgacaccatctcctcctgcctcaaggccggcatgtcggttgccaggttcgatttctcgtggggagacgctgagtaccaccaggaaaccctcgaaaacctcaagctcgccatcaagtccaccaagaagctctgtgctgtcatgctcgacactgtcggcccggagttgcaggtggtgaacaagagtgaggctgcaatctcccttgaagcgaatggcactgttgttctcacccctgaccaggggcaggaggcctcctccgaattgctgcccatcaacttctccgggcttgctaaggctctgaaaccaggtgctacaatttttgtggggcaatacttgttcactggcagtgagactacttcagtttggttagaggtttctgaagttaaaggagatgatgtggtttgtgtgataaaaaattcggctactctggctggttcactgttcaccctgcattgttctcagattcatatcgacttacctacactgtctgatgaggacaaggaggttatcagaagatggggagctccaaacaagattgacttcctctctctgtcttatacaagacacgcggaagatgtgcgacaggcacgtgagttcctctcaaagttaggcgaccttagccaaactcagatttttgccaaaattgagaatgttgagggtttgaatcattttgatgaaatcctgcaagaggcggatggtatcattctgtcaagaggaaaccttggaattgatcttccacctgaaaaggtgtttttgtttcaaaagtctgctctgcacaagtgcaacatggctggaaagcctgctgttgttactcgtgttgtggacagtatgactgacaacctcaggcctactcgtgcggaggctactgatgtggcaaatgctgtacttgacgggagtgatgccattctccttggtgctgagactctccgtggtctgtacccagttgagactatctcaattgtgggcaaaatttgcgctgaggcagagaaggtattcaaccaagatttatacttcaagcggactgtgaaatatgttggggagcccatgacccacttggagtctatcgcttcttctgcggtgcgagctgctatcaaagtgaaggcttctgtcattatttgcttcacatcatctggacgcgctgcaagactaattgccaagtacaggcccaccatgcctgttctatctgttgtcattcctcgtctgaaaacaaaccaactgaggtggagtttcactggcgcatttgaagcaagacaatcactcatagttagaggtctctttccgatgcttgctgatcctcgccatccagctgaatcgaccagcgctaccaatgagtcagttttgaaggttgctcttgaccatggcaaagcttccggtgtgatcaagtcgcatgatcgcgttgttgtctgccagaaagtgggtgattcctcggttgtgaagatcattgagctggacgattagacgaccagcttgtgcttgttgatgatactacggcaagtcatggtttgccagattttgactaggccaaaaacgatgcttcttggctatatgtataattcctatataggctttccaatgagcagtttttcctatggtgtaatcataggatttgccttactatttgaaacaactacgttttagttatgtaagttatcagatttcaatgcatcatatcacttcgatgggcaaatggaataatgaaatcggtactgtaccctttggtcttttgatgttcgttccacctttgtc

SEQ ID NO: 3462 - DNA, 370 bp, Oryza sativa
  unsure (1)..(370): unsure at all n locations
  Clone ID: PAT_MRT4530_85868C.1
gggagtggagaaacatcaacttcttcttcatcttcatctccccaaaaaataccacaagaatttaaaagaggctattggcaatgcanctactatgggccactctcactttttttactgaatggcaacctatctactcccctctcaatggcgtctctccacaaccgatacctgataccaagcttgtcatataatactggccacttccaaacatttgccccattgatcatcccttcttgctgccccagcaccagtcaaaaatcctcattcaaaaccttctcagcaaaatgtgaccatagtatattcatcaaagggacatgctttatccattgagccaagtccagagacatcctttagagcaacctggttttat

SEQ ID NO: 3463 - DNA, 1693 bp, Oryza sativa
  Clone ID: PAT_MRT4530_85925C.1
cccacgcgacggcacaaaacgaacgcgaactcgagcggcgaagaagaagagagagagagataaggcggcggcagcgagatggcggtgacgatccagtccgtgaaggcgaggcagatcttcgacagccgcgggaaccccacggtggaggtggacgtgggactcagcgatggcagcttcgcgaggggcgccgtgccgagcggtgcttccaccggaatatatgaggccttggagttaagagatggaggatccgactatcttggcaaaggtgtactcaaggctgtgagcaatgtaaacactattattgggccagcactcatcggaaaggatcccactgagcaagttgacattgataacttcatggttcaacagcttgatggaacctccaacaactggggctggtgcaaacaaaagcttggagcaaatgctattcttgctgtttcacttgctgtgtgcaaagcaggagccatggtgaagaagattcccctttaccagcacattgcaaatcttgctggaaacaagactctcgtgctgcctgtacccgctttcaatgtgatcaatggaggatcccatgctggaaacaaacttgccatgcaggagttcatgatcctccctactggtgcatcctctttcaaggaggccatgaagatgggagttgaggtgtaccaccacttgaagagtataatcaagaaaaagtatggccaagatgccacaaatgtgggggatgaaggtggctttgctcctaacattcaggaaaacaaagagggcctcgaactgttgaaggccgcaatagctaaggctggctacacaggcaaagtggtcataggaatggatgttgcagcttctgaattttacagtgaaaaggacaagacttacgatcttaacttcaaggaggataacaacgacggttcacacaaaatttcaggtgacagcctgaaagatgtgtacaagtcctttgtttctgagtaccctattgtgtcgatcgaagatccattcgatcaggatgactgggctacctatgccaagcttactgatgagattggacagcaagtgcagattgttggggatgaccttcttgttactaatcccacaagggttgccaaggcaattagtgaaaagacttgcaatgctcttctcttgaaggtgaatcaaataggctcagttactgagagcattgaggctgttagaatgtccaagcgtgctggatggggagtgatggcaagccataggagtggtgagacagaggataccttcattgctgacctctcagttggtctgtctacgggtcaaattaagacaggagctccctgtcggtcagagcgtctggctaaatacaaccagctgctcaggatagaagaagagctgggcgatgctgcagtttacgctggagaaaaattcagagcccctgtgaagccgtaataaaccttggcaccttgcggtgatcttgtgcctatggaccatggtgccatcaatctactactgcgtttttacacgagtctacaagggcaataaaattagtacttcttgacagtcccagaaattgcttagttaccctcgctttttcgttaatggccagattgtttgcttactactgtgttgacacacttgagcaccaatatgtaagatcaataaaagagcaaatcgcttgatttttcatcataaagtatttttttccccactcaacaaaaaaaaaaaa

SEQ ID NO: 3464 - DNA, 2424 bp, Oryza sativa
  Clone ID: PAT_MRT4530_86446C.1
tcacgtcaatgcaaggtgtttgttgctatcacgacgtatcctggcggcaaggatctggacgccggcatacttgacgtcccagctgaacttggtgatggcccagcaggtgccgccaaactcgtccgcgttgtcgacgatgtagtcgaggtaggcggcggcggcggcaaaggcatcgcgacgtgcgtgggcgcggcgggagccgtcgcgacgccttgaggacgacgagccgtagctccgcctcgagggcgcctcgtcgccgctccgtctcgaggcagcgcccgccctcccgctggctgtcgccgctacggccctcaaacacccaccgccgctctggccatagttgagggagttaaagtatactttttccaggaaaaaatgaatcgagtgtgtcaaaccgcgtgtcatccccactctacaaagcgcaaaatcatcaagggccttcgcctcggcgtggaggagagtgaggacggcccacgcggaccagcagagagtggcgggctcagtgtcgggctcgccggagtccgcccaatccggccggttcatgcttcattctctcggacattaacctggtttacttgtaagaaagtagagccatggactcctcataccagcatgacaagcctctgctggatgaagagaactcctcgcaagtgacccttgaatatacaggtgatggatctgtttgcatccgtgggcatcctgctttaaggaaacatacagggaactggaagggttcctcattagccatcgttttttcattctgctcttatctggcctttacttcaattgtaaaaaacctagtcagttatctcacaaaagttctacatgaaacaaacgtggccgctgcaagagatgttgcaacttggtcaggaacaagttatcttgcacctctggttggagccttcttagctgattcatatctggggaagtactgtacaattctgatcttctgcacgatcttcattatcggattgatgatgttgcttctgtcagcagcagttccattaatctctactggtcctcactcatggatcatatggacagatccagtctcttctcagaacatcatattctttgtcggtttgtacatggttgctttagggtatggtgcacagtgcccctgcatatcatcatttggtgctgatcaatttgatgacactgatgaaaatgagagaacaaaaaagagttcttttttcaattggacctatttcgtagccaatgcgggctcattgatctcggggactgttattgtgtgggtgcaagatcacaaaggttggatctggggttttaccatttctgcactatttgtgtatttaggttttggtacttttatctttggctcctctatgtatagatttcagaaacctggaggaagcccctcttgcgagaatatgccaggttgttgttgctgctattcacaaacgcgataaagatttgccatgtgattcctcagttctttatgagtttctggggcagagttcagcaatcgaaggcagccgaaaattggagcatacaactggacttaagttctttgatagagctgcaatggtgacaccatctgattttgaatctgatggcctactaaacacatggaagatttgcacagtcactcaagtggaggaactgaagattttgatcaggatgttccccgtttgggcaacgatgatattatttgctgcagttctggacaacatgttttcgacattcatagaacaggggatggtgatggagaaacacatcggctctttcgaaatacctgcggcgtccttccaatccattgatgtcattgctgtccttatactagttccagtctatgaaagagtccttgttccagtgttcagaaaattcactggcagagcaaatggcattactccactgcagcgaatggggatcggcctgttcttttccatgctctccatggtatcagcagcattggtggagagtaatcggttgcggattgcgcaggatgaaggtttggtgcacaggaaggtggctgttccaatgagcatcctgtggcagggaccccagtacttcctgataggcgtgggagaggtgttctcaaacattgggttaactgaatttttctaccaggaatcaccggacgccatgagaagcttatgtctcgcattctcacttgctaacgtttcggcaggaagttacctcagctcgtttatcgtttctcttgtgccagtgttcacagccagagaaggcagtcctggatggatacctgataacttgaacgaagggcatttggatcggttcttctggatgatggctggcttgtgtttcttgaatatgctggcctttgtgttctgtgccatgaggtacaaatgtaagaaggcttcctgaaccttgttaacattagcaatataatggtggtggaaaaggacaattgtgttgcaaaaaaaaaaaaaaaaaaaaaaa

SEQ ID NO: 3465 - DNA, 796 bp, Oryza sativa
  Clone ID: PAT_MRT4530_86520C.1
ccggccgggcgatccatttttcattctattttctcccccttttccttctcacactacacgaccgccatctccattccttctttcgcgcgcacggccgccgccggccgccgtcaatctcctgcagcgtgtggactccgacggctgtggcctcctctgctcatgctcatgctcattctcattctccattgatgggtttctttcatgtagggaaaggaaaggtgatttcagttgcctgactgctgccagaatctgcgaagcatctacaagcgacgccgtcgttcaggcagccggcacggcaatgccggttccccttgctccatacccaaccccgcctgtgccatttacacctcccaatggggctcaaagccagctcgtgtgctctgggtgccgtaatctgctcatgtatccagccggagcaacgtcggtttgctgcgcagtttgcagtaccgtgactgctgtgcctgctcctggaaccgagatggcgcagttagtttgcggaggatgccacactctcctgatgtatatacgcggtgcgacgagtgtgcaatgttcttgctgtcacactgtcaacctggctatggaagcaaatcaagttgcgcatgtaaactgcgggaactgccgtatgctgctcatgtaccagtatggcgcaaggtctgtcaaatgcgcagtctgcaattttgtgacatcagttggggaacactgggacccaggtgattggtacaatctctctgactgtcacccaaagctgatgtctgcttggcaacagcttgcagtgatggcatgtgatgcattttga

SEQ ID NO: 3466 - DNA, 2460 bp, Oryza sativa
  Clone ID: PAT_MRT4530_86643C.1
atggctggattggtcatcggctacctggccgtgcagctctcgctgatgtctctgctgctctgcccgtcctcgtcgacggcgcagcacacgctgggcagatcctccatgtcggtggaagaccacgcgcggccgttcctggtgtcgacggacggcagcttctcctgcggcttcctcgaggccggcgacaacgccttcaccttctccgtctggttcaccgccgacccgaacaggaccgccgtctggtcggccaaccgcgacgcccccgtgaacggcaggggctccagggtctcgttcagccgcgacggcgagctggccctcgccgacaccaacgggaccacggtgtggtcgagcaaaacgacggctggcaccgggaacagaaggggcctgaccgtctccctccgcgacaccgggaacctcgtcgtcggggacccgtcgaccggcctcgccgtgtggcagagcttcgagtggccgacggacacgctgctcccgtcgcagcggttcaccaagcagaccaagctcgtcgccggctacttcagcctctacttcgacaacgacaacgtgctgcgcatgctctacgacggcccggagatcgccagcatctactggccgctgccggggttgaccgtgttcgaaaacggccggacgaactacaacagcacgaggatcgccatcctcgacgacgccggcgtgttcctgtcctccgaccagacgaaagccgaggccaccgatctgggcctcggcatcaagaggcggataaccatcgaacaggacggcaacctgagaatgtacagcctgaacgcgtccaccggaggctgggcggtgacatggtcggcgctcaagcagccatgccaagctcacgggctgtgcggcaaaaacggcctctgcgagtacctgccgagtctccggtgctcgtgcctacctgggtacgagatggtcgaccgccgggactggaggagaggctgcaagccgacgttcccagtcggcaactgcagccagggatcggcgccgccgccgtcgccggcgacggcgccgccgcagttcaagttcatcgaggtggcccagactgattttttcggcttcgacctggggtacaccgagtccatcacgttcaagcagtgcagggaccagtgcatgaacaactgccagtgcaccgccttctcgtacaggctcgacggccggggaaaatgctacccgaaaggcacgctgttcaacggcttcacgtcggcgaatttccccgggagcatctacctcaaggtgcccctcgacttcaacgcctcgtcgccgcgggtctccgcgcagcgcgccgccggcctcgcctgcggtgccaacgtcaccgtcgtgaccgtgtccgctgacgtgtacgggatggcgccaggaagcaacgggcagtggacctacttcttcgtcttcgccggcgtgctcggagtcctggacatcctcttcatcgcgacgggctggtggttcctctccagcaagcagagcatccccagctcgctgcaggcagggtacaagatggtgatgacgagccagttcaggcggttcacgtaccgggagctcaagggcgcgacggccaacttcaaggaggagctcggccgcggcggctccggcgcggtgtaccgcggcgtgctcgacggcggtaaggtggtggcggtgaagaggctggcggtcgacgtgacgatgcagggggacgaggagttctggtcggagatgacggtgctcgggcggatcaaccacatcaatcttgtcaggatctggggattctgctccgagcgcaagcacaagctgctggtgtacgagtacgtggagaaccagtcgctggaccggcacctgttcgacgcgtccgacggcagcggcggcaaggcgacgacgctggcgtggagcgatcggtacaagatcgcgctgggcacggcgaggggcctcgcctacctccaccacgagtgcctcgagtgggtcatccactgcgacgtgaagccggagaacatcctcttgacgcgagagtttgaagccaagatcgccgacttcgggctggcgaagctgtccaagcgggacggcggcgccggcgtggagctcacccacatgagagggacgtcggggtacatggcgccggagtgggcgctgaacctgccgatcaatgctaaggtggacgtgtacagcttcggcattgtgctactggagatggtggtaggaagcagggtcgcggaccagaggacggaggccggcgagccgctgcagctgccgcagatcacgcaggcgctgaggcatgtggtggacagcggcgatgtgatgtccctagtggatgccaggctgcaggggcagttcaaccctcggcaggccatggaaatggtgaggatttctctggcgtgtatggaggagaggagctgcaggccgaccatggacgacattgccaagtctctcaccgcgttcgacgacgaggacgaacaccctgcctaccactcttga

SEQ ID NO: 3467 - DNA, 577 bp, Oryza sativa
  unsure (1)..(577): unsure at all n locations
  Clone ID: PAT_MRT4530_86677C.1
gccaataactgcagcggctgaagcgatttgggcgtgttcgattgaagaactagggctggagaatgaggccgagaaaccgagcaatgcgttgttaactagagcttggtctccaggatggagcaatgctgataagttactaaatgagttcatcgagaagcagttgatagattatgcaaagaacagcaagaaagttgttgggaattctacttcactactttctccgtatctccatttcggggaaataagcgtcagacacgttttccagtgtgcccggatgaaacaaattatatgggcaagagataagaacagtgaaggagaagaaagtgcagatctttttcttaggggaatcggtttaagagagtattctcggtatatatgtttcaacttcccgtttactcacgagcaatcgttgntgagtcatcttcggtttttcccttgggatgctgatgttgataagttcaaggcctggagacaggcaggaccggttatncgttggtggatgccgggatgagagagctttgggctccgggatggatgcataacagaataagagtgatttgtttcaagctttgctggg

SEQ ID NO: 3468 - DNA, 2022 bp, Oryza sativa
  Clone ID: PAT_MRT4530_86747C.1
atggccgggaacttgctagccaactatgttcaagtcaatgtcatgctccccctggatgtggtgactgtggacaacaagttcgagaaggtcgatgagacccgggcacagctgaagaagctgacggaggccggcgtcgatggcgtcatggtggacgtgtggtgggggctggtggaggggaagggccccgggtcctacgactgggaggcctacaagcagctgttcaggctggtgcaggaggccgggctgaagctgcaggccatcatgtcgttccaccagtgcggtggtaacgtcggcgacatcgtcaacatcccgatcccgcagtgggtgcgggatgtcggcgcgagcgaccccgacatcttctacaccaaccgtggtggggcgaggaacatcgagtacctcacccttggagtggatgaccagcctctcttccatggaagaactgccatccagatgtatgctgactacatgaagagcttcagggagaacatggcagagttcttggatactggtgtcattgtggacattgaggtggggcttggtccagctggtgagatgagatacccttcctacccccagagccagggatgggtgttcccaggcataggagaattcatatgctatgataaatacctggaggcagatttcaaagcagaagcagcaaaggctgggcatcctgaatgggaattgcccgacgatgctggagagtacaatgacactcccgagaagacccggttcttcgcggataatggaacatatgtcactgagaaggggaagttcttcctcacatggtactcaaacaagctgataaaacatggagacaagatcttggatgaagcaaacaaggtcttcttgggatgcagagtgcagctggcaatcaaaatctccggcattcattggtggtatagggttccaaaccatgcagctgagctcactgctggatactacaacttggacaacagagatggctacagaaccatcgcacgcatgctcacaaggcaccgtgcctgcgttaacttcacatgtgctgagatgagggattctgaacaaagctcagaggcaaagagtgcaccagaagaactagtccaacaggtcctgagtgctggatggagagagggcttacatgtggcatgcgaaaacgcactcggtcgatacgatgcaacagcttacaacacaatactaaggaattcaaggccgacaggcatcaacaagaatggacctcctgagcacaagctatttggattcacctacctccgattatcagacgagctgctggagggacagaactacagcacattcaaaactttcgtcaagaggatgcatgctaacctggagtcctccatctatatgagggatcctatcccaggcaactacccctcctcccttaccccctgccgggacgtcgtcgtcatcatcgcctccgccctcctctgccagcagcgatctcgaggaacgccaccgcgcaggggggctcgatccggtgggctccgcgctgcatgcagggcacgctcccgccgccgtacagggtggcggttctggaagccatcgctgcctccagcagcggccggcggagggtctcggcctctcgggagagggggtactggatcgagaactgaccggaggttttcggcggcgcagcgtggacaattcggcctccccgcgaatccggcagccaccggagcggcagccgagggtcgccgccccggcgaacttctccgcggctgcctgtcagtgtccgccgctgtcttctgcagcgccgccagcgtaagattagttgggccgactctatcgtgcaccatctcagtgcgacttcctgccttccagcgtgagagaaggaatgggaagagaaaaggtaaggatggctcatgcctggtctttggaagggaggtggccaagcaggtcggaactttctacaccgagctggtcctgctcaccgtcggagctcgtactcacactctcgtccactccggtgcggtgccactagctaggaataagttcactttaggtttcttgatttatcgttga

SEQ ID NO: 3469 - DNA, 2187 bp, Oryza sativa
  Clone ID: PAT_MRT4530_8698C.1
attcggcacgaggccgcctccgcctccgcctccgcctcacctcgcgccgtcgccgtcgccaagagccggcgagttccgtttccgcctctgcctcgtccaagtccaagccaactacctaaacctaaaccctattcttcttctttcgcctccgccgcgatgtcgtcggagcctccacccgatgccgccgccgccgccgcctcctccgcgggggatctcgcggccgatctctcctccgccaccatcagcaagaagcagctcaagaaggatgcgaggaaggcggagaaggccgagaaggcgtcgcagcgccagcagcagcagcagccgcaggccgacgccgacgaccccttcgcggccaactacggcgacgtccccgtcgaggagatccagtccaagaccatctccggccgcgtgtggaccgagatcggcggcctcgacgaggccgccgccggccgctccgtcctcatccgcggcgccgcgcaggcgatccggcccgtcagcaagaagatggccttcgttgtgctgcgcgagagcatgagcaccgtccagtgcgtgctcgtcgccagcgccgacgcaggggtcagcacccagatggtgcgcttcgccacctccctcagcaaggaatcaatcgtcgacgtcgagggcgtcgtctccctccccaaggagcccctcaaggccaccacgcagcaggtggagattcaggtgaggaagatctattgcatcaatagggcgatccccacccttccaatcaaccttgaggatgcctcacggagtgaggctgaaattgaaaaggctgaacaagctggagagaagctagttcgtgtgggccaagatactcgcttgaactatagagctattgatctccggacacctgcaaatcaagcaatattcagaattcaatgtcaagttgagaacaaattcagggaatattttctgtcgaaaaattttgttgggattcacagcccaaagctaattgctggatccagcgaaggtggtgcagctgtattcaagctacagtacaatggacagccagcatgtttagcacagtctcctcagttgtataagcagatggctatttgtggtgggtttgaacgtgtatttgaggttggacctgtttttagagctgagaattcaaacactcacaggcatctgtgtgagtttgttggccttgatgctgagatggagattaaggaacattattttgaggtttgcgacataatagatggtttgtttgtagcaatatttaaacacttgaatgaaaattgcaagaaagaactagagacaataaacaggcaatatccatttgaacctctgaagtatttagagaaaactttgaagctcacgtatgaagaaggaattcaaatgctgaaggaagctggaacagaaatcgaacccatgggtgacctcaacactgaagctgagaaaaaactaggccggcttgttaaggagaagtatggaacagaatttttcatcctctatcggtatcctttggctgtgcgtcccttctacaccatgccttgttatgacaacccagcttacagtaactcttttgatgtctttattcgaggagaggaaataatatctggagcacaaagaatacatttaccagagctattgacgaaacgtgcaacagagtgtggaattgatgcgagtactatttcatcatatatcgaatcgttcagctatggtgcacctcctcatggtggttttggtgtcggcctggagagggtggtaatgctgttctgcgccctaaacaacatcaggaagacatcacttttccctcgcgatccacaaaggctggtgccataatttgctttttttcccaagagcaaggtttggactcagtacggactgggcagttttcctcggctggtttttttacctggacattattttcgtatttattaatgtgctgtactgcaaaagctgctcctttccacaacatttggaatagttgccgatacatttggaatagggctcaacgttggcgttgtgatttcgttgatgattccgctattcgtaacaatggcgaatccagagcagaaatgaccctatgtcagaaacatatcacatactcgtatgcctatatttccaaaagataagggattatggaaggatgacatattcaagtcccaaaatacaaggtgtggtttgactcgtggtcttcaacatccaaaaaaaaaaaaaaaa

SEQ ID NO: 3470 - DNA, 2447 bp, Oryza sativa
  Clone ID: PAT_MRT4530_87187C.1
cccccaagtcgcgccccccccccctcgccaaaaccaaaaccctaatcctcgcctccctcccctcccctcccctccccgtccggccatggcggcgtcgctgcttctccgagccgcccgccggcgagacctcgcctcgcccctcggaacgttgaccgccaatgctcaatcggcatattctgcgaatatttgttcacaatggggtagttttgcaagagctttcagtgtaaaaccaactggaaacgaggttattggaattgatttgggaacaactaattcttgtgtttctgttatggagggaaagaaccccaaagtgatagagaattcagaaggcaccaggacaacaccatcagttgtggcctttaatcagaagggagagcgacttgttggaactccagccaagcgtcaagcagtgaccaacccacaaaacactttctttggcacaaaacgtctgattgggagacgctttgaggatccacaaacacagaaagagatgaaaatggtaccatacaaaattgtgaaggctccaaatggtgatgcttgggtggaaacaacagatggcaagcagtactcaccaagtcagattggtgcatttgttttgaccaagatgaaggagactgctgaatcttaccttggtaaaactgtttcaaaggccgtgattacagttccagcttattttaatgatgctcagcgtcaggcaaccaaggatgctggtcgcattgctggacttgatgtccagaggatcatcaatgaaccaactgctgctgctttgtcttatggaacaaacaacaaggagggtttgatagctgtgtttgacctgggaggaggtacctttgatgtctcaattcttgaaatctccaatggggtgttcgaggtcaaagcaacaaatggtgacacttttctgggaggagaagactttgataacactcttttggagttcttggtgagtgaattcaagaggagtgaagctattgatctggcaaaggacaggctggctctgcagaggttacgtgaagctgctgagaaggctaaaattgaactctcatcgactgcccagaccgagattaaccttccattcatcacagctgatgcttctggagctaaacatttgaacattacacttacaagatcaaagtttgaatctttggtgaatagcctcatcgagaggaccagagagccatgcaagaattgcttgaaggatgctggtataactaccaaggaggttgatgaggtccttcttgttggtggaatgacaagagttccaaaagtgcaggaaattgtttcagagatttttggcaagtccccaagcaaaggggtcaacccagatgaagctgtagccatgggtgcagccatacagggtggtattctccgtggagatgtaaaggagctgcttctccttgatgtgacccccctttcacttggtatcgagactcttggtggtatcttcaccagactgattaaccggaacactacaatccccacgaagaaaagtcaggtgttctccactgctgctgacaaccagacacaagtgggcattcgtgtcttgcaaggtgagcgtgagatggcgacagacaacaagcttcttggtgagtttgatcttgttggcattccaccagcgccaagaggtatgccacagatcgaggtcacatttgacatcgatgccaatggaattgtgacggtctctgcaaaagacaagtctaccgggaaggagcagcaaatcaccatccgatcctccggtggcctctcagaagctgagattcagaagatggtccaggaggctgagcttcactctcagaaggatcaggagcggaaagccctcattgacatcagaaacaacgctgacactaccatttacagcgttgagaaaagtctgggagagtacagggacaagattcctgcagaggttgccactgagattgagacagcaatcgccgatctccgctctgtgatgacctcagatgacatcgagaagatcaaggccaatatcgaagcggccaacaaggctgtttcaaagattgggcagcatatgtctggtggtggtggtggcgcaggcggttcagagacaggaggatctcagggcggaggcgagcaggctccagaggctgagtacgaggaggtcaagaagtgaaaccgcatgtgctaacagttgccctgcttttagagatagcagctagtagttttttggaagagaccgggatactaggaccttgcgcgttgtaataagttttgtcatacgaaaacacacctaagctcgtaggcctgtctagttgggttgtaatgcatgacttggttgcattggctccttttgcttgcgatacatcgcgcaaactggacgtgatattgtgatattttttttcaccctgttcactcatgagtacaatgaatcctgcatggaagaaaaaaaaaaaaaacaaaaaaaaaaaaaaaaaaaaaggaggggggcctcgtgc

SEQ ID NO: 3471 - DNA, 344 bp, Oryza sativa
  Clone ID: PAT_MRT4530_87581C.1
gggaccaaaattagacggcctttaattggaactagaggatcacaaactacgtccctcgacaaaagccccggataaggggcctatgcattttcgcagggaaaaagggacgcccctcgaaaccatcacatttttaaacaacctaacccaggagctagataaaaaaacaccaggggggggggaacacataactacagttggtccttataaaacaacaacggttccgcctcctccttgaggggggaggattcctttttttaaacctgggcctactagacctccttttccttttccacggccgtgtaggggctaaggtcaaggctcttctgaaccgacctgtaaatgct

SEQ ID NO: 3472 - DNA, 804 bp, Oryza sativa
  Clone ID: PAT_MRT4530_87677C.1
atgccaatctacgtcatgacagcgctcaagattccaaagcaaataatccaagaaattgataaagcaagaagaaaatttctttgggacggtggcgatgagttccacggtggcaagtgcaaggtgaattggcagcgagtttgcagaccgatcaagtatggtggcctgggggtctcgaacctcaccaagatgggacgggccctccatttacgatggctgtggtacgaatggaccttcccagacaaaccgtggattggtatgccaaccccatgtgacgaacaggacgccgagctctttgcagcatccacaacggtgaccatcggggacagcaggaaggcgctcttctgggaatccccttgggtatccagctccccactaaagacaatggcaccaaacctctaccgtcatgctagaaggaagaaaaggactgttgcaaatgccctacaggacaataagtggatcaatgacatcagacacaacttgacatcaatgctcgtcacggagttcttcaaggttttcgagatactttgggaatcaaacactaccctatcccaagatataagagatggtgtttctgttggggctttacggcggctgtggcagccggaggaggacggccgcgtcgtcgacgggtggcgtggagaggcggcggttggcagcggtggcgatggcgcggccggtgaggcaactgtaccggaagctgaggtcaaagtggaggagctcggcgtcgacgcagccggggaagaaagccggcggcgcggcgaggttcgggtacagcctggagagctactcccgcaacttcgatga

SEQ ID NO: 3473 - DNA, 3230 bp, Oryza sativa
  Clone ID: PAT_MRT4530_87860C.1
ctagagatcaaagttgagacttaatctggtgccatggagttctatcttcgctgcgaggttctcctggcagcgattggtcgctcctgtctggctattggcggtgagggtgaacgggttaactttgctagggttgtcagcaccaccaccgtgtactgcttcctccatcaaatcaagatctttcttaagtttaggcaaaccacgaacaagatccaaaccacttaacctagtgagatgatcaaaaccaacatgtccaagttttaagtcctcaactaaagctacgttcttcaattcaaatttctcatttacctttaccaaacctgtagcgagaacggcactagtagaagcatcaccaaagataatcgattcagtcttggatgcctttttgacggaggagaaccaatttttatcaccaatcatgtgccgcgaacaaccagaattcacgatccacacgttctccttccttgccaccaaaggatacacaccagcagaagtcgaagcctcagtattttcacgatcattagaaacattggtagactcagatggcttagcaacacaagcaacaaatgaaggttttacatgcacaacattggattttgaagatgatgcactcaaggtagagatgatgccagcagatttaaacacaatgttcttatcttcaggtttaaccaaaatttcaccacttctagcaccaacacctaacacaacaggaggatgtctagaattatgagcataaggatcaaaacctcatcttgattaacaatctcttccatgtgtataacacgcccaaaagcatctttcaacttcatctcattcaaaacacactttgaacaatcttgagaaatcaaaacaccattgttttgttttgctttattcacacatgaagcattgaccaaagaacttgcacaaaaagcaactttgtatttttttcaaaacgttctttgtcaaaatcaactcatcaacaacacgagcatgtaaagcaaatccaatcgcaaaagaagattccaacgttttagatttttcaatctaaaattccaattttttgcaattaacagaattggcatctcgcaaagcattaatttcagaaaataaaacttcacaagattaacaattatcatcatcagaaatcgaagattttaatctatcaatttcagcatttagaatctcaatagtgtgatccttctcatcaagcacaatagaacatgtttaaagtttttttagcaaatttgtaagcagcaagttctaattgatcataactatgcttttcttcattatcatcatcagattcatcaacatgagaactttcattacgagcaataaaaactaaatcaacaacttgcttacctttgctctcatcttcatcttccgattcatcaaaaacttttatgagtttttggattaaccacttgatacaatgcttcttcttctccttctccttcatgttcttcttcttgttcacgtcatcctctttgactctaccatcatcttccttcttgcctctcccaagcttaggacaatgcgagcgaagatgatcaagtgcaccacactcaaaacaatgatttggttctcctcttttcctgtttctaacatttttcatagctcgagaaaatttgttagatagcaaaaccaagtcctcctcctcgaactgttcgagttgatcatcggacatggcattaaataaagcaagaacagaagacttcgatgaagaagcaccaacatccaaagaagttgaagacgaaaccaaagcactagacttagaatcacctttacgagaaagaatattcatctcatgagttttcagttttgtgtaaagcgaatccaaagtcaaagtagacatgttcacggactcctgaatagaagtaactttcatctcccaaatagacatgtcaagaccattcaaaaagtgacgagaaatctcagattgtggataattagcatcataagaagaatcaacagatctaagatcactcaaaattttattaaacctagaaagatagtcatccaaagcttctccaggtttcatctcaaatttaatgtactcctttttgaaaagatcacgacgaaattctttaatgttatttgtaccttgatgaaaattattcaaagcaacccaaatctcatgagcagtttgaagatgagcaacacgatcataatccgaacaagaaatcccactcaaaagaatattgcgagctttgcaattcagttcaaaagcaattttttcagcagcagtattaataacttcaggaatcacataaggaagagaaacttttctccaaatatcataattctcagccataatgtaagattgcatcctacaccaagccgactcccggtccatcaccgcaaatactctccctaggcatcgagtcaccgctcgatcaccgctggtctgaccggcatacacagcctggtcagaccggtcacataaaataacagtgaatccgatcatcaccggctggtaggaggcgatgaacacgtcgtcgtagacgagcccggccaggccaccaccgatcagtgggccgacccagtacacccagttgccggcgaagttgccggccgcgacggccgggccgaaggagcgggcagggttcatggaactgccgctaaagggccccgccgccaggatgttggcaccgacgatgaagccgatggccatgggcgcgacggtgccgagggaacccttcttcgggtcggccgccgtggcgtacaccgtgtacaccagcgcgaacgtgatcacaatctccatcaccatgccctcgatctcgctaattccggcgatggcgtgcgtcgggatagccaacctgtccgtgggtggagaactgcagagcagacacgcgacggacgcgccgagcagctgagcgacccagtagaagatgccggtgaggatggtgatgtggccaccgacggcgaggccgaaggtgacaacggggttcaagtggccaccggagatgttggcggccatggaaactccgacgaacagcgcgaaggcatgggctatggcgatcgccaccagaccagctgggtctagcgcgccgccctttgtcagttgcccgtaggcaatggcggagccgacgccggcgaacacaaagaggagtgtggcaatgaactccgcgacataggccttgatggacgaggcactgaaagagtcgccgcagcttccaaatgcaagcttcaccatctttctttatgcgagtagaagagcttttaggctaggacttcaaaggagatggttg

SEQ ID NO: 3474 - DNA, 743 bp, Oryza sativa
  Clone ID: PAT_MRT4530_88073C.1
agacggctccgcctagggccatgatgctgcccagctcttggcctgcctaagtgacctgaatggactaggaatccttgatttggaactaatgaataaatcactacttggtaaatggctttggaaacttgagactgaagaagggtcatggtaggatttgtttaaagcaaaatatttatatcacacaacattgagacacaaaaaaaaaaaactcagcaatggtgattctatcttttggcagggtttaatgcaagtgagagatgatttcttaaaatcctgttcaaaagaaattggtaatggagaaaacactctctttcgggagtacagatggaacgggaaggaaccttttgctgttaaatatgctaacctgtataatgtggctatgactaagaatgtcacagtagcaaaagtttcgagagaacgttggatgtgctgagttttagaagaaagatggagggaaaaaaataaatttcctagcaaaatttgaaaaagaatttcatgaacatcactttgaataatcagaaagatagtttggtctgggaactggataggaagaaaaggcttttttgtgaaatctttctatagagcgctgcagattcaacaaataaagtgccctaataggaaaaaatctgagcttggcgtaatcatggtcatagctgtttcctgtgtgaaattgttatccgctcacaattccacacaacatacgagccggaagcataaagtgtaaagcctggggtgcctaatga

SEQ ID NO: 3475 - DNA, 1430 bp, Oryza sativa
  Clone ID: PAT_MRT4530_88123C.1
ccggccggggccgcaccccccggccgggctccctcctcctcacctccacccatcgtgcgctaaactctagccagatctcgctcgctcgccgctcgccgccgccgccgcgttccaccgagcggagagtagagggaatggcgtccgagggcgtgctcctggggatgggcaaccccctcctcgacatctccgccgtcgtcgacgacgccttcctcaccaagtatgacgtcaagctgaacaatgcaattctcgctgaggaaaagcacttgcctatgtatgatgagttggccagcaagggcaatgttgaatatattgccggaggagccacccagaactctatcagggttgctcaatggatgcttcaaactcctggtgcaacaagttacatgggttgcattggaaaggataagtttggtgaggagatgaagaagaatgcccaagctgctggtgttactgctcattactacgaggatgaggctgctcccacgggcacatgtgctgtctgtgttgttggtggtgaaagatcactggttgcaaacttatcagcagcaaactgctacaaatctgagcatctgaagaaaccggagaactgggcactagtggagaaagcaaaatacatctacattgctggctttttccttacggtctccccagattctattcagcttgttgctgagcatgctgccgctaacaacaaggtgttcctgatgaacctctctgcaccctttatctgtgagtttttccgtgatgcccaggagaaggttcttccgtttgtggactacatcttcggtaacgaaacagaagcaagaatctttgctaaagtccgtggatgggagactgagaatgttgaggagatcgcgttgaagatttcccagcttccattggcctctggaaaacaaaagaggattgccgtgattactcaaggtgctgatccagtagttgtcgctgaggatggacaggtgaaaacattccctgtgatcctactgccaaaggagaagcttgttgacaccaatggcgctggtgatgcctttgttggaggcttcctctcacaattggttcaacaaaagagcattgaggactctgtgaaggctggttgctatgccgcaaatgttatcatccagcgttctggctgcacttaccctgagaagcctgatttcaactagggctaacccaaccacatattgaggaacaattattcgcacatccaacctactagtggtttggtgtgttctacctgtaccatctcgaggctttccatatgatccggccaatatttttttgccgtgatttttgtttcactgctgcaaaccttactttattctcggtataaggcacaattgccaatcggtgtgttgttttggtcaaaaaaaaaaaaataaaaaaaaaaaaaaaaaatatttactgttcggccatttctcttttgctcttttcgt

SEQ ID NO: 3476 - DNA, 1523 bp, Oryza sativa
  Clone ID: PAT_MRT4530_88136C.1
atggcgaggacgcgctttctcgctccgcgggcggcggcttcggcggcctccgccgtctccgcgaagccggcggcggtggcgccgctgtacgcggaccgcacggtcgtccgtatcgggctccccagcaagggccgcatgtccgagcaaaccctaagcctccttaagagttgccaattgtcagtcaggcacctcaacccgcggcagtacaccgcagatatcccgcaggtcccaaacttggaggtttggtttcagaggcccaaagatattgtccgcaaactacaatctggggatcttgaccttggcattgttggttttgacatagtcagtgaatatgggcagggtattgatgatttagtagttgttcatgatgctctcgagtttggacattgtcgtttgtcccttgcggttcctaaggaaggcattttcgagaatataaatactctggaggatttggcaaatatgcctgaatggacacaagagagaccattgcgtgttgttacaggatttggatatctatgagaaaagtttatgagagaaaatggtttcaatcatgtttcgtttttagctggagatggagctcttgaatcatatcccgctatgggtatggctgatgttatcgtggatcttgtgagtagtggaacaaccttacgtgagaataatttgaaggaaattgatggtggagtagttttggaaagccaggccacgcttgtcgcatgtaggagatcgctacacaaacgtaatggtgtcttggagattacgcatgagatgcttgaaagattagaggctcacctcacagcaactggggagataatggtcacagcaaacatgagggggaacagtgcggaagaagtggcggaaagagttctcagccaaacatcgttatgtggattacagggcccaaccataagtccagtctaccgctcacgtgatgggaaggttgctgtggaatattatgcgattaatgtagtagttccacagaagtctctttacaagtccattcaacagctgagatctattggtggcagtggagtcttggtgacaaagctgacctacatatttgatgaggaaactcctagatggcgcaaactactttcggagctggggttgtgacttggtgtgaagtctgccatacttctctgtcaatgacccttttagcatcggtttacttatgctcgctgaagtatactacaaccataatcagaaatgagctctcgtttgaagtgtctgcggtgcttatttgagaggaaattttggtctgtgccatcgtacattgtgctcgtctagttatacctttgacaagcatatgggttgaaataccctttatgtacctgttgatataattgtgagaccttattgccttgttggataggtgtgcgtatgaattgtaccttttcttgcgtgacgctgaataaattgggctttctgcaataaagatggatggtgtaattccaccccgtagcaaaaaaaaaaaaaaaaaactcgagactagttctctccctcgtgccgaattcctgcagcccggg

SEQ ID NO: 3477 - DNA, 1322 bp, Oryza sativa
  Clone ID: PAT_MRT4530_88198C.1
cccccgccgtccgccgccctgcacgggtagaagtagcgccgtgttgtagtgttgtgtagcagtagtccaccgctgagaagctagcaaagccagccatccattcagcgcagtactctcgggagagctagaagcgatctattctagccacaaggaggagagataaacgtatcgaaatggagcacatcgcgaggttcttctttggagtttccggcaatgtcatcgctctcttcctgttcctttcgccagttgtcaccttctggaggatcatcaagaagagatcaacggaggacttctccggcgtgccttacaacatgacacttctcaactgcctgctatctgcttggtacgggctgccgttcgtgtcaccgaacaacatcctggtgacgacgatcaacgggacggggtcggtgatcgaggccatctacgtggtgatcttcctcatcttcgcggagaggaaggccaggctgaagatgatgggtctcctgggcctcgtcacctccatcttcaccatggtggtgctcgtctccctcctggccctgcacggccagggccgcaagctcttctgcggcctcgccgccaccatcttctccatctgcatgtacgcctcgcctctctccatcatgaggctggtgatcaagacgaagagcgtggagttcatgccgttcctgctctccctgtccgtgttcctgtgcggcacctcctggttcatctacggcctgctcggccgcgaccctttcatcgcgatccccaatggatgcgggagctttctgggcttgatgcagctgatcctctacgcgatctaccggaaccacaagggggccacgccggcggcggcggccgggaagggggacgccgccgacgaggtggaggacgcgaagaaggcggccgccgcggtggagatggccgacgccaagaccaacaaggtcgtcgccgacgacgccgacgccgacgccgatggcaagtcggcggacgacaaggtcgccagccaggtgtgacgcgttcggggccccgcacggcgcccggccgacacgcacggaagaatgcagcttaaagcattgttgctgctgctggattgattagtggttaagcagattattgctgtcgcctttcttgatttttctttttactgatctctgtctctcgtgcccgatcgagagagtatgatactgtatttcccgttctgttcttgcaagcgtgaagccatttcccattttttttctaccgtacgatactgtatgccccccaggcccccataatgaagaagaatccgagcagaaatgcataaaaagaagaaaaaaaatctagtttaaaaaaaaaaaaaa

SEQ ID NO: 3478 - DNA, 4242 bp, Oryza sativa
  Clone ID: PAT_MRT4530_88374C.1
atggctcccatgctctcgatcgcctcccgctcgccctcgccggcgttgattgcacctcacgcctccgcccgcgccaccggtcttcgtgctccgttcgccggcaaccgcattgtggggtgggggtggggggatcaaaccaaatcaggtacggatcgtaatcgcgcatcgatctgtgtcgtcctgttcctgcgcgtccgctccggcgagcccacgcaggcgccgcgggatccccctgctgcggtaggcggcggcggctgctacgtccggctgccggcgccgccgcgagaccgggacgcggttttgtatcacgtttgcttgttcactctacttctctgcttcatccctatcactgctttggcggaatccgatatcaagaatttatttgctctgaggaaagcaatcgctgttggaaaaggcttcctccacaactggtttgagctagaaactcctccatgcaactggtcaggtatatcatgcgtggggcttactgttgtggccatagacctgtcatctacgccactctacgtcgattttccatcacagatcattgcattccagtcactcgttcggctcaatgtaagcgggtgcgggttttccggtgagcttccagaagccatggtgaatctgcagcatctccagcacctagatttgagtgataatcagcttggtggccctctacctgcctcattatttgacttgaagatgctgaaagttatggtgcttgacaacaacatgttctctggacaactaagccctgccattgctcaccttcagcagctcaccgtgctatccatatccacgaattccttctctggaggcctccctccagagctaggcagtctgaagaacctggagtacctcgacattcacacaaatgcatttagtggatcaataccggcatctttcagtaatctatctcggctcttgtaccttgatgcaaacaataacaatctcaccggatcaatattcccgggaataagagcgttagtcaaccttgtcaagctcgatttatcgtcaaatggtttggtgggggcaatccccaaggagctttgtcaactgaaaaatctgcaaagtttaatcctatcagacaatgagttaactggaagcatcccagaagagattggtaatctgaagcagcttgaagtactcaatctcctcaaatgcaatctcatggacaccgtccctttgtcgatcggcaatctcgaaatcttggaagggctttatatatcattcaacagcttcagtggtgagcttccagcatctgttggtgagctacgcaatctgaggcagctgatggcgaagagtgcagggttcactgggagcataccgaaagaactcggcaattgcaagaagcttactactctagttctgtccggcaataacttcactggcactatacctgaagaacttgcagatttagttgccgttgtcttgtttgatgtggaaggaaacagactctcaggccacattcctgattggattcagaactggagtaatgtttcatctatatcgcttgcgcagaacatgttcgacggacctctaccgggtcttccattacatctggttagtttctctgcagaatccaaccggctgtcaggatctatccctgccaagatatgtcaaggcacctttctgcagatacttagattgaatgataacaatctgaccgggagtatcgatgagacatttaagggatgcaagaaccttactgagctaagcttgctagataaccatctccacggagagataccagaatacttagctttgctaccactggtgtcacttgatttgtcacataacaatttcacagggatgatccctgacaggttatgggaatcatcaaccatcttggacatctctctcagtgataaccagctaactggcatgatcacagagagcattggtaagctcttgagcttgcaatcgttgagcatcgacagaaactacttgcaaggacctctccctcgatcgatcggcgctctaaggaatctgacagcactgtctctcagtggcaacatgctatctgaggacattccaatacagctcttcaactgcagaaaccttgtcacattggacttgagctgtaacaatctgacagggcacatccccaaggccatatctcacttgacaaagctcaacaccttggtcctgtcccggaatcggctgtcaggcgctatcccttctgagctatgcgtggctttctcgcgcgagtcccattctgaattggagtacgtgcaacacattggattgattgatctgtcgcggaacagattgactggtcacatcccgagagcaatcaacaattgttctatactggtagagctacacctgcaagacaacttgttaagtggcactatacctgtggaacttgctgagctgagaaacataacaaccattgatctatcttccaatgcattggttggacctgtccttccatggcctgtaccattggcaagcctccaaggccttcttctgtctaacaacagactcagtggctccattccttctggcattggcaacattcttccccagatcacaatgctggacttatcgggtaacgcgcttaccggcactcttccattggatctactctgcaaagagagcctaaaccacctggatgtcagtgacaacaacatctctggacaaatcccattttcctgtcatgaggacaaagaatccccaatcccactgatcttcttcaatgcaagcagcaaccatttctcagggagcctggatgaatcgatctccaacttcacaaagctgacctatcttgatctccacaacaacagcctcactggaagattgccatcagcaatagcaagggtcacttctttgtactatcttgacctatcaagcaatgatttcagtggcaccatcccttgtggtatctgcggtatgtttggcctgaccttcgcaaacttctccggtaaccgcgacggtggcactttcaccttggcagattgtgctgctgaagaaggcggggtttgcgccgctaaccgtgtcgatcgaaagatgccggatcatccgttccatgtactggaagcaaccatttgttgcattgcaacggccattgtcattgtgctggtggtgatcctggtggtttatctgagacgacggaggaagatgttgagaaggaggcagtttgtccttgtccctgccggtgacaacgccatggctgaccatgagacaaccttgagtaacaatcttttggggaggaggaggatgaagaagagggagccaccgagcatcaacctcgcgacgttcgagcacgcgcctgtgagggtcaccgtggacgagatcatgagagccaccgggaatttcgacgggatgcacgtcgtcggcgacggcggcttcggcaccgtgtacagggcggagctccccggcggccggagggtcgccgtcaagaggctccacggcgtcggccgccggttccagggcggcgaacgcgagttccgcgccgagatggagaccgtcggcaaggtgaggcaccccaacctcgtccccctcctcggctactgcgccgccggcgacgagcggttcctcgtctacgagtacatggagcacggcagcctggaggaccggctgcgcggcggcggcggcgcggcgctcgggtggccggagcggctcacgatctgcggcggcgccgcccgcgggctcgcgttcctgcaccacggcttcgtgccgcacgtcatccaccgcgacgtcaagtccagcaacgtcctcctaggcgagggcctccagccgcgggtgtccgacttcggcctcgcgcggatcatcagcgcgtgcgagacccacgtcagcaccgtcctcgccggcacgctcggctacatcccgccggagtacgcgctggcgatgcggtgcaccgccaagggcgacgtgtacagcttcggcgtcgtcatgctggagctgctcacggggcggccgccgacgtggtcgtcggcggaggtgacggcggagggtgacgacgagcgcggcggcggcgggagcctcgtcgggtgggtgcggtggatggcggcgcgcgggcgtggcggcgaggtgttcgacgcttgcctgccggtgtccggcgcggagcgggagcagatggcgcgggtgctcgacgtcgcccgcgactgcaccgccgacgagccgtggaggaggccgaccatggcggaggtggccaggagggtgggggcgatcgaggcgatggagtacgggcctctggtggtggcagtgtccagtggcgagccgccggcgatgccatga

SEQ ID NO: 3479 - DNA, 1143 bp, Oryza sativa
  Clone ID: PAT_MRT4530_88443C.1
gagacgcatctcgacgtgtccactgccgcagctgagagaatctggcgcaagaacgtcttctttcttccgctggatctatcaagcatgggccatggtgtaactgtcaacgtcattgatcgatgtgagctgcatgagatccccctgcaaaacaggaagttcacttggagtaatgagcgtcgaaaggcaacccttgtcaagcttgaccgttgcttttgcaatgaggaatgggatcttgctttcccccaccatgttctccatgcctttcctacagggccatccgaccattgccctcttgtactgtccaacccgcaaggcccacatcgtccgaggaccttcaagtttgaaaacttttggacacgggtcccggggttcaaggacaaagtcaaggacatctggagccaaccttcttcgcacactgagcctatgcaccacctgaatcaaaagctgcaacgtacggcggtcggccttagagattggacaaaaggcatctgctcagaggctaaattgcaattccatatggcactcaatgtcatccaaagactcgacgtggcacaagagcacagagaactctcccccccggaaacgcgactgagggcggctctcaagcggaaagtcctaggactcgcttctatagaaagggcaaggaaaaagcaagcctccagggtaactcacatccgtgaaggagatgcgaacacgaagttcttccacctcagggttaatgcgcgaaggagaaggaatacaatccaaagattgaaaaaggacagtggttgggcggtgacgcacggtgaaaaggaattgacgatccatgatcacttcgcaagcttcatggggaggccggggccgaggccaaacgagctaaactgggagacgttggacatcacaccgattgatctagccacgctgggggaacccttcactgaggaggaggtgcatagggcaattaaggaaatgccagccgacaaagcaccgggaccagacggcttcactggggccttcttcaaagtttgctgggaaatcatcaaggatgacattctgctagtcttcagctccatctataacctgagatcgcaagggcttcccgacaagatggatagactggctaggggctttactgtcgtcttcgacatcccaagtcctccttaa

SEQ ID NO: 3480 - DNA, 3172 bp, Oryza sativa
  Clone ID: PAT_MRT4530_88449C.1
tcgccgtcacctattctcgccttggccatgggaggatcgcgattcacgagctggagctggagctcgagcagtcaacagaagaagggaggaaaggaatcctccctcaccccacccgagcaggtattgggctcggaatctgaaggggaattggaagcggaagcggaagcggagccgattctgatgatctgatctgatcgaggccaggggactaatatcttgttgtaaggaacctagtggagtagtatttgatttgcctgctgcatcgacaccaatcaatctccccactactatggctctaggagtcgtcttctttcccttgccgtagggatttcttcctatttttggagatctcatagaccaacggcattaggtcttttggtctttggccgttaatccatgcggagtcccagaagcgcgttgtattcccatcgcccacagttatctttgttgaggcggcgaagaggtccctatccacaccatcacaaggcgtttccaaacccacccaaggcttgcttggatctctccattcgttccacaaccatcgcaatctcagagctcttgtgaacttgtccaagcttaggacaccaaggcccccctggctggtcggcaagcatgtctttgcccagttgaccttgcatttccccccggtgatatcccccgtaccagcccaaaggaagcgatgtctctgcttgtcaagctgctccagggattccttcgtcaccttcaaggcagtgaggagataaattggctgcgctgaaagcacagactttacaagcgtggttctcccggctactgccatgtttttccccctccaacttgcaactctccctgatattttgtcaaagaccggttgcaagtccgtttttcgcagccttcccagaacaagcgggaggcccaagtattttagtgggaaatttgcccgcttcgccggaacgccttggaggacctcttccaggtctatattgccgcatcttatagccgcaacctgggatttctgaaggttggtgacgagtcctgtggctgtgccaaaacgatgtaggatgttcgcgaaagtcgcaacatcgttccgggtgggattaatgaagatcacagcatcatccgcatacattgagatctgcagccgagttgttcttcctcgtaattttgaaattgcacccagctctgttgccttggaaaggatacgctgtagaggatcaatcgccaagatgaagagaagcggcgagagggggtccccttgccgtagtcctcttccatgtttgatccgttgccctggcgagccattaaggaggacttgggatgtcgaagacgacagtaaagcccctagccagtctatccatcttgtcgagaagcccttgcgctgcagcaaggctaggaggtaatcccatcgcacagagtcgaaggcttttgttatatccaacttgaagagcaacattgcccgtcttaggcggtggtatcttctggtcatgtttcttacgaagaggtagttgtcatgaatacttctcccctttatgaaagcgctttgattgaccgagatcaactcatgcatgtggggccttaaccacagcgctagcatcttagcgaagatcttggcgatgctatgaattagactaattggcctatagtccgaaacgctttcagccccatccttttttgggattaggacgatgtttgctgagttgagcaaattcaggtgcgcacatctcaggttatagatggagctgaagactagcagaatgtcatccttgatgatttcccagcaaactttgaagaaggccccagtgaagccgtctggtcccggtgctttgtcggctggcatttccttaattgccctatgcacttcctcctcagtgaagggttcccccagcgtggctagatcaatcggtgtgatgtccaacgtctcccagtttagctcgtttggcctcggccctggcctccccatgaagcttgcgaagtgatcatgaatcgtcgattccttttcaccgtgcgtcaccgcccaaccactgtcctttttcaatctttggattgtattccttctccttcgcgcattaaccttgaggtggaagaacttcgtgttcgcatctccttcacggatgtgagttaccctggaggcttgctttttccttgccctttctatagaagcgagtcctaggactttccgcttgagagccgccctcagtcgcgtttccgggggggggagagttctctgtgctcttgtgccacgtcgagttgttgcatttccacatatcatccaagacaagtaaaaatcttttaggatccagtctttcttcaatggatttttggagctgatccaagttggatgttttatgtgcttcactacttccctcatttccattttgacatatgccacctcaagatttcctgggtgagcccaggccttgtttttagagaagtgcgccactgtttttttgtggttgtataggtgttgggcaaaggtagtctttccgattccaccagggccaactatgggaagaactgatagtgtttcactacgaatggtgcacatgtcatcaagagtctggttaaagatgtcttcccgcccatataattcattctgtgtaattgttgagctgctgggaggtcgcttcagtgatagaacccttcctactgtaggatggataattttgagcaaattggatacatggttacatgcggcatctatgccttctattattgatttgattttctttgacatatctactcgattgaatgtcaacttgccaacatggtcaccggcaccatctcgtgtagaagaagaagaaaagcatgaaaggcagttaccaacggtacggtgaagaacatggtggccatggagtgcctggccacgtatgctgctgtctaccaccggggtggcctcatgggtgccatgaatttggtcctggatgatgaagtactggagctcatccagcgtgtcctcagcctcgtcagccttcttgctgagaatctccaaaagcccaggcaggccagggttgctcacgtccctcctcatctgagcctcgtggagcagcccttgcgtgaacatgagatcgctcttgatctgctccatgttgaggccaagctcggtgctggccacgtaggcctccaccaagctatcggacagctgcgtcaccaccttgccgacgagccagctcgccgcaccaacggccacctccat

SEQ ID NO: 3481 - DNA, 5867 bp, Oryza sativa
  Clone ID: PAT_MRT4530_88450C.1
ccctctcaacgtcacgggcttgcagatctggcccgtgaaacggttattggcccagacaaagagaggtagtccagaagctgatagccttgacacttcttgcagttcgcctcccacaggcggactagctgatcgagaaggttgattgtgatagataaacccgcatcgagggtcaggtcatgcacccaggagtcgtcttctttcccttgccgtagggatttcttcctatttttggagatctcatagaccaacggcattaggtcttttggtcttcggccgttaatccatgcggagtcccagaagcgcgtcgtattcccatcgcccacagttatctttgttgaggcggcgaagaggttcctatccacaccatcacaaggcgtttccaaacccacccaaggcttgcttggatctctccattcgttccacaaccatcgcaatcttagagctcttgtgaatttgtccaagcttaggacaccaaggcccccctggctggtcggcaagcatgtctttgcccagttgaccttgcatttccccccggtgatatcccccgtaccagcccaaaggaagcgacgtctctgcttgtcaagctgctccagggattccttcatcaccttcaaggcagtgaggagataaattggctgtgctgaaagcacagactttacaagcgtggttctcccggctgctgccatgtttttccccctccaacttgcaactctccctgatattttgtcgaagaccggttgcaagtccgtttttcgcagccttcccagagcaagcgggaggcccaagtattttagtgggaaatttgcccgcttcgccggaacgccttggaggacctcttccaggtctatattgccgcatcttatggccgcaacctgggatttctgaaggttggtgacgagtcctatggctgtgccaaaacgatgtaggatgttcgcggaagtcgcaacatcgttctgggtgggattaatgaagatcacatcatcatccgcatacattgagatccgcagccgagttgttcttcctcgtaattttgaaattgcacccaactctgttgccttggaaaggatacgttgggatatcgaagacgacagtaaagcccctagccagtctatccatcttgtcgggaagcccttgcgctgcagcaaggccagtaggtaatcccatcgcacggagtcgaaggcttttgttatatccaacttgaagagcaacattgctcgtctttggcggtggtatcttctgatcgtgtttcttacgaagaggtagttgtcatgaatacttctcccctttatgaaagcgctttgattgaccgagatcaactcatgcatgtggggccttaaccgcagcgctagcatcttagcgaagatcttggcgatgctatgaattagactaattggcctatagtccgaaacgctttcagccccatccttttttgggattaggacgatgtttgctgagttgagcaaattcaggtgcgcacatctcaggttatagatggagctgaagactagcagaatgtcatccttgatgatttcccagcaaactttgaagaaggccccagtgaagccgtctggtcccggtgctttgtcggctggcatttccttaattgccttatgcacctcctcctcagtgaagggttcccccagcgtggctagatcaatcggtgtgatgtccaacgtctcccagtttagctcgtttggcctcggccccggcctccccatgaagcttgcgaagtgatcatggatcgtcaattccttatcaccgtgcgtcaccgcccaaccactgtcctttttcaatctttggattgtattccttctccttcgcgcattaaccttgaggtggaagaacttcgtgttcgcatctccttcacggatgtgagttaccctggaggcttgctttttccttgccctttctatagaagcgagtcctaggactttccgcttgagagccgccctcagtcgcgtttccaggggggtgagttctctgtgctcttgtgccacgtcgagtctttggatgacattgagtgccatatggaattgcaatttagcctctgagcagatgccttttgtccaatctctaaggccgaccgccgtatgttgcagcttttgattcaggcggtgcataggctcagtgtgcgaagaaggttggctccagatgtccttgactttgtccttgaaccccgggacccgtgtccaaaagttttcaaacttgaaggtcctcggacgatgtgggccttgcgggttggacagtacaagagggtaatggtcggatggccctgtaggaagggcatggagaacatggtgggggaaagcaagatcccattcctcattgcaaaagcaacggtcaagcttgacaagggttgcctttcgacgctcattactccaagtgaacttcctgttttgcagggggatctcatgcagctcacatcgatcaatgactgcgcgaaaacgtctcatgcgtgcgaggttgaggttgctattgtttttgtccctagcacggtagatcatgttgaagtctccaaggatgagccatccttccccagggctgggccttaatctcctaatgtgccggaggaacgaatctttgaggtggtgccttgttggcccgtagacaccagtgaggaggaacgtaactcctgagcgaatatctgttatttgcgcggagatcgagaagcggccgattcgaacctcctggacatcaaaatctccactactccaaaggagaaggattcctcctctcgtgcctctcgccggcttgaaggcaaatttatcaagcttgtagcctcctaagaaacgagcaaggccgtcatctatgctttggagtttggtctcttggaagcaggccaaggtgcactttgtgtcgagcatgagctcatggactacgttgcagcgcgcaggtgagtttaggcctctcacattccaggagatgagataacagtctgtcggagcgggtgcaaacacaacagcacgcaaatggaagaggaggaagacgaagttcttgccaacattggcttcgccaactagagatatcagcgccgcatccattgtctcctgctcttcgtcgtcgatgccgaagatggtggtgagggcggcgatgacgtgcgccggcagtgggccatcgaacatggcgacgtactcggcgatgacctgctcaattgaagcgccttcttcgccgttgaggacgcccagccttttgaagagaacgcgttggcagcgctccatcgtcggccgtgctggttgcttggcaatgcgctcactgcgtcgggtgggctggctgtgctgccttgtgcggatcttgaggcgtcgtcccatgtggagcggtcgcgcacacggcgatcttggtggcgacctcggcggtgaggcgatgatcggttgcggcggcgaggcgaacagagcatcgaggacgcccgtcgagatcggtgacgccgaggctgctgcttgggcaagctgggtggcaaccggggaaggtggcggcggcgccacaatgtcgtcaatctccatcgcgccggtggggactaccgggccttgggctaatgccggcgaggtgacccgcgggggcggcgagtcaatctgcgggaatggctctcccacaggggggtcggtcgccgcagccgccagctcaatccgcaggagcgcctcctctacttgttggcaagtagtcgtcgaggtaggcggcggcagcgccgacttgatgcgcgcgaaggcgtgttcgaccgggatcggctcccaggccgcgttctggaaccaggcttcaatcctcggtttggctgggcgacccgagagggctggcgtggcagccttgtctgcgatgatggagagccactgcagttggctcaccggcgacaacgtgttcgtctggggttcctgacacaagaagctggagttgtgcagcgcgtggagcaaacgaaattcacctacctctgcctggttcgcggatttgtgtagaaggggaatgttcatcagtttgctcgagtcgtagaccggatcagccgtgcgccgcgtgccgccgccgctacggttggcgcctcccctgtcccagcgacgcggggagcgcgtgcgctcacggcggtagttgttgtcgcttccccgcctatcatcccggccacggccgagatcccggcctcggtcatcacgatcatcatcgcggtcattgcggcgccagggtctcgggtggtcattgccagacccccgacgacgaccacgcccgccgcgcccgccctgatcgcgggcatggcggccatcgcgatcagcacagccgtcgcggtcgtcgcgctcgccatcccaatcatcctcgtcatcgtggtcgccttcatcatgaaggtgtcctccccgtactgcgcgtccacggcggggtctgtccgcgcggccatcgatggcgtcgcggtcagaccggcgttctggccggcgagcctcccggcgctcgtcatcccgatcacgccctccgaggcgctcgtggaccgatcgtggcggcggcgggtggtgcgggaagtcttcaaagactcgccctgggacctgttcaccgtcgagcactcccaggctccaaggcggtaggcggcgcttggccggctggaagctgccttgcccctccaaatcaatggtcgccgccgtgtagtcatgaatctcctccaagtggaagagcaccggatggcgcacccccctctgccagtgctccagtgggttctccaccgcaaataggggcgccaggttcgggtccttcgcccgctttgtgaagccaagccacatcctcttcgggatggtgctaggattcgccgtccacgcccataggtcgatggagcgcgtgttaccagactccactgggtggacgacgtccgtctcgatctgttccagggcgcaagtgcgaccaatgatgcgctcagcaatgtccgcggcccaggcatgcatggggacgccgtcaagacacaaccgaactcggaacatcagggcgacaccaagcgcgctcttgaggctgcgccacttgatgaagtggatctcaatgccgtgccgcttgacgtatcccttcgccagcgcttcctcacaatgtcgacggtgctggaacttgatgaggaaagcttgtgggtgatggagagacacggccacctcgccacggcggagcttgaactcgtcgaggaaggcctgctcgacgtcgcgcggctcggtggtcggcggagcgcgggccgcccaggagaccaatcttagccaggggcggtcgcggaggcggcgtcgggggccgggtgacgggatcctgcttggcgggtgacggcagtggagcaggggaggcgcggttgcgtggcgaatgcgctggcgagcgggcgcgacgaggggcgggggggtgcgtgtcaggaaggcggcgcgtgttggtacgacggcgaggtggagtgcgttggcgaggcggaggcggggagtgtgaggtagaacgaactcgacgtggtggaggggacgagagccgagcacggtcagcgcgagaagcgccgcagagtcgaggcgcgcggttcgcagcgtcgcggtggcgacagtcgcgcgcccgatggccggagcgacggcagaggaagcagcggactggatctctacactgggctgcacggtggccgcgggagaggcaaatgaaacatttcccactgatctgcgcccaaaagtcgcggtgggagaggcagcctcgcctagtccggacgacgtcgtttcgccttgaaggtggccggtgcgccctgcttgaatgctctccgcttgaatgctctgcacgtctccaccaatgcttccgctgaacccggatccagcccggttctccggggagagagccgcccatgtcctgctcggcgacgcgacgcggaggcaggctagcatcgtagggagcagctctccgcggcgaggtgtcat

SEQ ID NO: 3482 - DNA, 3788 bp, Oryza sativa
  Clone ID: PAT_MRT4530_88573C.1
cgcgatctaggcttgccgcgcgcgcgcggatctgcgagctgcgtagccgtttctcgctgtgagtggaggaggaggaggaagggaggaggatggcggcgaacgcggggatggtggcgggatcccgcaaccggaacgagttcgtcatgatccgccccgacggcgacgcgccaccgccggctaagccagggaagagtgtgaatggtcaggtctgccagatttgtggcgacactgttggcgtctcggccaccggcgacgtctttgttgcctgcaatgagtgcgccttcccggtctgccgcccttgctacgagtacgagcgcaaggaagggaaccagtgctgcccccagtgcaagactagatacaagaggcacaaaggtagccctagagttcagggcgatgaggaggaggaagatgttgatgacctggacaatgaattcaattataagcatggcaatggcaaaggtccagagtggcagatacagagacagggggaagatgttgacctgtcttcatcttctcgccacgaacaacatcggattccccgtctgacaagtgggcaacagatctcaggagagatccctgatgcttcccccgatcgccattctatccgcagcggaacatcaagctatgttgatccaagtgttccagttcctgtgaggattgtggacccctccaaggacttgaattcctatgggattaacagtgttgactggcaagaaagagttgccagctggaggaacaagcaggacaaaaatatgatgcaggtagctaataaatatccagaggcaagagggggagacatggaagggactggttcaaatggtgaagatatccaaatggttgatgatgcacgtctacctctgagccgcatagtgcctatcccttcaaaccagctcaacctttaccggattgttatcattctccgtcttatcatcctgatgttcttcttccaatatcgtgtcactcatccagtgcgggatgcttatggattgtggctagtatctgttatctgtgaaatttggtttgccttatcctggctcctagatcaattcccaaagtggtacccgataaaccgtgaaacataccttgacaggcttgcattgagatatgatagggagggagagccatcacagcttgctcccattgatgtctttgtcagtacggtggatccactaaaggaacctcctctgatcacagcaaacactgttttgtccattctggctgtggattaccctgttgacaaagtgtcatgctatgtttctgacgatggttcagctatgttaacttttgaggctctgtcagaaactgcagaatttgctaggaagtgggttccgttttgcaagaagcacaatattgaaccacgagctccagagttttactttgctcaaaaaatagattacctgaaggacaaaatccaaccttcctttgttaaagaaaggcgggcaatgaagagagagtatgaagaattcaaggtacggatcaatgctcttgttgcgaaggcacaaaaagtacctgaagaggggtggaccatggctgatggcactgcttggcctgggaataacccaagggatcaccctggcatgattcaggtgttcttggggcacagtggtgggcttgacactgatggtaacgagttgccacggcttgtctacgtctctcgtgaaaagaggccaggattccagcatcacaagaaggctggtgcaatgaatgcattgattcgtgtatctgctgtgctgacaaatggtgcctatcttctcaatgtggattgtgatcactacttcaacagtagcaaagctcttagagaagcaatgtgcttcatgatggatcccgcactaggaaggaaaacttgttatgttcagttcccacaaagatttgatggcattgacttgcacgatcgatacgctaatcgcaacatagtcttctttgatattaacatgaaaggtttagatggcattcagggtccagtttatgtgggaacaggttgctgcttcaataggcaggccttgtatggctatgatcctgtactaactgaggctgatttggaacctaacattgttgttaagagctgctgtggtggcagaaagaaaaagagcaagagctacatggatagcaaaaaccgtatgatgaagagaacagagtcttcagctcctatctttaacatggaagatatagaagagggcattgaaggttatgaagatgaaaggtcagtgctgatgtcccagaagagattagagaaacgttttggtcaatcgccaatttttattgcgtccaccttcatgactcaaggaggcataccaccctcaacgaacccagcatctctactgaaggaagccatccatgttatcagttgtggatatgaggacaaaactgaatggggaaaagagattggctggatctatggttcagttactgaggatattctgactggatttaaaatgcacgcaagaggttggatatcaatctattgcatgccaccacggccatgcttcaagggttctgcgccaatcaatctgtctgatcgtcttaaccaagtgctacgttgggctcttgggtctgttgagattctgcttagcagacattgtcctatctggtatggttacaatgggcgtttgaaacttctggagaggctggcttacattaacaccattgtttatccaattacatccattccacttatcgcctattgtgtgcttcctgctatctgtctcctcaccaacaaatttatcattcctgagattagcaattatgctgggatgttctttattctgcttttcgcctccattttcgcaactggtattctggagctccgatggagtggtgttggtatcgaggactggtggagaaatgaacagttctgggtcattggtggcacatctgcccatctcttcgctgtgttccagggtcttctgaaagtgttagcaggaattgataccaacttcactgttacctcaaaggcgtccgatgaggatggtgactttgctgagctatacgtgttcaagtggaccagtctcctcattcccccgaccaccgtgcttgtcatcaacctggtgggcatggtggcgggtatatcatatgccattaacagcggttaccaatcatggggtcctctctttggaaagctcttcttctccatctgggtgatcctccatctctaccccttcctcaagggtctcatgggcaggcagaaccgcactccgaccatcgtcatcgtctggtcgatcctcctcgcgtcgatcttctcccttctgtgggtcaagatcgatcctttcatttcgcctactcagaaagccgtcgccttggggcaatgcggtgtgaactgctgatcggcaccgttacgaagatgaacttcaatcaatcaaggtctacccccccttgtgtaaatacctgaggggggctagaatgggatcttctttttgtgtagatgaagaccttttttatctaagttatgccactgtttattagctacttcagtgctggcgctagctgctgatacgatggaactgtgaagccttattttgcctgcgaagaagccagcccagcagcgtaaattgtgaatttttttcttcttttgtgacacccgttattttagtcatttgtttgaggggtcgttgttacacatactatgggatgttatttatacggatatattccaattacattcttttgcggtgaacattttaattatattcgtagcatataatgtaaggcaactcagtatttcagctgttcacttgacaagttgcaacacatataaaaaaagagttgtttgttcaaaaaaaaaaaaaaaaaaa

SEQ ID NO: 3483 - DNA, 1739 bp, Oryza sativa
  Clone ID: PAT_MRT4530_88663C.1
cgtttcgccaccgcgaatcccaccaccacccgcagatctccgcctcggcgccattgcccaccctccacgcccccgccagattcgcccagatccacagccgggtgcatccggcggcgtggctggggcgccctcgatcgggaagctttgatcttcgtaccctttttgcggtgggcgggcggcgggcggcggaggaagaggaggagatgggtgtcggcggggagaagttccagctggggacggtgggggcgctgagcctctccgtggtgtcatccgtctccattgtcatctgcaacaaggcgctcatgagctccctcggcttcaactttgccactaccttgacgagttggcatcttcttgtcacattttgctccctccatgtagcattatggatgaagttcttcgagcacaagcctttcgactcgagaactgtcatgggatttggagtgctcaatggcatctccattggcctcctcaacttgagtcttggttttaattctgttggattttaccagatgacaaagctggctatcatcccatgcactgttattttggagactcttttcttcaggaagaagttcagccggagtatccaactgtccctttcagtgctcctctttggtgtcggtgttgcaacagtgactgatctgcaactcaatgctgtgggatccgtattgtccttgctggcaattattacaacctgcatcgcgcaaattatgacaaacactatccagaagaagttcaaggtttcttcaacccaattattataccaatcttgcccctatcaatcactgaccctcttccttattggtccattccttgatggatttttgactaaccaaaatgtatttgcattcgactacacatcccaagttgtgtttttcattgtattatcgtgcttgatatctgtctcagtgaacttcagcactttccttgtgatcggaaagacttctcctgtcacttaccaagtcctgggccatcttaaaacatgcctagtactgacctttggttatgttttgcttcatgacccatttagctggagaaacatactcggcatcctaattgcagtagttggaatggtcttatactcatacttctgcacattggagggccagcaaaaaaacgccgaagtctccccacaacaggcgaaagaaggcgattcggctcctttgatctcagactctctgagcaaagttgagaatggaggtggagtggttgatgatgagcctctcaaggtaccgatgtggagctcaaagtactcaagggcgtgaaaataccttccttttagaaggcggcattatacaggattcaatttggtaggcggatagtagggttggaagccaacccagattgtaatgaacattccagttacatttttgggtttatttaacattactatctagtatctactagcagtaaaagggttcttgggaggattttaccttcaagatagcagatctgccttgaaacttagacaacagatattgtatgattgtatctggatatgctccacatctttctcactgtaacttcctatgggaacatagatccacagatagacttcattcttttgtaccaaagatccagagaactagagatctgcaaggttcaagtttgtgactgtaagtttatgtttactttggacccagtgatggagcttttgtatatttaggaccaagtgcaaagaggggttcttttccaacaagttttcaatgcaataacatggaacaattgttctcttc

SEQ ID NO: 3484 - DNA, 927 bp, Oryza sativa
  Clone ID: PAT_MRT4530_88712C.1
atgtcgcagcctgctgagctttcccgtgaggagaatgtgtacatggctaagcttgcagagcaggccgagaggtatgaggagatggttgagttcatggagaaggttgctaagacagttgactctgaggagctcactgttgaggagcgcaaccttctatcagttgcttacaagaatgttattggtgctcgccgtgcgtcatggcgcatcatatcatccattgaacagaaggaagagagccgtggtaatgaggatcgttgcacgctcatcaaggaatacaggggaaagattgaaactgagctctccaagatctgtgatggcatcctcaagcttcttgactcccaccttgtgccttcatccactgctccagagtccaaggtcttctacctcaagatgaaaggcgactactacaggtacctcgcagagtttaagactggagctgagaggaaggatgctgctgagaacaccatggtggcatacaaagccgctcaggatattgccctggcagagttgcccccaactcatcctatcagacttgggctggccctcaacttctcggtgttttattacgagatcctcaactctcctgaccgtgcttgcaatcttgcaaagcaggctttcgatgaggctatctcagagctggacactctgagtgaggaatcctacaaggacagcactttgatcatgcagcttctgcgtgataacctgacgctgtggacttccgatatctcggaggcgctccccatttatgttgtgctaggaaaccttgcagctgactcgctgcttggctggtggattctcgagctgcactttctttggggggagcctcagggtggaaccttcatgtcacttattggatcgattgttttcggtatgtcagttgtgagccttatctccagagtccacagtcctgccaagtgccctgcttga

SEQ ID NO: 3485 - DNA, 1427 bp, Oryza sativa
  Clone ID: PAT_MRT4530_88714C.1
ggccggccgggcgagatctcgccgaatttgaactccacctgagcacaggagaagccgcagccactgagatttgaccttctgtttctaccagaaaaacacaaacagtgaagatgtcgcagcctgctgagctttcccgtgaggagaatgtgtacatggctaagcttgcagagcaggccgagaggtatgaggagatggttgagttcatggagaaggttgctaagacagttgactctgaggagctcactgttgaggagcgcaaccttctatcggttgcttacaagaatgttattggtgctcgccgtgcgtcatggcgcatcatatcatccattgaacagaaggaagagagccgtggtaatgaggatcgttgcacgctcatcaaggaatacaggggaaagattgaaactgagctctccaagatctgtgatggcatcctcaagcttcttgactcccaccttgtgccttcatccactgctccagagtccaaggtcttctacctcaagatgaaaggcgactactacaggtacctcgcagagtttaagactggagctgagaggaaggatgctgctgagaacaccatggtggcatacaaagccgctcaggatattgccctggcagagttgcccccaactcatcctatcagacttgggctggccctcaacttctcggtgttttattacgagatcctcaactctcctgaccgtgcttgcaatcttgcaaagcaggctttcgatgaggctatctcagagctggacactctgagtgaggaatcctacaaggacagcactttgatcatgcagcttctgcgtgataacctgacgctgtggacttccgatatctcggaggatgctgctgaggaaatcaaggaggcccccaagggcgaatcaggagatggacagtgaacatgatcgaatgcgtgcgcccacaaactagaatagtgacgctgcaaatgtgctgtgggttatcgtttcattttatagattgtaatgtctcgtgatttgtcggaaacaggaggcgctccccatttatgttgtgctaggaaaccttgcagctgactcgctgcttggctggtggattctcgagctgcactttctttggggggagcctcagggtggaaccttcatgtcacttattggatcgattgttttcggtatgtcagttgtgagccttatctccagagtccacagtcctgccaagtgccctgcttgagtgtttttggtttcttcgatgtaaatcccgttgtgtgcacgatggttcttgattcaccacacattgttgtctacattgccaaaacgtatgcttcaagtgcccaaaaggccgaagcggtccgagaaacattattctgtcaggtatgtgtgataagcggtttcatatgcaacaaaaaaaaaaaaaaaaaaaaaaaaaaaaaaaaaaaaaaaaaaaaagcggcc

SEQ ID NO: 3486 - DNA, 4410 bp, Oryza sativa
  Clone ID: PAT_MRT4530_88759C.1
atggcggtgacgtcggatacagtgcttgatccgctgggcgggaagtcgcggggcgactcggctagcattggcgcgattgcgaccgacgacgggccatcaagggagccggcctggacagttcaagaggtgctggtaactgaagatgggcttgcagctgaggatgggcctacggatggagatgggcctgcagacggagatgggctgtcagctatcgtgctcccggcaactgaagatgggctcctggccactccagcgcgactgaccaggcccgttggcctgacggagtttccgttagtttacagccgccgcaggtgtccagcccaagcggtggccgttgaccagggcgctctggcagctgtcggtcgtcgggcacgcgaagagcgtgcgactgatgagaacgaggcaccaccggaggttcaagccagaatctcggccttcatttcgtcgatctccaccacaccgcctccatccatcctaggggggccgccggcctctgtcccagtcactaggactcgacgccgtgcaactatcctagaaggattcacgccatggcgaagcccgcggttggctctgcaggggaatgggacacggcggcacacgatctccaaagcccagaaggtgactatgaagaagttgggaattattgaggaggaagaagaggcaaaccaggaagcggttcaggaattcgagaagctctttgatgaaccgctgcctccgcatcatgtccaggccattgcagaactgttgcaaatcgacatggccgcaccccttcaacctctgcctgaagttcttccgggggtggaggagtccaagttgtccgctgtcaaccagtcgctaatttatgaactttgtggtctggattttgatgggttcgtgtttttgcccgctgaggagactagagggggagtaataattgcctggaagagtgctctgttccgaggggatgtggttcatattggcacttggtctgttactgttaatttgtgctggttggctgctaacagatcatggtccttaacttcagtttatgggccacaaggtgatgaagaaaagcttttgtttctggaagaattgtcagtgatccgggagatttgtttgggggagtggttaattgcgggcaatttcaaccttatcgctgcagcagaagacaagaacaactcgaggattaatagacgactgttgaatgccttccgaagcaagattaatgatttagaattgaaggaaatgtacatgtttggcagacgctatacctggagcagcgaacaagccagaccaactttggtgaagctggacagaattcttgtgacaacctcctgggaagatctctttcctgaggcgcatctgcaggctttgagctcctcaaactctgaccattgccctcttttgctgacatgtggtgagttcaaacctatctctaggaggtttcggtttgagacgttttggacaaaattagatggattcatggaagtggtgaaagaatcttgggagcgcagtgtggatagcaccgaccccttttgcattctgtatgtcaagatggcgcggttgagtaagatcttgtctaagtggggtcagaagaaaatgagtaatttcaggctacaacttcagattgcgaatgaaatcattctccgttttgatgtggcacaggaaattagaattctatctgacttggagcggcagctgcgagctgcgctcaaagggcgctgtttggctcttgcatcacttgaaagaattaggattcggcagcgtgccagggtcagaaaccttcgagagggagacgccagcactgcttacttcttcatgaaaatgaaatcacaccaaaggaaattgaagatactctggctggagcatgatggcgtcattgccaccacgcaggaggatatggaacagatggcgaagacccatttcgaatatgtgatgggggcctcacagggtgatttaaaacaaatccttttccaagaaattcatttggctagggcaaacttatctgagctggatgatgccttcacggaggaagaggtctgggctacaatcaaggccatgcagaatgagaaatcccctggtcctgacggcttcactggcctcttctatcagagatgctgggatgtaataaaaaaagaagtcctagaagctcttcataaattttgcacaggcaactcacaaaatcttgaactcttgaatacggccatcattacccttctcccgaagaaagatgcaccgacacttttgaaggatttcagaccaataagtcttattcacagctttgctaagctcgcaacaaagattttggccctcaggcttgcccctcgcatggatgagctggtggctcactcccagtctgcctttatcagaggccgttccatccatgagaatttcatttttgtgaaggggttggccacacaattccatcgaaatcacaaggcgatgcttcttttcacacttgacatctcgaaggcctttgattcagtgtcttggagctttctgctgaatatgctgcgttttagggggtttgggccgaaatggagaagctgggtggctgcccttttcttgacagctgaaactagggttgatctgaatggcgccctgggtgaatccttcaagccgcagaaaggtttacggcaaggagaccctctctctcctctcctctttgttttgcaaactaccaccattggcctcatcgacaaagtaaacttgaggaaccgagctccaaacatatcgatctatgctgacgacgctattatctttcttaagccgctggttcatgaggtggaagcggtaaaagctctgctgaatctgtttgggactgctactgggcttcacatcaatttctccaagagtgccgttacccccataagatgtgctgagtctcagaagacattggcgcagaacactctagcctgcagattggaagatttcccaattacttacctcgggctacctctctcgatcaggaagcctaccaaagcggaggttcaacccactcttgacaagatggctaagaaggttgcaggttggaaacccaaattactctcacctgacggtagactatgcctgatcaaatcagtgttgatggccattccggtccatttcctctctgttctacagctgcctaggtgggcgatcaaagaaatggaaaggcgccgtcgcgtattcttgtggaaggggcaggaagagattaatggagggcactgtcttgttgcttggagggatctgtgccggccaatttcaaatggcggccttggaattaaagacatcgatctttttgggaaagcattaaggatgaaatgggatttcaaaagactggagcacaaagataggccatggacaatggctggttgggggacggacagagatcttcaagacatcatcagctcaactgcagtccatatgctaggcgatggatgtgacacgaacttttggaggggaaattggcttcctggcgacgggagcatcgctagcagatggcccatcctattttcttttgtgggcagagctaatctaacaataagtcaggggttatccaataatacttgggttaggagactgcagggctccttgtcaggaagggcgttgctcgattatctagccctatgggatgaactgcagctggttcagctgcagcaaggggtggaggattctatcctttggaagttctcaaccaatgggcaattctccgttgcatcggcctatgagtttttcttccttacggcagtacgctgcccttatggggagatgatttggaaggctagggcaccagctcggggtgcactatccaatgaagcaatgggcgaattttttcagttatgggatgaggtccacgatttctccctgctcccatcgcctgacgagatcagatggaagctgacgggcgacgggaaattctcggcggcgtcggcttatgatgttttcttcatagctgctgaggactgcccctatggcgagctactgtggagatccagggccccctcgcgtgtgcgtttcttcatgtggcttgcgttgaaggatcgatgtctcaccgccgacaatcttgcgaagcgaaattggccgcacgaccccctctgctcgctgtgtcagagagaagacgaggattgccaccacttgtttgtaacctgtccttttacggcggaggtatggcgaaagatcagaagatggtgcaatgcaaactttgcaatcccggcagacggtgacagcagacttgctgactggtggcttgcaacgcgacgccgttttcggacgagctacaaagtggacttcgacagtgccttcatgttaatttgctggcttatttggaaggaacgaaatgctagaatttttcagcatgtgtcgatgaccacggagcaagtagccgagaatataaaagaagaaatcgcggtgtggagggtagctgggatcttctcccaattcggcgagtaa

SEQ ID NO: 3487 - DNA, 1897 bp, Oryza sativa
  unsure (1)..(1897): unsure at all n locations
  Clone ID: PAT_MRT4530_88764C.1
ntnncgaggccggccggggaaanaaaaaaaaaaaaaaaaaaaaaaaaaaaaaaaaaaacccctctcatcaggcatcagcagcagcagcagcaacaacatttggccgctctgaagattggtgacggagaatgcccggcggctccctcctcaatagcggcggcatggcggactacggcggcggtggcggcagcggcggcggcctcacgttcccggtcgtggttacctgcctcatggcggcctccggtggcctcatcttcggctacgacattggcatctcaggtggtgtgtcggagatggagtcattcctggagaagttcttcccgggcttgctgaaggggacggcgcacgcgagcaaggacgtgtactgcatctacaacagccaggcgctcacggcgttcacctcgtcgctgtacgcgttcggcatggtcgggacgctggtggcgagccgcgtcacccggcggaccggacggcaggccgtcatgctgatcgggggcagcatgttcctggtcggcgcgctcgtgaacgccgccgcggtcaacattgccatgctcatcatcgggaggatgctgcttggcctggggctcgggttctcgggccaggccacgccggtgtacctcgccgagatgtcgccgccgcggtggcgcggcgggttcatctccggcttcccgctgttcatcagcgtcgggtacctcatcgccaacctgatcaactacggcacgtcgcggatccccgtgtggggatggcgcctgtcgctcggcctcgcggcgttcccggccgccgtcatggtggccggcgcggcgttcatcccggacacgccgagcagcctggtcctgcgcgggaagcacgacctcgcccgcgccgcgctccagcgggtgcgcggcaagggcgtcgacgtcgacgccgagttcaacgacatcctcgccgccgtggagcacgaccgcaggaacgacgagggcgcgttccggcggatcctgcggcgcgagtaccggccgtacctggtcatggccatcgcgttcccggtgttcctcaacctcaccggcgtggccgtcacggccttcttctccccgatactgttccgcacagtcgggttcgagagcgatgccgcgctgatgggcgccgtcattctcggcctcatgaacatcttcggcatcgtcggctcgggcttcgccatggaccgctacggccggaggctgctcttcatgatcggcggcgcgctcatgttcacctgccaggtggcaatggcgagcatcgtggggtcgcagctggggcacgggagcaagatggcgaaggggtacgcggtgacggtgctggtgatgacgtgcgccttctcggcgagcttcagctggtcgtggggggcgctgtactgggccatccccggcgagatctacccggtggaggtcaggtcggcggggcagggcgtggcggtggcgctcaacctgggcctcaacttcgtgcaggcgcagtgcttcctcgccatgctctgctgcttcaagtacggcaccttcctcttctacgcgtcgtggctcgtcgtcatgaccgccttcgccgtcgccttcgtgccggagaccaagggcgtgccgctcgagtccatgggccacgtcttcgcgcgccactggtactggggcaggttcgtcaaggaccacaagttcggcgacgtgtcgacctaaaatttgcaccgcatatgccgatgcggaatgtttggctttgatctcagaaatttagttagcgtgtgtgctctcgatcgtagtataaggctaagatggacgactttgggtaaattaatcaagaatgggcaatgtatgccactgaaatgttagatcaaactcaacggccacagccgtgcagctgcccatacatcacacggttcatcacaccaccaaaaaaaaaaaaaaaaaaa

SEQ ID NO: 3488 - DNA, 1726 bp, Oryza sativa
  Clone ID: PAT_MRT4530_88794C.1
gaaaaagaaaattcctatatcctctgttcgtcactgccttcctctccaagtccatccccttccccgatctaagatccatccgatccaggccatggcggcgaccatccagagcgtgaaggcccgccagatcttcgacagccgtggcaaccccaccgtcgaggttgatatttgctgctcggatggaacatttgcgagggctgctgtgcctagcggtgcatctactggtgtatatgaagctttggaattgagggatggtggctctgattacttgggaaagggtgtcctcaaggctgttgacaatgtgaactctattattggaccagcattgattggcaaggaccctacagaacagactgtcattgacaacttcatggttcagcaactggatggaaccaaaaacgagtggggctggtgcaagcaaaagcttggtgctaatgctatcctggctgtctcacttgctctatgcaaagccggagctattatcaagaaaattccgttgtatcaacacattgctaaccttgctggtaacaagcaacttgttttgcctgtgcctgctttcaatgtcatcaatggtggatcacatgctggaaacaagctagctatgcaggagttcatgatcctccctactggtgcctcatctttcaaggaggctatgaagatgggtgttgaagtataccataacctgaagtctgttatcaagaagaagtatggtcaggatgccaccaatgttggtgatgaaggtggttttgctcctaacattcaggaaaacaaggagggtcttgagctcttgaagactgcaattgaaaaggctggatacactggcaaggttgtcattggaatggatgttgctgcttcggaattctacaatgacaaggacaaaacctatgaccttaacttcaaggaggagaacaatgatggttcacaaaagatatctggtgatagcctgaagaatgtatacaagtcatttgtcagtgaataccccattgtctcgattgaggatccgtttgaccaggatgactgggaacactatgctaagatgaccgctgaaattggagagcaagtgcagattgtcggtgatgacctccttgtcaccaacccaacaagggtggcaaaggcaatccaggagaagtcatgcaatgctcttctgctgaaggttaaccaaattggatctgtcactgagagtattgaggccgtgaagatgtcaaagcgtgctggctggggtgtgatgaccagccacaggagtggtgagactgaggataccttcattgctgatttggctgttggtttggccacgcttcttaggattgaggaggagcttggtgcggctgctgtctacgctggtgccaagttccgcgcacccgtggagccctactaaccagatcaagactggagctccttgcagatctgagcgccttgccaagtacaaccagcttcttaggatcgaggaggagcttggtgctgctgccgtctatgccggagccaaattccgtgcaccagtggagccctactagatgggaatagaaccacttcgtttccgtaaattttgtgaagatggtgctttagatttgctcgtagggtttgagcaataattccccacggtcagatgtgggtggacatgctcccacaaaacgcttaattttgatgttgcgtggcgcaagcgtgatttgaaggaacgcaaatgattatattaaacgttataagcaaagttcaacaccatgtttggatc

SEQ ID NO: 3489 - DNA, 2770 bp, Oryza sativa
  Clone ID: PAT_MRT4530_89025C.1
gtcgactctagaggatccccatcttccatcccccaaaaaacctcgcaaaaccctcggccctcacccgccgccgccgccgtcgcctccaccggtaaacggcagcatgagtcggcaccctgaagtgaagtgggctcagaggattgacaaggtttacataactgtacaattagctgatgctaaggatgctaaggtcaatctggaaccagaaggtgtattctctttctctgctacagctggaactgatgggaacttatacgaatcaaagctagagttgaacgacaaagtaaatgttgaggagagcaaaataagtgtaggtgttaggtccatattctgtattgtagaaaaagctgaggccaaatggtggaagaagcttgttcgagatgatcaaaaggcaccacactttgtgaaagttgactgggacaaatgggttgatgaagatgatgatggtgctgatgtcaacgtggatggaatggacttttcgaattttggtggcatgggtggaatgggtggaatgggcggaatgggtgatatgatgggtggcatgggtggtatgggtggcatgggtggcatggctgagatgatgggtggcatgggtggtatgggcggtatgggtggcatgggtggcatggatgagttcgaggacgagagtgacgatgaaggaagcattatttttgcagtttggtatgatactaaccttaatcacatgcatcaaaagtttcttaaccattatacttacatactggttaggaaactttttgatgcatgtaaagttagtgtcactaggtgcagattaaggatgtcaggtgatatgcccattcgtctgtattatggcgatgctcctatacaaatatgtgatagcggggtggatttgactgtatatgccttccatgatactagtctgaatgcaccggagcatatgggtttgaacgacgtgttagggtggttgtataatatgtttggggtagatccagtgcacgataaatttgtcataaataccgtgtggccagtgaggggtcaacatgaatggcagtggagagtagtggaggttgcgtcaactgggagttggaggaagtttgttagtaaagtaagggagaaaggctatagcctggcaatagtggtgcagaagacaacatgtgttgatcgatcgggggagtcaagtcatgccgtggtggaagaaactccgttggaaggtggacaagctgaaaatgtttggcggactgagcaaggtcgaggggaagaagtagtagagggtaatacacaaggagaggtcattgttcgtggtactaatcgtgaggccaacgactcggacgatgaagaaccggattcgcctatgcgtgttgatgcagcggaggagaatgaggtggtagtggatcagatggaagtggaaaacgaggaataccttgcgcttgtagtggaaggagaagatacaacactgtgggacaacgaaactaacatacccgatgattggacgaccatatcaatgagtcgtatgaaggtaaacgatggtttagatgcccactggtgttatgatagtaagcaggtgaaagttggacagatgtttcatgacaaaggtcacttacaagatgcggtgaagaggtgggcatttgtccagaagcgtgagttcagggtgaaggtttcaaataggacgacgtatgacgtgaagtgcatacagggtggatgtccttggagagtgcatggttacaagccacaacatgacactttatgggtaggttcgagggttgagcaacatacgtgtttattggagaatacccgtctggtgcacagaaacctgacagcggcatttgtggcacaaatggtatattcaaaggtggttagaaaaacatctttgtcccctttcaccataatgcatgacgttgagaaagagtacggatatgagatatcgtacgacaaggcttggagggcaaaacagaaagcattggagatgaggtttggaactcatgaggattcttatcacaatcttcccccactattggaggtgatgcaggcaagaaacccgggcacacacatggctattctcgatgaggtgaatgaatatggggagaatattcttcgtcgggctttctggtcatttgggtgcatgatagaggcctttagaaattgcattcctttgctctgtgttgatggcactttcatgacaggcaagtacagaggaacaattctaaccgcgatcggagtcgacacggatagccatgtcgttcctgttgcttttgcatttgttgaaagcaagaacacatcaagctggctatggtttttgcggcacattaaaatgtgtgttgttgaaaacagactaaatgtgtgtgttctgcatgaccgacacgccggtttgctatcagcgatacagaagcttcaagaagatgtcacacagtccgtgccatggccagatttacatagcagatggtgcatgcgacattttggggctaatttttatagacaattcaggaacgatgagtacggttcggcgtcgacgcatcacggaatgcctgcttactcccctcgcacagcattcattgaggacttcttttccactgatcctccccagggggaagtagggatggattactggcacgcagcacctcaggtcacacagccgacgcaggagacggaggccggtcaggggccagacgtgacaccacagcaggcagctagagataggctcccccctgataatttgacatatcccactgagcagattaggcataggaagaagggaggacctagcaagcgtgcgaagggcactgatcgtccttga

SEQ ID NO: 3490 - DNA, 3980 bp, Oryza sativa
  unsure (1)..(3980): unsure at all n locations
  Clone ID: PAT_MRT4530_89052C.1
atggattgcaacaaagatgaggctgttaaggcaaaagctttggctgaaaaaaaaatgcgggagaaggatttcgctggtgcaaaaaggatgattaacaaggcacaaaatctctccaaagatgttgacagcaacatttcacaaatgttaactgtttgtgatattcattgtgcttctgcaacgaaggttaatggagagattgattggtatggtatacttcaagtacctgtcacagctgatgacacactaataaagaaacaatatcgtaagcttgctcttttgctacatccagacaagaacaattttgcaggtgcagaggcagcatttaaattagtgggagaagcaaacatgacgcttacagaccgctcaaaacgttctgtctatgacatgaaaagaaatgcctcagtcagaattggttctgcaagagttccttatcagcaatcaaggagaactgcacctgttagacctaccactacacctgtgaatctccataatgtgcatcaatcacaacagcataagccctcaaatccttcagactcacaaacattttggaccatatgcccaacttgtggcatgcgatatcaatactacctttcaatattgaagaaagctctccgttgtcagaattgcttgaagccctttgttgcacttgatttaaacgagcaagctgttccttctggggcaaatcagaggtctgctggggtgtggaaaagttcaggagcaccacaaaactttccaggttcacaagcaaatgtaggacagcaagctcagaattctgccaatccagtccatgctaattttggttctcataatgcacatgtagaaacaaagaggggagctgatggaaacgaggctggtgggctaaagaacaaaagaaaatttgctaaggcaacagggaattcttcaaaagcttcttcagttgctggatcaaaaaagcgcagaaaagctatgtttgaatctagtgaatctagcgcttcagacaccagcactgatagcgaagaagagattattgaagatggtcctgctgcaagtaatgtagggccagatcaacatccccgcagatcaagcaggcagaagcaagaagttaagtataatgaagatagcgatggtgacgacactgactgtcacggcaatggtgatgatggttttgtgagttctcccagtttgaaaaggttaaggaaaggcggtctgtttcatggtggtgaaaacaatgaaactaagttgaatgctgacacaactgggcctgggcatgatggtccaactaatggtgttaataattacaataatacagaagacatagagagaggctctgcttgtgctgagcaaatcaagagggaaacaatgtctggtggaggaaatagtgctgagaaagaaaaattatcccattctgtcagcaacaatggtctagagtcaaactctgatgatgctccaaatgaggttatttgtgcggattcagaattttttgacttcaatcaacttcgacatataaatcagtttaaagccaaccagatatgggcttgctatgatagtcaaagctgtatgccaagatactatgctcgaattacaaaagtaaaacatgtcccgaagtttatgttaaatttcatttggctggagtttgatcccaaaaataaagcagaggctgcttggtcttctggggacctaccagtgtcttgtggacgttttaagcatggagtgtcagatacagcaaaagagagcagtatgttctctcatgccattttctatgaaaaaaacaagacaagaaactcttatgaaatatatcctaggaaaggcgaagtatgggctcttttcaagggttgggatattgattggagtgcagatgctgacaaacacaaaaactatgagtatgaagttgttcaagtcctctctgatctcactagtagcactagcatcattgtcatgccacttgtaaagataaaaggctttgttagcttgtttattcagtctaaagaggcatccccatatgtgatacctcaggatgacacactaaggttttcacattgtgtccctcgtcatacgatgattggaaccgaaaaagaagggattccagaaggggctattgaacttgatcctgcggcgcttcctctgaactttggagtggcttttgcttctgttgttccagaaagctgctgttcagtgaaagtgcagggttctggtgctgaacacataggttcatccagtggaaataactgtcacaagggatcggtggatgttggggagagccaacatgctacatgcgcaaatacagggttcgctacaaggacaacaaaggcagagatcaatgagcacaacgctcgatctgcagtagaaggtacagatgatgacgaggaacctgatgattttgcccaagcagaagtactatatcctgaatcagaattctttgaattttcagaaataagatcgatccacaaatttcaacctgggcagatctgggctctctatagtgatgtagataagttccccaattactatgcctgcataaaaactgttgatgtcaagaataatgaactgcaagtaagatggcttgatgcttgcccacagagtgaagaggagagaagattggtaagagaagatctaacagttgcgtgcggaacctttaagatttccagtttccatggtattcaaacttacaatggtacagagtacttgtctcatcctgtacaggccaaacctggtagaagaaatgaatatgaaatagttccttgccaaggtgatatttgggctgttttcaagaactggaggactggatggaccgcaaaagattataagaaatgtgactatgaattggtggagatatttggccacactgattcatccatacaagttcagcttttaagaaaggtggatggttatagggcagtatttatgccagacagaagagagggagctgtgaagacaataaggaaagatgagtacccaaagttctctcaccagattccttgcttccatctgacaaatgaaagaggaggcaagcttcgaggttttttggagctcgatcctttgtcagtgccagagatgtttcttttcaccgaatcaatctgagataagccttatcccaagttaatctgctagagcatttcttgtgatgctaccggaactaaaggttttccagaagttgggtagtccacaattcaatattttgcttagtgacagaagctgctggattttcagaatttgtatgtagcagtaatgttatgggccgcagcttttgcctattctccaatcctcactatgaaggcgttgtcaggcaatcgggaccgttttgcaagattagctgcagtctgaactgattaattttcctgcagctgctttacctagttaccgatagctgtatctagttctctagctggactatcaatcgtcctttctcttgtcgtactttgcattgttggaccatgtaaaattgaactgtgcgaggccagtctgattaattcggaaatctctgttggcctccctttcctggaacttaatgaattgagtccaacttctgtttaggttgcccttgatcatcataggggtaacgatgaactagattctgtgcaatgcttctgtgatgggaatggacagacaccctgctgcagctctcccaaggtatcattcgtccatttattgatttgtttctctgctgttttctttccagcaaggtaaaggtttgttggcatccatttgatttgatcttttagttttggatgttggtangctgtgtagctgttgctctatgaacagtttcaaatctttagaattgggatttggacctcgagcctgtgatttaggtcttgtttagaacaggtaggaatttgtgggaaatttagttcagttttagttgtatgaaccatacaaaggttagacttcatctctgcttatccgaagtctttgatgtaatggtgcatctctgaacacatggtctctaagatagattaaggtttaatctaagatctctgtgctgattccaaaaaaaaaaaaaa

SEQ ID NO: 3491 - DNA, 3557 bp, Oryza sativa
  Clone ID: PAT_MRT4530_89113C.1
ccggccggatccgacgccgccgaaaaaacctcgcaaaaccctcggccctcacccgccgccgccgccgtcgcctccaccggtaaacggcagcatgagtcggcaccctgaagtgaagtgggctcagaggattgacaaggtttacataactgtacaattagctgatgctaaggatgctaaggtcaatctggaaccagaaggtgtattctctttctctgctacagctggaactgatgggaacttatacgaatcaaagctagagttgaacgacaaagtaaatgttgaggagagcaaaataagtgtaggtgttaggtccatattctgtattgtagaaaaagctgaggccaaatggtggaagaagcttgttcgagatgatcaaaaggcaccacactttgtgaaagttgactgggacaaatgggttgatgaagatgatgatggtgctgatgtcaacgtggatggaatggacttttcgaattttggtggcatgggtggaatgggtggaatgggcggaatgggtgatatgatgggtggcatgggtggtatgggtggcatgggtggcatggctgagatgatgggtggcatgggtggtatgggcggtatgggtggcatgggtggcatggatgagttcgaggacgagagtgacgatgaagaagaagtgtctaaacctcaagacgcagagaaggatgggcgttcgacaggccggtttaaagccccgtctccccagcccgcgatgcttgttcgatttgtttgaggaccacatcgccagccgccgtcgagagtcgccacatcgtcgccgtgatatgcccattcgtctgtattatggcgatgctcctatacaaatatgtgatagcggggtggatttgactgtatatgccttccatgatactagtctgaatgcaccggagcatatgggtttgaacgacgtgttagggtggttgtataatatgtttggggtagatccagtgcacgataaatttgtcataaatgccgtgtggccagtgaggggtcaacatggatggcagtggagagtagtggaggttgcgtcaactgggagttggaggaagtttgttagtaaagtaagggagaaaggctatagcctggcaatagtggtgcagaagacaacatgtgttgatcgatcgggggagtcaagtcatgccgtggtggaagaaactccgttggaaggtggacaagctgaaaatgtttggcggactgagcaaggtcgaggggaagaagtagtagagggtaatacacaaggagaggtcattgttcgtggtactaatcgtgaggccaacgactcggacgatgaagaaccggattcgcctatgcgtgttgatgcagcggaggagaatgaggcggtaaacgatggtttagatgcccactggtgttatgatagtaagcaggtgaaagttggacagatgtttcatgacaaaggtcacttacaagatgcggtgaagaggtgggcatttgtccagaagcgtgagttcagggtgaaggtttcaaataggacgacgtatgacgtgaagtgcatacagggtggatgtccttggagagtgcatggttacaagccacaacatgacactttatgggtagcttcgagggttgagcaacatacgtgtttgttggagaatacccgtctggtgcacagaaacctgacagcggcatttgtggcacaaatagtatattcaaaggtggttagaaaaacatctttgccccctttcaccataatgcatgacgttgagaaagagtacggatatgagatatcgtacgacaaggcttggagggcaaaacagaaagcattggagatgaggtttggaacttatgaggattcttatcacaatcttcccccactattggaggtgatgcaggcaagaaacccgggcacacacatggctattctcgatgaggtgaatgaatatggggagaatgttcttcgtcgggctttctggtcatttgggtgcatgatagaggcctttaaaaattgcattcctttgctctgtgttgatggcactttcatgacaggcaagtacagaggaacaattctaaccgcgatcggagtcgacgcggatagccatgtcgttcctgttgcttttgcatttgttgaaagcgagaacacatcaagctggctatggtttttgcggcacattaaaatgtgtgttgttgaaaacagaccaaatgtgtgtgttctgtatgaccgacacgccggtttgctatcagcgatacagaagcttcaagaagatgtcacacagtccgtgccatggccagatttacatagcagatggtgcatgcgacattttggggctaatttttatagacaattcaggagtaagagattgatggacctgttcaagaagttatgcaagcagaatcaacaaagaaagtttgatgccatatgggagcaactggatcgtttgaccactacacacatggaagaggttaggaaaaaacccatagttgccagacaggaggagccggagggacttgaacccattcctaatgaagcaccaagtattactcggcgcaggaagcgtggaagggccacgaagtgcttcacggagtgggtagaatttgagccaagggagaaatggtcgttgttgtacgatacagatggatcaaggtatggtgtgatgacaacaaatcttgctgaagtgtataactgggttatgaagaatacacgacctctaccacttgttgctatcctggagggcatcacgaggggtacacagaagtatctctgtaaaaggtattccatggctagtctgaacctcagcaaacccagtgttaagtatagccccgctattacacagtacatggatgagaaaagtaagaagggaggaatccacagagtgtggcatgctgggaatagagagttgttatttgagatacgacttcgtgacaagagtggtgtcggcattgggactactgacatcacattggaatgcacgttgtggccagagtatcacgcttgcaaatgcaattgcaacaagccttacctgttacatcggccatgttcccacgttcttgctgcttccgcaaaagggggtgttgatggaaacatttttgtttctccctactttagaaaggaatcgtgggaggcaacttggcgtggtgaattgcgtggttggcgtgccgtgtgtgatttcactcgtcctcctccagggcaagccaattgggttcctgactcaaatttattagttgatactaagggtcatcgccagtcacgcaggatcaagaaccttatggatgaagctgaagtgaaagatcgttctcgtcgtatggctgatcaaaatgatgggcagctgatagacaaggagatcgataggaaccagagcagggccacacacagcacacatggggaagtagggatggattactggcacgcagcacctcaggtcacacagccgacgcaggagacggaggccggtcaggggccagacgtgacaccacaccaggcagctagagataggcacccccctgataatttgacatatcccactgagcagattaggcgtaggaagaagggaggacctagcaagcgtgcgaagggcactgatcgtccttga

SEQ ID NO: 3492 - DNA, 1569 bp, Oryza sativa
  Clone ID: PAT_MRT4530_89433C.1
gtggaatctaattaattcaattcacatcagatgaacagaagaagacaactttggaaagaaacagaacttattactatgtactattagataattgtacatacttgaatgatctctagacttaatttcctaataaggctgtacatatacagctcgatcttgatcgatcatttgcaatctctgacctgacaaacttctatgcaaaataaagacaaaaaacaaaaaaagaaagtcgaagatagaacagctctaaatcgaagatgaaacaacagacgatgaacaacaaaaaagatggaagagaagaagatttgatttgatctatatatgaatttgatttgatgctataacagcagggcacctagggcaggagtacgctgatgaaccacgcattgcctcttcagtaggaagacctcttgccccatctccaccgccctctcccgcttccggcaatcgccgccggcgatgtcgacgccgaagagcctcacgacgcgtggttcggcgccgcttgtggttggcctctcgtcgccggcgcaggtggtggtcgccgccgccgcgttgttcttcttgcagtcgatgaagagcagcttgtcggggccgtacgccgagcgggagaagactatggtgtcgccggcgcggaggcccttctccctcacgaatcggctccaccccttggtcagcacgtagctctggctgctgttccagtacgagtaccggaatcgccacaccttcccctcgccgtcctcgaagttgaggagcacgcccttgccggtggcggcggcggaggcggagtcggagctcgccgcgcggcggagcgggaagtgcttctcggcgtgctgcttgggcaccacgaggcggttgagcttgccgacgtcgctgggcgtcacggccttctcgaacagcggctcgcgcgcccacgacggcgtgggctgggcgcgggcgcccatgccgcggccgcggcggagcccctggcggagctcgtcggcgtaggtgtgcttccggagcatgtcgacgatctcggccttggagtgcgcggcgaggaacgcgagctcggcggccgacgccgcggccccggggaagttggtggccgcgtcgcgcccccggtaccggagcgccgccacgtcgtaggcccgcgccgccgcctcctcgtcggggaacgtcccgagccacacccgcgcgtgccgctcgtagatctgcgccccccacctcccgttcggctgcggcaccacccccttgtaccgcgacgactgctgcgccgccgccgccgccggcctcgacgtcaccacctcatccgccgagtcaactcccttcaccaccggtagctgttgagccgccgccgccaccgccaccaccggctccggcgacatccgcacggcgccgccggactcggtggtggccgtggacgcgccggaggaagtcgaggagaagctgaccacccccatcttggcaccaagaaagctctagctctagctaagctatggctgcagcgagagagagagagagagagagaggagaggagagagaagcaagtaattagggcagtgaagagggagaagccaaagaagatcctcgtgc

SEQ ID NO: 3493 - DNA, 2316 bp, Oryza sativa
  Clone ID: PAT_MRT4530_89498C.1
atgccacgcaaggttgtctctgggcctgactacgatgacgagtacgacgatgactatgatgagtatgatgaggactacgatgattacggtgagaccgggcacagtgacgacattcagcaccccgtgaaggaggagaaagagtcatcgaagaagtcctcaagtacggtgcctgtgctttggagatgctccatgtgcatgttcgataatcatgaaagcatggtgtattgtgagatgtgtggggtttttcgagaatcctttatgaaatctgccaaggatggttcaataaaagtccatgggataccaagtgattttgggacaccttcgatgccgaaatctgactgtaccaagatgccagtgaatactcgtactacagactttgatggtgaccctgagataaagaatgctagcatatctcatgagaaagttggttccacgcagtacacatctgctggtagctcatcaggcgctgggaaaaaggtgaaacacattgcacttcctgaagatgtgcctgtcgagaggacagctcaattgatttctgatcattttcagctgaaggaggaccagagtagtagggctagcagttctgcgcagaatgaggatgtggcccagaaactttcttctgacatacagaagctaggtttagaaaagaatgaagtagatactgcaaaaccttatttacctgaagaatataagcctgagaagtggatgttcgctaatgaggaatcaggagtgctgagccaactaaaccttgcaatagtaggtcatgttgattctggcaagtcaacactctctgggagactgctacatctgttaggaaggatatcgaaaaaagatatgcacaagaatgagaaggaggctaaagaaaaaggaaaaggatcatttgcttatgcgtgggctatggatgaaagcagtgaagaaagagaaagaggcgtgacaatgactgtggccgtggcttatttggagactaagaagtaccgtgtagttttgcttgactctccaggccataaagattttgtaccaaatatgatatctggcgcaacgcaagctgatgcagctattcttgttgttgatgcttgcactggttcatttgaagctggcatggacggtgaaggagggaaaagtgttggccagacaaaagaacatgctcagcttattagaagcttcggcgttgaacagcttattgttgcggtcaacaagatggatgccatcggctactcgaaagaaagatttgagttcatcaaggttcaacttggtagttttctgcggtcatgcaatttcaaagattcatctgttacctggattcctcttagtgctgttgaaaatcagaatttgatcaaaattccttctgatgtccgtttaacttcctggtatcaaggattttgtctcttggatgctatagattccttgcagcttccatctcgggatgtttcaaagcccctcattcttcctatctgtgatgttatcaagtctcagtcaacagggcagtttgcagcctttggaaaattagagactggagctattcgaattggttcaaaggttttaatttcaccttgtggggaagtggcggcagtgaaatccatcgagcgggattcaaattcatgtgacatagcaagagctgtgcctgtctctaacttcttggagctaagggttctagtgttagacgtcaccattcgtatccttattggctatcaggtcgaatttcacatacatcatgtgaaggaggctgcgagggttacgaaaatcgtggcattgcttgacaaggctggcaaaccaagcaaaactgcacctcgttttcttaagtcaaagcagaatgcagttgtgcaggttaccttagacgctccggtctgtgttcaagaattctccaaatgccgagctcttggcagggcattcttaaggtcttctggaagcacgatcgctgttggagtcgtaacgcggccgtgctttggggcccatattgtagctgactcaaaacgagacataaaggatccagagcacccatactcactcgaagagcttaatgttgtaactgaggattcagttgaaatcaatgatgaacttagtcatgtcagggttacttttaccccaacagtggagcgttgcagtatggcgaccgtcattggactttgcctgcgtgtgaaacttatgcggagtcttccccctcgatacaaggtggacataagggtggcgcctggatcacatgcaactgaaactgcagtgaacaagcaactgaacgacaaagaacgtgttgcagctgctctggaaaatccaaaccttctggacattgttgaggagtgcttgtcaccaacgtttgcttga

SEQ ID NO: 3494 - DNA, 3255 bp, Oryza sativa
  Clone ID: PAT_MRT4530_89500C.1
ctagctctcgtccctcctgtaccaatcgtcgtcggcggttgtggtggcatctccgacgagattccctggtgaggtcgtacgtgctccacttctccccgtcgacagcgaatggagtggctctctcccaggccgcgccatcaacgccgccgcgctcccccgctccggtcgccggactccaactccggtaaccctccagtacccgctgccgccgcgaatcggttcccctggctcccacgagcctgctcctgctaaccctagccatccgcctcctgctgctgcagcccccatggagatggccggtggaaaacacagcacaactggtggctgcaccctatccccattgaggctccccctggactccggttcaaggattctcctattggaactctagcttctccccttgcagttgatgtaccaactcagctcctcctcctggagctgaaacccctctcctcttgaagctcaggtacgccgctgtgtcagcaggatgccacgcaaggttgtctctgggcctgactacgatgacgagtacgacgatgactatgatgagtatgatgaggactacgatgattacggtgagaccgggcacagtgacgacattcagcaccccgtgaaggaggagaaagagtcatcgaagaagtcctcaagtacggtgcctgtgctttggagatgctccatgtgcatgttcgataatcatgaaagcatggtgtattgtgagatgtgtggggtttttcgagaatcctttatgaaatctgccaaggatggttcaataaaagtccatgggataccaagtgattttgggacaccttcgatgccgaaatctgactgtaccaagatgccagtgaatactcgtactacagactttgatggtgaccctgagataaagaatgctagcatatctcatgagaaagttggttccacgcagtacacatctgctggtagctcatcaggcgctgggaaaaaggtgaaacacattgcacttcctgaagatgtgcctgtcgagaggacagctcaattgatttctgatcattttcagctgaaggaggaccagagtagtagggctaccagttctgcacagaatgaggatgtggcccagaaactttcttctgacatacagaagctaggtttagaaaagaatgaagtagatactgcaaaaccttatttacctgaagaatataagcctgagaagtggatgtttgctaatgaggaatcaggagtgctgagccaactaaaccttgcaatagtaggtcatgttgattctggcaagtcaacactctctgggagactgctacatctgttaggaaggatatcgaaaaaagatatgcacaagaatgagaaggaggctaaagaaaaaggaaaaggatcatttgcttatgcgtgggctatggatgaaagcagtgaagaaagagaaagaggtgtgacaatgactgtggctgtggcttatttggagaccaataagtaccgtgtagttttgcttgactctccaggccataaagattttgtaccaaatatgatatctggcgcaacgcaagctgatgcagctattcttgttgttgatgcttgcactggttcatttgaagctggcatggacggtgaaggagggaaaagtgttggccagacaaaagaacatgctcagcttattagaagcttcggcgttgaacagcttattgttgcggtcaacaagatggatgccatcgggtactccaaagaaagattcgagttcatcaaggttcaacttggtagttttctgcgggcatgcaacttcaaagattcatctgttacctggattcctcttagtgctgttgaaaatcagaatttgatcaaaattccttctgatgtccgtttaacttcctggtatcaaggattttgtctcttggatgctatagattccttgcagcttccatctcgggatgtttcaaagcccctcattcttcctatctgtgatgttatcaagtctcagtcaacagggcagttggcagcatttggaaaattagagactggagctattcgaattggttcaaaggttttaatttcaccttgtggggaagtggcgacagtgaaatccatcgagcgggattcaaattcatgtgacatagcaagagctggtgataatgtagcggttagtttacagggcatcgatgggagtaagctaatagcaggtgggattctttgcaaccctggtttcccagtgcctgtctctaacttcttggagctaagggttctagtgttggacgtcaccattcctatccttattggctatcaggtcgagtttcacatacatcatgtgaaggaggctgcgagggttacgaaaatcgtggcattgcttgacaaggctggcaaaccaagcaaaactgcacctcgatttcttaagtcaaagcagaatgcagttgtgcaggttaccttagacgctccggtctgtgttgaagaattctccaaatgccgagctcttggcagggcattcttaaggtcttgtggaagcacaatcgctgttggagtcgtaacgcggccgtgctttggggcccatattgtagctgactcaaaacgagacataaaggatccagagcacccatactcactcgaagagcttaatgttgtaactgaggattcagttgaaatcaatgatgaacttagtcatgtcagggttacttttaccccaacagtggagcgttgcagtatggcgaccgtcattggactttgcctgcgtgtgaaacttatgcggagtcttccccctcgatacaaggtggacataagggtggcgcctggatcacatgcaactgaaactgcagtgaacaagcaactgaacgacaaagaacgtgttgcagctgctctggaaaatccaaaccttctggacattgttgaggagtgcttgtcaccaacgtttgcttgagacctgaatacaagtatacaactgggagcctgtgtgttgaaatgtttcaaaactacactgaattaccctacgacgtgtagcatgaccttgtcatttgagataccttatgtggtgcagggcgtgtgcatgaattttgatggtctgtacctttctataaggatactactgctctaccgtttcataccttttttctttttatggcctgtgacctgccagagcataattgaaacgatataaggaaatactcgtatatgaagtatattgcgctgtaggctttttacctctcgaatatgaagtactgtctggatgtcaatatccatgaaaagaaactgaaggatattccatgattttatgccatctctgtaatt

SEQ ID NO: 3495 - DNA, 4021 bp, Oryza sativa
  Clone ID: PAT_MRT4530_89648C.1
ttttgttttttttactagacagcgatattatattattatatatcactgggattgggggtacatatggtccatatggatgaagctacatatcacgaaactaattacagtcacacgcacgtaactgattcccaaaggctacaagaataaaacactggaacactagtcaaataagccgaacccgtaatattaagggcttgggatatcgcaactataagatcctccccagacggcccaagggaatggatccccgggccgccgctctcggctcgtgggtccccgggctccaggctctttttttttttttttttttttttggagtaaatatacacattcattgaatttggacttttgccacggcacagaaacactgaacaaaatgtgcctttgttcaatacaatcaagaaaaggaataataaaaaggaatgaaaatcctctatcctattaatctagctataataaggaactatacaggtatttacgggaacatgtcagattgcctacgtaaggtttttgctatgcctccatcgaaagtcgaaataggcgattcaagaaaatacgaggataaagttgatccccaaaccaccaccatctgcatgccttcatgcaaatactggggaaaccagcgaaactatgctgctattgccactactgtgccacttactatggtcaacaccagcttattgcatctctagcaacaaattgtattgtctaacaaaacttctacaagttcacatgaagctcatccagatatactaaggtctgtcatgcttctgtcagcaatatatgcctttatatccctgcatctgggagctgaacagtctgcattgtcacaaagcagtgagtgcgtgaacagcagtttccacatgaatacacacatatggcaacctcctccaccacgggcacgggtatgacatcgtacaccatggaagaacagtttctttaacgtcaaacaaagtttggaagtgcaacttcgatcaaaacatcttgatgcatgcaccaagccttcaaggtagtctctttcaaatgcatgcttttgttttgttgtagctgggtgcctgtccttcagaggggtattcagctcctcagcataacaacgttcacaaagaaagaagtttttgcagctggtgcaaacccaactactaccagatacaataggatggtggcaatgcttgcaaaattgcttatgcacaagtaaaatatcctcgaggtttcctttccggtcatcacgtttggcaacccgtagaagccttcctagttgagtttctttcttctgtgaggtgtcatcatctttcttttcaaggagcctctctgcttccccaggccagaaatcattatcacagtatggcaaccatgcagctgagatattggtcttgcattcattggtgggctgaaggaagaagtcatagagtgtattccgttccacaactaccccctccttaacagccttctttaccaaattctggtaccagctccgaagcttgtcagactttggcatcttctgtattgtaggatgacaatataaaacataatcgtcacgctttgtagatgggcaagtccatatggaacagcttacaaaccctcgtttcttgcagaaatccaagtagccaatcaaaatttcatgatacacaaaggtacggagagcttctccactggccgacttgatttccggtctgaagtacttgacagaatcaatatatgcaagataaacgtgcctttgatttggtgatgggcaggctgaaccatactcttgcacatacatggcgaacaggcatacatctacaccttcattcttttgaaacaagagaatggcctttgatttgtacggaaattccccaggatattgttcttttttaaaaaaatccttgaaacgtggttggacttgcagtgttctatcagctgaagataccactctaacagtaagaccttcaactcctggtacctcatcaacactttttccagaagcaattgccctctgttgccgctcctgcacaagccgctcagaaagcctttgctcaatatgatcacttagtctagttcttggtaactcgcgtgctcccagaatagtagatggctcaagtgaatcaacatcttcattatccttttccttcaagaaacattttgcacaagtatattcagcctctggatccacgattttggggttaaaaagtgcgcagatttgatgctgccaagctttgcacttatcgcactggacccaccattctgcctcagcatctgtctctgcatagctgaatctcttctgatatttggctttggcactactaagatggtggcatctgccacatattgaagatttgtcatttccattttccacttcaacataataggatcctgtagaattaattattttaaaacagagcgcgcaaaatcgtggagggggctcaaagaggagtctttccatcccacataaattgcatgtgttctgatcaggcaagccttcaactgatagcagctcttcagtcggcactttgctctgagaagtatcatggttcagagtacacaagtgatctttaagctcctcagaagttaatgcataaagtactgaggcccctcttctcttccttgccctcaggctgtcccctgacaatgtttggtccaataaatcaacctttgcatccttcatctcaatgtcactattttcacgacgaaattcttcttcagtttgtacagcactccccgacaatctgaccatatccattccatgtacattatcggtgcaagcaatgttgtcccccaaggaagtacaacatggtgattttgttggtgaattagtgacttcagattgtactgtttcagcagatgcataagtctcattggcagcaggttgttgttcctttgaagcctccatttcattgacatggacaagatggggaacatcaactttcaagcgttttgctggataatgcttgccagaagatccatctgaagcaggtgaagtcggctttgatacagtactatttgatgtctgttcagctctatccactgtcttgcttacagggctacaagcaccataattagtcatgaagccctgctgatgatgcataaagtggttgcttaaatttgagcttttctccctggagaaaccttcatgatcagaagtatgcccaagtttttctttcatttgaatgcatcgatcccgtttgtgctctccattgatgtacggatgaatttgagcatgatacaagtcacggtttccagtggtaatgtttgactgatctgattgctctagtgaccgactccacgtctcttgcttcatctcacattctatgtattgttgcaacaaaggtccctgaccggttgtgggatacaaacttttattgtttgtggaaaggttttgtccgttcactgttgagaaagaatccatcggaagtgttctcattgcactagaacatgttgtttgatcccacactgctgacaaagaactagaactcccagaggttgatggttgtgaactatcattttgatacgcatcacctgagaaatgttcttttatatggccaatatgcagtacatcaatactagggctacatttcggtagagttgatgcacatgaggtaaaaatggtgtttgctaatctttcaggcatctgcttgggtttatcagccaacgaatgagcaaagttagcagcacccatacagttttcatattggttatatctaccccgaaatgatgcagaattgacgatagcattcaacctggttcttaaagtttcaagatccatatacttaatctttgaatcagctttctcaaaaagatgtcggtcaatacattttccaatttccataagaaaggataggtcaaagttgcagaattccttccgctcatttaggtactctacaattttacggtgaataatattgcgaactacggatgtatcttgatccatattatccaactgaagaatttcagctgcagattgtgtccagccacttgtggggtattgctgggtaggaaatccacttgctgcatattgctgttgagtcccttgcagggtctttgccat

SEQ ID NO: 3496 - DNA, 2388 bp, Oryza sativa
  Clone ID: PAT_MRT4530_89679C.1
gagaagagagttttgtagcgagctcgcgcgaatgcgaagccaaccgagagaggtctcgataccaaatcccgatttctcaacctgaatcccccccccacgttcctcgtttcaatctgttcgtctgcgaatcgaattctttgtttttttttctctaattttaccgggaattgtcgaattaggcattcaccaacgagcaagaggggagtggattggttggttaaagctccgcatcttgcggcggaaatctcgctctcttctctgcggtgggtggccggagaagtcgccgccggtgaggcatggggatggaggtggcggcggcgcggctgggggctctgtacacgacctccgactacgcgtcggtggtgtccatcaacctgttcgtcgcgctgctctgcgcctgcatcgtcctcggccacctcctcgaggagaatcgctgggtcaatgagtccatcaccgcgctcatcatcgggctctgcaccggcgtggtgatcttgctgatgaccaaagggaagagctcgcacttattcgtcttcagtgaggatctcttcttcatctacctcctccctccgatcatcttcaatgcaggttttcaggtaaagaaaaagcaattcttccggaatttcatgacgatcacattatttggagccgtcgggacaatgatatcctttttcacaatatctattgctgccattgcaatattcagcagaatgaacattggaacgctggatgtaggagattttcttgcaattggagccatcttttctgcgacagattctgtctgcacattgcaggtcctcaatcaggatgagacaccctttttgtacagtctggtattcggtgaaggtgttgtgaacgatgctacatcaattgtgcttttcaacgcactacagaactttgatcttgtccacatagatgcggctgtcgttctgaaattcttggggaacttcttttatttatttttgtcgagcaccttccttggagtatttgctggattgctcagtgcatacataatcaagaagctatacattggaaggcattctactgaccgtgaggttgcccttatgatgctcatggcttacctttcatatatgctggctgagttgctagatttgagcggcattctcaccgtattcttctgtggtattgtaatgtcacattacacttggcataacgtcacagagagttcaagagttacaacaaagcacgcatttgcaactctgtccttcattgctgagacttttctcttcctgtatgttgggatggatgcattggatattgaaaaatgggagtttgccagtgacagacctggcaaatccattgggataagctcaattttgctaggattggttctgattggaagagctgcttttgtattcccgctgtcgttcttgtcgaacctaacaaagaaggcaccgaatgaaaaaataacctggagacagcaagttgtaatatggtgggctgggctgatgagaggagctgtgtcgattgctcttgcttacaataagtttacaagatctggccatactcagctgcacggcaatgcaataatgatcaccagcaccatcactgtcgttctttttagcactatggtatttgggatgatgacaaagccattgatcaggctgctgctaccggcctcaggccatcctgtcacctctgagccttcatcaccaaagtccctgcattctcctctcctgacaagcatgcaaggttctgacctcgagagtacaaccaacattgtgaggccttccagcctccggatgctcctcaccaagccgacccacactgtccactactactggcgcaagttcgacgacgcgctgatgcgaccgatgtttggcgggcgcgggttcgtgcccttctcccctggatcaccaaccgagcagagccatggaggaagatgaacagtgcaaagaaatgagaatggaatggttgatgaggagaatacatgtaaaatgtgacagcaaaagagagaaggcaagttttgggtttgtagagtttggctgctgctaatgagttgttgatagtgcctatattcttcagaacttcagatggtgcctcaccaaggcctaagagccaggaggaccttctgataatggttcgggatgattggtttgttctgtcaggatgaaccctagtgagtgacacagggtgatgtgctccgacaacctgtaaattttgtagattaacagccccatttgtacctgtctaccatctttagttggcgggtgttctttcctagttgccaccctgcatgtaaaatgaaattctccgccaaaatagatttgtgtgtataataattttgcttggttgatataaaaaaaaaaaatggtttgcaacaaaaaaaaaaaaaaaaacgagcgtgcgacggcgtgcatgagctcgtca

SEQ ID NO: 3497 - DNA, 141 bp, Oryza sativa
  Clone ID: PAT_MRT4530_89985C.1
gccggcggcgatagccggaagcgggagagggcggtggagatggggcaagaggccttcctactgaagaggcaatagcgtggttcatcagcgtaactcctgtcctaggtagccctgctagttataagcatcaaatcaaattca

SEQ ID NO: 3498 - DNA, 2289 bp, Oryza sativa
  Clone ID: PAT_MRT4530_90081C.1
atgaaccacaagcattctttctctgccctctgtgcagcaatgatactcaacgtgatcatattatttgtggatagctatgttgcagttgcatcagataccctttttcctggccaatctctctcaggctctgaaaccttagtatcagaaaatggtatttttgagttgggccttttcccctcagccccagctggtacaaagcactacctgggtattcgatacaagaacatgtcaagcaacaatccaataaccttttggctgggaaacagaattcccatcacctacttcattaatgcaacgctgtacatcgatgcaggtaaactttatattgaggagctcggctctattctatggacctcaaattcaacgagaaatgaatcaaacactgctgtggcagttattcttaacactggaaactttgtaataagagatcagctcaactcttctgtggtcacatggcagagctttgatcacccagctgataaactgctcccaggagcatatcttggactggacatggtcatgggaaccaacatcttgcttactctgttcaagcctccttataattgtaccctcatgattgaccaaagtaggaagaggggattcatcatgttcattgatgggcatgacaagtatcttggaacctttcctgaatggatggttacctacgaagaaaatggtagtctggtacgattaaacgatccaggaattccaaatgatactgaatacatgaaattgcaactggggcaactcagtttgttgaggtggttagataatgcaacaattagtggttggcaatctgtgtggagccacccttccagctgcaaagttagtgcttttcactgtggtgcatttggtatttgcacaagcacaggaacatgcaaatgtattgatggtttcagaccaacggagccaaatgaatgggagctgggacattttggtagtggctgctctagaattaccccctcaaattgtctaggtgttgtttccactgacttgtttgttttgttagacaacctgcaggggcttccttacaatcctcaggatgttatggcagcaactagtgaagaatgtcgagctatctgtctaagcgaatgctattgcgcagcgtactcctatcattctgcctgcaagatatggtacagcatgttgttcaatttgacttcagctgataaccctccgtacactgagatttatatgcgtataggttctccgagtaaacgcaggatgcacatactggttttcgtactaatttttgggtcaataggggttattctttttctgctgatgcttcttttgatgtacaagagatcctcatgtgttgcaagacagacaaaaatggaaggttttcttgcagtgtactcttatgcacaggtcaagaaagctacaagaaacttctctgacaaacttggggaaggaagctttggaagtgttttcaagggaacaattgcaggttcaacgattgttgctgtgaagaagctcaaaggcctagggcacacagagaagcagttccggacagaggtacagactgttgggatgatccaacataataatcttgttcgtcttttgggattctgtactagagggactagaaggttgctggtctatgagtatatgccaaatggttctttggattctcatcccttttcagaaacctcaagggtattaggttggaatcttcgccatcagattgtcgttggtattgctagaggtttggcctacctgcacgaggaatgcagggactccatcatacattgtgacattaagcctgaaaacatactactagatgcagagttctgccccaaaattgcagattttggtatggcaaagcttcttggacgggaattcagcgctgcactgaccactatccgaggaaccattggctatcttgcaccagagtggatatctggacaggctattacccacaaggcagatgtctatagctttggtgtcgtgctcttcgaaataatatcagggcggaggagtactgagaaaattcgacatgggaaccattggtatttccccctttacgctgccgctaaagtgaatgaaggagatgttttatgcttgcttgatgacaggatcgaaggaaatgcgagtttgaaggagttggatgttgcctgcagagttgcatgttggtgcatccaggatgatgagatccacaggccatccatgaggaaagttattcacatgttggaaggtgttgtcgacgttgaattgccgccaattcctgcttcctttcaaaacctgatggacgattatgatagtgatatatattccgtggaagtttga

SEQ ID NO: 3499 - DNA, 501 bp, Oryza sativa
  Clone ID: PAT_MRT4530_90460C.1
accaagagttcgcccacgcatccggttgagctcaatgaagtgaagctgatagacggctactacataatggacccagctaaagccagtggatatggtcagacgagaacaccatctgcatagtggcgatccctaggtcgacgctgaacggggagtatgaggacgtgaagctgctcaacgatctgctgaccaagaagaacgctgaaacaggctgggacacgccgatacacgtgaacgcagggagcggctggttcatcgcgccgatgctgtacccagagctgaagtgggacttccggctgactgctggcgaacagcatgatcataagcgggcacaaatacggactcgtctacgcaggaatcgggtggtgcatatggacgagcaaggaggatctgtctgaggagctcatgttccacatgaactacctcggggccgaccagcccaccttacacccttaacttatggaagggttgcagccatgtcattgcacacgattaccaactaat

SEQ ID NO: 3500 - DNA, 2304 bp, Oryza sativa
  Clone ID: PAT_MRT4530_90535C.1
ggcacgagctcgtgccgaattccggtcgaggaaaaatatggggagtatttgtgcgtttttatttttgtttttgggtcgcactgttcgatcgtagcatccatgaccactgtggcatcgctgtctttgctgccgcacttgctcatcaagccttccttcaggtgttgctccagaaagggtgttggtagatatggaggaatcaaggtgtatgcggtgctcggtgatgatggagctgactatgcaaagaacaacgcatgggaggccttgttccatgtcgatgacccggggccaagggttccaattgcaaaaggcaagttcttggatgtcaaccaagctcttgaggtggtccggttcgatatccagtattgcgattggagggcgcggcaggacctcctcaccatcatggttcttcacaacaaggtggtagaggttcttaatcctttagcaagggagttcaagtcaattggaaccttgaggaaagagcttgcagaattacaggaagaattggcaaaagctcacaatcaggttcatctgtcggaaactagagtatcatctgcccttgataagttggcacaaatggagacccttgtcaacgacagactgttgcaagatggaggctctagcgcatctacagccgagtgcacttcccttgctccaagcacgtcatcagcgtcccgtgttgtaaacaagaaacctcctcgccggagtctgaacgtgtctggtccagtgcagccatacaatcccagtctgaagaacttctggtacccagttgctttctccagtgacctaaaagacgatacaatggtgccaatagattgttttgaggagcagtgggtaattttccgaggaaaggatgggagacctggatgtgttatgaacacatgtgctcacagagcttgccctcttcatcttggctcagttaatgagggcagaatccaatgcccttaccatggttgggagtattcaactgatggaaaatgtgagaaaatgccatccacaaagatgctcaacgtgcgcatccggtcattaccatgctttgagcaagaaggaatggtttggatatggcctggcaatgacccaccgaagtcgactatcccttctctgctgcctccttcaggatttacaattcacgcagagatagtgatggagctaccagtggagcatggacttcttctggacaatctattagatcttgctcatgctccttttactcatacatccacctttgccaagggttggagtgttccaagcttggtgaagttcttgacaccttcatctgggcttcaaggatactgggatccatacccgatcgacatggaatttcgaccaccatgcatggtgttgtcaaccattggcatctcaaagcctggaaaactagaggggaagagcaccaagcaatgttcgacgcatctccaccagctccatatctgtttgccctcctctaggaataaaaccaggctgctctaccggatgtctctcgacttcgctccatggatcaagcatgtccctttcatgcatatactatggtcacattttgctgagaaggtcttgaatgaggatcttcgactcgtgctcgggcagcaagaacggatgatcaatggcgcaaatgtctggaactggccagtatcatatgacaagcttggtatccggtatcggttgtggagagacgccattgagaggggagtagacaggttgccattcagtaaccaaagtgagagtggatcatagtagctgcattgccaatagcctcttttcaattcttgtcgtatttcttggcgagatgaagatgaagatgaagatgatgatggccagaactagtcagtggatgtatatgcacagtttgtttaggcgtgcgtccctgcatggttggttcaccatctccctgagcttcgttgcagattgaattgggttctggagaggaaaggctaatggaaggagagaatgataggcgacgtcattctgtgtaattttaagtgtacactagcgacagcatcacgggatgcaattgtaatctgaggttgatttgtttttcttcttttttttttcctccccttttacccatgtaaaagtcgatcgcatgtcacgctatgatgcatatatatgatcatactattgattattgagccaaaaaaaaaaaaaaaaaaaaaaaaaaaaggggcggggcccgcgtcccgacgcctcctgcccggcgctccccgcttatctatttggcagattctgtgtatggtttgctaattcagaacagtaaggtctcttgataagttgagacaaaaaaaaaaaaaaaaaaaaaaaaaaaaaaaaaaaaaa

SEQ ID NO: 3501 - DNA, 1671 bp, Oryza sativa
  Clone ID: PAT_MRT4530_90537C.1
atgaccactgtggcatcgctgtctttgctgccgcacttgctcatcaagccttccttcagacaatggtttcaaggttctgtgattcttcagaccccatatcttaaaacctgttgtattgaaggtgttggtagatatggaggaatcaaggtgtatgcggtgctcggtgatgatggagctgactatgcaaagaacaacgcatgggaggccttgttccatgtcgatgacccggggccaagggttccaattgcaaaaggcaagttcttggatgtcaaccaagctcttgaggtggtccggttcgatatccagtattgcgattggagggcgcggcaggacctcctcaccatcatggttcttcacaacaaggtggtagaggttcttaatcctttagcaagggagttcaagtcaattggaaccttgaggaaagagcttgcagaattacaggaagaattggcaaaagctcacaatcaggttcatctgtcggaaactagagtatcatctgcccttgataagttggcacaaatggagacccttgtcaacgacagactgttgcaagatggaggctctagcgcatctacagccgagtgcacttcccttgctccaagcacgtcatcagcgtcccgtgttgtaaacaagaaacctcctcgccggagtctgaacgtgtctggtccagtgcagccatacaatcccagtctgaagaacttctggtacccagttgctttctccagtgacctaaaagacgatacaatggtgccaatagattgttttgaggagcagtgggtaattttccgaggaaaggatgggagacctggatgtgttatgaacacatgtgctcacagagcttgccctcttcatcttggctcagttaatgagggcagaatccaatgcccttaccatggttgggagtattcaactgatggaaaatgtgagaaaatgccatccacaaagatgctcaacgtgcgcatccggtcattaccatgctttgagcaagaaggaatggtttggatatggcctggcaatgacccaccgaagtcgactatcccttctctgctgcctccttcaggatttacaattcacgcagagatagtgatggagctaccagtggagcatggacttcttctggacaatctattagatcttgctcatgctccttttactcatacatccacctttgccaagggttggagtgttccaagcttggtgaagttcttgacaccttcatctgggcttcaaggatactgggatccatacccgatcgacatggaatttcgaccaccatgcatggtgttgtcaaccattggcatctcaaagcctggaaaactagaggggaagagcaccaagcaatgttcgacgcatctccaccagctccatatctgtttgccctcctctaggaataaaaccaggctgctctaccggatgtctctcgacttcgctccatggatcaagcatgtccctttcatgcatatactatggtcacattttgctgagaaggtcttgaatgaggatcttcgactcgtgctcgggcagcaagaacggatgatcaatggcgcaaatgtctggaactggccagtatcatatgacaagcttggtatccggtatcggttgtggagagacgccattgagaggggagtagacaggttgccattcagtaaccaaagtgagagtggatcatag

SEQ ID NO: 3502 - DNA, 1158 bp, Oryza sativa
  Clone ID: PAT_MRT4530_90587C.1
gagagagagagggcagtgcaggtgtcgctggccatggcgaggaggagcagcagcagagcgtgcgcggccatggcgacggccgccgtctttgcgctgctggccgcgacggcgacggcgtcggggctcgtacgggtggagcacccggccaagagcgacgggtcgctgagcctgctcgtcgtcggcgactggggccggaagggcacgtacaaccaatccagggtcgccgagcagatggggaaggttggggagaagctaaatatagacttcgtcatatccaccggtgacaatttctacgaggatggactcactggcgtcgatgaccaggcgtttgaggaatcgtttaccgatatctacacggcaaagagcttgcagaagccatggtacctggtgctgggaaatcatgactacaggggtgatgtgctagcacagcttagcccagtcttgcgaaagatcgaccagcgattcatttgcatgaggtcgttcattgttaatgcagagattgtggatttcttctttatcgacacaactccatttcagctgaaatattggactcgccctaaagaccatcattatgactggagaggagtggcacctcgacaaaaatacataactaatctacttaaggatatggatgaggcaatgaagaaatcaacagcgaagtggaagattgctgttgggcatcataccattaggagcgtcagtgaccatggtgacaccaaggagcttctgcaacttctacttccagttctgaaggtcaatggcatcgacttctacatcaatgggcacgaccactgcctggaacacattagcagcagagacagtcctatccaatacttcacaagtggaggtggttcaaaagcatggagaggagtcttgcagccaaattctgataagctccagttcttttacgatggacaagggttcatgtccctccagataaaccaggaccaagctgacttcatattttatgatgtttctgggaacatcttgtacaagtggagcaagagcaaagcaaactacctccagccctccacctatatcactgaagcattcacatataacctttggagagagagagagagagagagagactttgggggtttctaagctggtattttcatttaaaagagacaatgaaaagaaaatttgatctatgat

SEQ ID NO: 3503 - DNA, 2166 bp, Oryza sativa
  Clone ID: PAT_MRT4530_90589C.1
acgtgcgatcaatattattcttgataaagcactcaccagtaagatcaaatgagttttagttataacttgcttgctataattttcattataattttattctgttatatgcaatttttattcaaatggacacgtacacaactctgtactgaattacaacctttttccagaagcagtaactaatagccgtcttcaccgacacatgcttgattatcatagatcaaattttcttttcattgtctcttttaaatgaaaataccagcttagaaacccccaaagtctctctctctctctctctctctccaaaggttatatgtgaatgcttggcaatactgaagaaccctgatgccgatatgcaaaggtcactactagcttttagagttttaagccttctttgtaaattatacatggcataatcgatggtcctctggcaagaagttgtatgaatcagatctaatggataccatactgaacatctcttttcctagtctagtaggatggtctcggccttgtctcaaatttctttagtagatcaatcacatgccatgcttaaatactttcctatttcctttccggtcctcttcccttgcgtgccacaataatgcattcaaatttgatacaaatatcttagccaagctaattctccgttttgtggttttgcatctgcctcatgcttcagtgatataggtggagggctggaggtagtttgctttgctcttgctccacttgtacaagatgttcccagaaacatcataaaatatgaagtcagcttggtcctggtttatctggagggacatgaacccttgtccatcgtaaaagaactggagcttatcagaatttggctgcaagactcctctccatgcttttgaaccacctccacttgtgaagtattggataggactgtctctgctgctaatgtgttccaggcagtggtcgtgcccattgatgtagaagtcgatgccattgaccttcagaactggaagtagaagttgcagaagctccttggtgtcaccatggtcactgacgctcctaatggtatgatgcccaacagcaatcttccacttcgctgttgatttcttcattgcctcatccatatccttaagtagattagttatgtatttttgtcgaggtgccactcctctccagtcataatgatggtctttagggcgagtccaatatttcagctgaaatggagttgtgtcgataaagaagaaatccacaatctctgcattaacaatgaacgacctcatgcaaatgaatcgctggtcgatctttcgcaagactgggctaagctgtgctagcacatcacccctgtagtcatgatttcccagcaccaggtaccatggcttctgcaagctctttgccgtgtagatatcggtaaacgattcctcaaacgcctggtcatcgacgccagtgagtccatcctcgtagaaattgtcaccggtggatatgacgaagtctatatttagcttctccccaaccttccccatctgctcggcgaccctggattggttgtacgtgcccttccggccccagtcgccgacgacgagcaggctcagcgacccgtcgctcttggccgggtgctccacccgtacgagccccgacgccgtcgccgtcgcggccagcagcgcaaagacggcggccgtcgccatggccgcgcacgctctgctgctgctcctcctcgccatggccagcgacacctgcactgccctctctctctctctctctctctctctcggtaacgagaggctccgggttaggaggctatttgtactggagtatgtagatgatagtgatttgcaaggacaagttatcacctggttaggttaggtgcctttgcaagcgtagttgttaggaggaaaagaaattaaagcaactggtgattgaaatggctggctggctgacgacgtggcctctccctcccctttctgtttgtgtttgtgtttgggcctttccctgcttgcttgcctcgtcacaactcacaacacaggctcacagagtattctcatgccgtttgtctggccggccggccggcgacgtcaacgtcgttttcactttcgtgtcacgaacagccacgatcgctgtctattgccacggtaattatggttttgctttccctttcccaacacgcgtgtggcggacgcgtgggtcgacccgggaatccggacc

SEQ ID NO: 3504 - DNA, 2341 bp, Oryza sativa
  Clone ID: PAT_MRT4530_90745C.1
ctcctcctccgcatcgcagcgcttcgcgtccccccccccgcgcggagagaacatcgccagcaacgcgcgcttctccccctccccttctccccatcccatccaatccatccatggcggaatgctccattgatcacgaccagtagcttcctacaaccccagatcgggaggaggaagaagaagaagcaagaagcaagaagaaggagacgccgtcaatggggagctacgcgtacaagtactgcatgtgcttcacccgcaagttccgctcgccggcggccgacccgccgccggacgtccgcgccgccttcctcgccgccggcggaggcgacggcgggctccggcggttcctcgcgcaggcgcagggggagacgccggcggaggtggaccgcatcctcgcgctgctcagcggcggtggcggcggcggcggaggaggaggcatcgcggcccgcctcgtgggcccccggcccggcccggccccctcgctcgacgacttctttgggttcctcttcaacgccgatctcaacccacgccatcgccacccaggttcaccaggacatgtcggcgccgttttcgcactattacatatacaccgggcacaattcctacttgactgggaaccagctgaacagtgattccagcgacattccgattatcaaagcattgcagaggggtgtcagggtgattgagctcgatatgtggccgaattccgctaagaacaacattgacattcttcatggagggacattgactgcacctgtacaaatcatcaaatgtttgaagtccattaaagaatacgccttttgtgcttcaccatatcctcttgtcattactcttgaggatcacctcacaccggacctccaagctaaagtagctgagatgctcgtcaaaacatttggaaatctcctttacattcctagttcagacccaataaatgagtttccttctccagaatctctaatgaagaaaataatcatctcaactaaaccaccagaagaatacaagaagtttcttaaatctaaggataatcagaacatcaatggcggcttagctaatctggcagaggaaggaagcttgagaagaatagattcaaatgctgaagaatcggatggaaaggatgaactggatgatcaagatgaggactcctctgatgaggatgatcccaaatttcagcaggaaacagcctgtgagtatagggaactgatcaccatccacgctggcaaaccaaaaggccatttgaaggatgcgcttaaggtggatcctgacaaagtcaggcgcctttctttgagcgaaacacagctagctaaagcaacagcttctcatggtgccgatgttataaggttcacccagaagaatatactcagggtgtatccgaagggtacaaggattaattcttccaactatgatccaatgaatgcctggactcatggtgctcagatggttgcatttaacatgcaggggcatgacaaagcactccggttaatgcaaggattttttagagctaatggaggttgtggctatgtcaaaaagcctgacttcttgcttaggacaggtccaaatggtgaagtatttgaccctaacgcaagtatgcctgtgaagaaaactctgaaggtgaaagtatatatgggagatggatggcgaatggatttcagtaaaactcatttcgacaccttctctcctcctgatttctatactagggtggggatcgctggtgtgcgggcagattgtgtgatgaagaagactcgaacaatcgaggatcagtgggtaccgatgtgggatgaggagttcacattccctctgacagtcccggagctggctgtgctgagaatcgaggttcatgagtacgacatgtcggagaagcatgactttggggggcagacatgcctgccagtgtcggagctgaagcagggcatccgcgctgtgcctctccacgatcgccggggcaccaggtacaagtctgtcaggctcctcatgcgcttcgacttcctctagctagctttctacctagctagtgctgctgccaaaaccagaataccagatgatgtatcttactagttttctaggcttcttcagctggtgcatatatgtactatggatgtagatgtactatttttgtaatcacacatgcatcttgcatgtcttgataatgataataatgctagcatggttggtaggaatacaaaaacattttgtgcgattttgttggctatatctagtattctagtcagtgatatttatcaaaaaaaaaaaaaaaaaaaagggcggccgctaagtaagtaagacgtcgagctctaagtaagtaacggccgccaccgcggtggagctttggacttcttcgccagaggtt

SEQ ID NO: 3505 - DNA, 1547 bp, Oryza sativa
  unsure (1)..(1547): unsure at all n locations
  Clone ID: PAT_MRT4530_91041C.1
caaatcaaccacagacgctaattctcacaccatcgatcatcagcactagctgttacaggtttctcgtataatatcgatctatgcttgatttacacattcagatgtgacgaaatctacatgatgcaactgatggtgcatgcatgcatcatantccctgacccttggtgagccatcattttgggtcatatgcacagtttgattagctaccctttgatcgattaggatatgccaatggtcttccctagcagccacatgacgagcgagaactcgatcatgaagagcgcgtggagccatgtccggtcgacgacgaagccgaacaccgtgatccccgccctgttgttctccaggtaggtcactagagcctgtctcttctggaaggagatgtgggtggcatggaacgacacgatcttggtgccgtcgaggccgtcgtcgctcggggacgtctcgtcctcggactcgtcgccggaggacgacgcgttcggcgccggctgggggacgacggggccggcggcgtgtaagtagctggacgccttgatgggcgtcctggggttctcgtggtcacgctcctggctgttgatggtcgcgtcggcgtgccactgcgccgcgacgctggtgatcgcctgcgtcttgtgcgtgatcttcgccgcgctgtggaggcagatcagcagcccggtcacgaggctcaaggagcaaagcgcgagctcgccggaggtggcgatgttgacctgggcgtggggcctcgtggcggcgagcagcgcggagaactggctggccgtgacgaggaggaggcaggagacgatgaacttgcggtagcggtggctgatccgccggagctgctcgcggatgcggcggtgctgccgcagcacgtcggcgacgtcggcgcactggccgaagtccctggcgaacccggtcatccgcaggatctgcaggaagcatatgatccggaacagcacgcacgccatgaagaacatggccgtgcggtacatccacgacgccatctccagcgcgcacgccgcggcggaccaccacagcgggaacggccggttcgcgcagtaccagtacaccttgtacgcggcgtcggcgaggaagcaggggaggacgaagcaggcgaggaggcggaaggaccccgcgagctccacggtgtagccggcgcggacgtcctgggagtcgtgccggagcctgtcgaggtagagcagccggcgcaggccgcggcgccggacgagcctggagagcgtgaggtaggcgagcgccgcggagagggtgagcgacgcctgcacctgcccgtcgtaggcgcggcgcggcagcgcggcgcgcgccgccgccgggacggccacggcgagcagcgtgaacacgagccacgacgcgacggcgctggagccgtccgagtgctcgacgcacatccaccgcaggcacgaccggaagctgcccagctcgtcgcgcgcgtgcgacatggacctcgtgtacgaccccctccgccgcagcagcggcgtcgacgcgggctcgatcatcgcctccctggccgccgccggcgacgccgtgtcggccat

SEQ ID NO: 3506 - DNA, 1759 bp, Oryza sativa
  Clone ID: PAT_MRT4530_91259C.1
atgggaggaggcggcgcgggtggggacggcgaggcgtgggcggatcaggagcaggggaacggcgggggccgcggcggcggcggcggggaggcgaagcggtcggagatctacacgtacgaggccgggtggcacatctacggcatgaactggagcgtgcggcgcgacaagaagtaccggctcgccatcgccagcctgctcgagcagcacaacaaccacgtccaggtggtccagctcgacgagtcctccggcgacatcgcccccgtcctcaccttcgaccacccctaccctcccaccaagaccatgttcgtcccggacccgcactccgtccgccccgacctcctcgccacctccgccgaccacctccgcatctggcgcatcccctccccggacgaggccgccgccgccgccgccgccagctccaactccggctccgtccgctgcaacggcaccgcctcgcccgacgtcgagctgcgctgcgagctcaacggcaaccgcaacagcgactactgcggcccgctcacctccttcgactggaacgacgccgacccccgccgcatcgggacctcctccatcgacaccacctgcaccatctgggacgtcgagcgggaggccgtcgacacccagctcattgcccatgacaaggaggtctacgacatcgcctggggcggtgccggcgtctttgcatccgtctccgccgacggctccgttcgcgtgtttgatctccgggacaaggagcattccacaattatctacgagtccggttctggcggcagctccaattcggcaggtgcagatggcggcgctgcctcgccaacaccgctggttaggttagggtggaacaagcaggaccctaggtacatggcaaccatcatcatggatagccccaaggtggtcgtgcttgatatccgctacccaacactaccggtggtcgagctccaccgccaccattcgcccgtcaacgccatagcatgggcgccacactcctcttgtcacatttgcacagctggggatgactcgcaggcccttatatgggacctgtcatccatgggcactgggagcaacaatggtggcaatggaaatggcaatgctgcagctgctgcggcagctgagggcggtcttgatcccatattggcgtacactgctggggcagagattgagcagctccaatggtcagcgacccagcctgactgggtcgctattgcattctccactaaactgcagatcctcagggtctgatttctttgttccaaccctgttagtaaggggacatcgacaagaacaaagaaggccagcatggataatgaggttaggtgatcagaggacattgttacttcagtcttatttattttaagttgtgcacagatgatatgcgcgctgagttggttctagtgatataacaaattgtttcctacctagaagctggaattggcaatgaactgagctgttagagtaattagctgctctaagtttagtattgatgttaatgtggattgtagttatgtttgttgcttgttctcgaatgtccagctccagtagggcgtaggttcacctcttgacttccatgttgtattttgcactcgccgtatatgcacttataagttataagcttgtgcgtgttattttgtttcaaaaaaaaaaaaaaaacaaaagcccgaaaaaaaaaaaaaaaaaaaaaaaaaaaaaaaaaaaaaaaaaaaaaaaaaaaaaggggggcctgcagcccggggatccactagtttagagcgccgccaccgcgtga

SEQ ID NO: 3507 - DNA, 1401 bp, Oryza sativa
  Clone ID: PAT_MRT4530_91530C.1
gcacgaggcgagagcgctacaaaatggcccacgccgccgcggccacgggcgcactggcaccgctgcatccactgctccgctgcacgagccgtcatctctgcgcctcggcttcccctcgcgccggcctctgcctccaccaccaccgccgccgccgccgcagcagccggaggacgaaactcgccgtgcgcgcgatggcaccgacgttgtcctcgtcgtcgacggcggcggcagctcccccggggctgaaggagggcatcgcggggctctacgacgagtcgtccggcgtgtgggagagcatctggggcgagcacatgcaccacggcttctacgacgccggcgaggccgcctccatgtccgaccaccgccgcgcccagatccgcatgatcgaggaatccctcgccttcgccgccgtccccgatgatgcggagaagaaacccaaaagtgtagttgatgttggctgtggcattggtggtagctcaagatacttggcgaacaaatacggagcgcaatgctacggcatcacgttgagtccggtgcaggctgaaagaggaaatgccctcgcggcagagcaagggttatcagacaaggtctcctttcaagttggtgatgcattggagcagccttttcctgatgggcagtttgatcttgtctggtccatggagagtggcgagcacatgccagacaaacggcagtttgtaagcgagctggcacgcgtcgcagctcctggggcgagaataatcattgtgacctggtgccataggaacctcgagccatccgaagagtccctgaaacctgatgagctgaatctcctgaaaaggatatgcgatgcatattatctcccagactggtgctctccttctgattatgtcaaaattgccgagtcactgtctcttgaggatataaggacagctgattggtcagagaacgtcgccccattctggcctgcggttataaaatcagcattgacatggaaaggtttaacttctctgctaagaagtgggtggaagacgataagaggtgcaatggtgatgcctctgatgatcgaaggatacaagaaagggctcatcaaattcaccatcatcacctgtcgcaagcccgaaacaacgcagtagtaccctagtagtgaaattacgctcctgctatcttctccatcacgaataatgcaaattctgacgagttagcacctactgatggcgatttgttgatttggggaacagccagtgcactgttaccacgtcattgattttgtactcgtcagacttaaaaaaaaaaatatccatgaatgtgcactccaaatacgtcaagaaattcttagatcttcagaccaactcgtcagctagaggcggctaaaaagctcatttagctccctcggtgcaagattgctttgattgaccctcgtgc

SEQ ID NO: 3508 - DNA, 1540 bp, Oryza sativa
  Clone ID: PAT_MRT4530_91961C.1
atggctaccacggatgcaaccattgctcacatcatggatgaacaagaagatatcaaggtcaaggcatccaagtgctggaatccgattcggccacctgctacactgctgatttcaaacggccgccaaatctccatacaagctccgttttcggcccgtgagtacttgatggaaagctctcggagtcctctttccaacggatccaacctcatcaccaaattccatcccagtcaaccgcagatgaagaaacaaggtgcaacatcacctgtcatgggcctttgggcttgtaacttcgtttgggaccccggcccaagaatagggttgatctgcaccggcaagatcaacaacccacggagaggtgtatcgatcgctaaggcgcaacacaacgtctcgtttcagaggctgttgcttagttgcgctggtccaaccgtggaaacgaacacagtgaattcgaattcacggttcgttccgtcctcctccctggacgccaacccggtttgcgaccgcacctaccccaggaacaagtccgcattgatcgatcgagcgatggccgtggcggtggaggagatcgtcaggagggccggcgggtgcgccgtgatcgacggcggattcgccacgcagctggaggcgctcggcgccgacatcaacgacccgctctggagcgccgcctgcctcatcaccaagccgcacctcatcaaggaggttcacatgcaatatcttgaagcaggtgccgatgtcatcatttcctcatcataccaggcaactatcccaggattcttagccagaggaatgcttcttgaggaggcagaagggttactgcgaaggagcattgaattggcactggaagcacgagatgaattctggaagtcgacgctgaggaagtccaagcctgtttacaaccgtgctctggtcgccgcatccattgggagctatggagcttaccttgccgatggctcagagtacagtggatcgtatggagaagacatcacggcagagaaactgaaggacttccacaggcgccggctgcaggttcttgcgagcgctggccctgacttgatcgcgtttgaggccatcccgaacaaaatggaggcacaggctttagttgagcttctggaggaagagaacatccaggtcccctcctggatctgcttcagctcagtggacggcaagaacctgtgctcaggagagagctttgcagagtgcctccaattcctcaacgccagcgacaaggtgaccatcgtgggtgtcaactgcacgccgcctcagttcatcgagggcatcatacgcgagctcaagaagcaaaccaagaaggcgatcgcggtgtacccgaacagcggcgagatttgggacggcagagcgaagagatggctgccggcacagtgctttgggcacaagagcttcgacgcgctcgcgaagaggtggcaggaggccggcgcgagcttagtcggcggatgctgccggacgacgccgtcgacgatccgggccgtctccaaggtcctcaagggcaagacgtcctattcagcaactcagatttgagaccgat

SEQ ID NO: 3509 - DNA, 1604 bp, Oryza sativa
  Clone ID: PAT_MRT4530_9221C.1
aagcccaacgcaaaccgcatcgatcaactccttccccaagtcgaagcaaaatccctagcgatgtcgtcgccgccgcccgccgccgccgccgcgatggccgtcgacgacgccgacgacgaccagctcgcctccatgtccacggaggacatcgtcagggcaacccgcctcctcgacaacgagacccgcgtcctcaaggatgagctgcagcggacgaaccttgaggtggaatcctacaaggagaagatcaaggagaaccaggagaagatcaaactcaacaagcagctgccttaccttgtcggcaacatcgtcgagatattggaaatgaaccccgaggatgaggctgaagaggatggtgcgaacatcgatctggattcacaaaggaaaggaaaatgcgttgttttgaagacatccacaagacaaacaatattccttcctgtaatcgggcttgttgaccctgaaaagctcaagcctggggatttggttggagtcaacaaagacagctacttgatactagacacgctaccttcagaatatgattcacgggttaaggcaatggaggtagatgaaaagcctacagaggattacaatgacattggtggccttgagaaacagattcaagagcttgttgaagcaatagtattgcccatgactcacaaggaccggtttcagaagttgggaattcgccccccgaaaggtgttcttttgtacggaccacctggcactggaaagaccctaatggctcgtgcatgtgctgcccaaactaacgccacatttctgaaacttgctggtccacagcttgtccagatgttcatcggtgatggtgcaaagcttgtccgtgatgcctttcagcttgcaaaggagaaatccccctgcatcatttttattgatgaaattgacgcaattggaacaaagcgttttgatagtgaagttagtggtgacagagaagtgcagcgcacaatgttggagttgctgaatcagctagatggattcagtagtgacgagaggataaaggtgatagctgcaactaatcgcgcggacattcttgatcctgctttgatgaggtctggtaggctggaccgaaaaattgagttccctcatccatccgaagaagcacgagctagaattttgcaaatccattcaagaaaaatgaatgtaaaccctgatgtcaactttgaagagttggcacgatctacggacgacttcaatggtgcacaactgaaggccgtttgtgtagaagcaggcatgcttgccctacgccgagatgctacagaggtgacacacgaggatttcaatgaagggatcatacaagtgcaagccaaaaagaagtccagtttaaattattacgcttaattcttccgagagagttattaggcctaaggaaacgctccgtccaaaattgtttgtttgtaacactaccgttttatatatttgtgtggttcaagatgtgattgtacgaaacatgtcttgcgctgttccttctctgcttgatatatactgatagaagttgactcgtcccttgcgtaaaaaaaaaaaaaagtgtttggcttcttgcgtgtcaaaactggcaattcgaatactggacgatttaggattactcggctggc

SEQ ID NO: 3510 - DNA, 2142 bp, Oryza sativa
  Clone ID: PAT_MRT4530_92341C.1
atggaggactggatgccaccacccacacccagcccgagaacactcatgtcaagcttcttgaatgaagattttgtctctggttcattttccaatattttcagtgatcatgagagcaacaaaccccaggatcagtttgagagaaacagagagcttgtggatttgagtaaggaagtgccttcccaattcgcaagacccgcattccagagggatgcttccctggatcatagcttggtcagtcctacacagagatcaaactcgcatggtggtttggcagagcgcagggctgcgagggctggtttcagtgtcccgaaaatcgatacatcccgtggtggttcgtccacagtaattcgatcgcccgtggcaattccaccaggtcttagtccaacaacacttctcgagtcaccggttttcctttacaacgcaatggcacagccttctccaaccactggcacactgccatttttgatggcttcaaatgctaagtcaacaataccgtcagctaccaagatggacgaagattgcacatttggcaatgacactttctccttccaaccgcatgtagggtcgagacggccaaatttctccgctgcagaaaagggtcccaatgcttgtcaccaaaaccaatcgctgtcgaatatccatcagcgggaatccagtcttcagtcaagctttactgcagtcaaagatatcactgatgaaaaaaacattaaaacaaagacatctgactccatgtttggtgataaccactcttctgatgaacaagatgatgagactaaccaaaatggagaaaactctatgccacctccgaaccaccgttcaggtgtccctctgtcacataccaatgatccagaagtgaatgtcctagagaaccgcggttcacagacatgccataactctgcatccttgtgggacaatgccaaaaatgattgccttcaagatgttcaaagtgaagttattgaaacaagaacagctgcttgtcttccagtatcaaccaattgtgatacatctatcatggagtcccaagatgcagttgatgtgtcgtcaacactatctaatgaggaggatgatagggcaacgcatggcacggcttctatagagtgcaacggggatggagatgagactgattccaagagaaggaagctggatgctttgacagctgcaactgctgctattaccaccaccagtaacattgacatgggagctgcggcatcgagaggtgtccgggagcctcgtgttgttgttcagacaacaagtgaggttgacatccttgatgacggttaccgctggcgcaagtatggacagaaggttgttaaaggaaatccaaacccaaggagctattacaaatgtacgcaccaagggtgttcggtgcgcaagcacgtggagagagcatcgcatgatctaaaatccgtcatcacgacgtacgaggggaagcacaaccatgaagttccagctgccagaaatagtggacatgggagctctggatctggaaacgctccatctgcaccgcaatctaacggctctcagcgcaggcaagaacaagggcaagccagcttcagccagtttggtggcgcggctcccttcagctccttcgttctcccaccaagaaaccaatttggaccatcggcgagcaatttcccctttgggatggtcccgccaggcatggcgattcccatgccatctctagggtctcttgctccagcaaagatggctggtcatccatccaccatgcagggctaccaggggctcatgattccggaaggagagatgaagacagagcccatgtcgcagctcggcttccccgcggtaaaccaatcttcatcatccttccaacagatgatgaacaggcctccatcatttggacctcagatgtaaataataatattaaagaaagaaaagaaaatgatagatgtgcttcagcttctatacatggtagcaatgctacaacatagctttgttgttctagcttttacctgttattttttctttgggcttttattttttggaagcaaagaatgcagaagatgttacccgttttgtttatgttgtaattggaaaaaaaaggtggtggtagtgttcaggacaaaaggcaaaatcattcaattggaaaaaaaaaagaaaaaaaaaaaaaaaaaaaaaaaaaaa

SEQ ID NO: 3511 - DNA, 1842 bp, Oryza sativa
  Clone ID: PAT_MRT4530_92556C.1
cccacgcgtccgcccaccggccgggacacgacgctcgcactcctctcctctcatctgacatatctcctcccgtcctttcgaagcctctcgaatcgcatcgccgagccggatggcggtcaccgccgacgtgaagctcgagggcctccgcgccgccaccgacaagctcgaccagatcagcgagaacgagaagtccgggttcatcagcctcgtttcgcgctacctcagcggcgaggcggagcagatcgagtggagtaagatccagaccccgaccgacgaggtggtggttccctacgacacgctctcggctgctcccgaagatctcaacgagacgaagaagctgctcgacaaactcgtcgtgctcaagctcaatggaggcctcgggacgaccatgggctgcactggtcccaagtctgtcattgaagtccgcaatggctttacgtttctagaccttattgtgattcaaattgagtccctgaacaagaagtatggatgcaatgtccctttgcttctaatgaactcattcaacactcatgatgacacacagaagattgttgagaagtactccaactccaacattgaaattcacactttcaaccagagccaatatcctcgcattgttactgaagacttcttgccacttccaagcaaggggaagactggcaaggatggctggtatcccccaggccatggtgatgtgttcccctccttgaataacagtggaaaacttgataccttgttggcacagggcaaggagtatgtctttgtcgcgaactcggacaacttgggtgctattgttgacatcaagtttgaatccttaaccatcacagagatcttaaaccacctgatccataaccagaacgagtactgtatggaggttactcctaaaacattggctgatgttaaaggtggtaccctcatctcttacgaagggagagttcagctgttggagattgctcaagtccctgatgagcatgtgaatgaattcaagtcaattgagaagttcaagatcttcaataccaacaacctgtgggtgaacttgaaggccatcaagaggctggtagaagctgaagcacttaagatggaaatcattcctaaccctaaggaagttgatggtgtgaaagttctgcaactcgaaactgcagctggagcagccattcggttctttgaaaaagcaattggcattaatgttccccgctcgagatttctgccagtcaaggctacatctgatttgttgcttgtacagtctgatttgtacaccttggtcgatggctttgtcatccgcaacccagccagaacaaacccatcaaacccttcgattgagcttggacctgagttcaagaaggttgccaatttcctggcccggtttaagtcaatccccagcattgtcgagcttgacaccttgaaggtctctggtgatgtctggttcggctctggagttacactcaagggtaaggtgaccatcaccgccaagtcagggaagttggagatcccagatggagccgtgcttgagaacaaggacatcaacggtccggaggatctttgaggctgctcacggaaaccttccagatatatttagctgagcgttttgtaattgtcgtgtgcattcggcagccagggctcgatgatcccattacagaataattgtaatcatcttggcacatccgtacttctgttttttggtgtgccaagggcgttgtatttcatttacttaaatgatctcgtaataccatagttttgcatgcactgtagctgggagctcgtagtttactggtaattctattcagagtttactactaaaaaaaaaaaaaaaaaaaaaaaaaaaaaaaaaaaaaaggggggggg

SEQ ID NO: 3512 - DNA, 1353 bp, Oryza sativa
  Clone ID: PAT_MRT4530_92598C.1
tcgcgtcggtgtgccagcaccctcccggcggccggagcggcgcgacttcccatctaacatattgcttccggcagccgccgccggacaccatggctgactctccgagcccacgcctggacgaggaggacgccttcggccgcgacttcaactcgtccccttcgcccacagccccacccgcccgctccggcgagaagaggccgttcggcgatctggacgacgatgacgaggacgttttcgcttccaagaagggaaagacaaaggtggaagaaagtgcgccaggtgctgccacgggaatgattctgtctcttcgcgagagtttgcagaactgtaaagataatcttgcgtcatgtcaggtggaacgggaggctgccaaatcagaagttcaaaagtggcattcagcatttcagaacattccagctgtacctgctggaaccaatccagatcctgtttcggttgtttcttatctcaataacctgaagtcgtcggaagaatcattgaaggagcagctggagaaagctaagaaaagagaggcggctttcattgtaacatttgcgaaacgtgaacaagaaattgcagaactgaagtctgcagttagggatttgaaaactcaattaaggccaccatcgatgcagacaaggagattattgcttgatccagcaatccacgaggaatttacacgattaaagaatcttgtggaggagaaggagaaaaagatcaaggaactacaggacaatgttgctgctgtcaattttactccatccagtaaacatgggaaaatgctaatggccaagtgtagaacattgcaagaggaaaatgaagagattggggcgatggcttctgaaggaaaaatccatgaacttggaatgaaaattgcagttttgaagactcggaacaatgaactcaggaatcagttcaatgagctgtataaacacatggatggtctaacaaatgacgttgaaagatcaaatgaaatggtggccattcttcaagatgagttagaaacaaaagatgtagagctgagaagattgaaggagatgcttgcccagaaagaagcaactgatgagaacaaaatacctcaagaaaatgacgtcgctggagatgatatagttgctgccgccgagagtcagccaataaaagtagaaacataagctacgccttcagcagtcatttctagagtagcttgcgttctcaacattcttattattttttgtatcatgtatcagaagtgtttacttgtgtaatttatctaatgtcgtttattcttgccgatttgcattgcgctttgtctgagcactgcagcatgagacgtgttacctacttaccttgaatctaaactctcttagttcgtgcgtc

SEQ ID NO: 3513 - DNA, 1380 bp, Oryza sativa
  Clone ID: PAT_MRT4530_92707C.1
atggtctcatacgtcggcccaagcacggcacggcccacaagcgggcgtgcctgggccggctacagtgatgatgccgcggcagtgcgggaatcgcgcgttgctagcggagggatcgagcacggtggtggtcgtccatggccgcaagaccagaggtggtatcagcactgtcacctccagcaggaggaggagccatggcggtgtcagatcaaggcccacacggtgctgcaaggttcagatgctctaagcagcatcagggagtggagcaggtcgcatttggtcaccatgacagggctggtggcgtgtgctgttcttgtagtcccttctgccgatgctgtggatgctctcaagacatgcacttgccttctcaaggagtgcagaatagagctggccaaatgcatagcaaacccatcctgtgcagcgaatgtagcatgcttaaatacatgcaacaatcgccctgacgagactgaatgccagatcaaatgtggagatctgtttgagaacactgtggtcgatgagttcaacgagtgtgctgtttcgcgcaagaaatgcgtcccacaaaagtccgacgttggcgagttcccagtccctgatccatccgcccttgtcaagaacttcaacatggctgatttcaacggcaagtggtatatttcaagtggcctcaatcccactttcgacacattcgattgccaacttcacgagttccgtgtcgagggagacaaacttatagcgaacttgacatggagaattcgcacccccgactctggcttcttcaccagaacagccatacagcggtttgtgcaggacccagcacaacccgcgatcctctataaccatgacaacgagttcctgcactatcaagatgactggtacattatctcatccaaagtagagaacaaggaagatgactacattttcgtgtactaccgcggcagaaatgatgcgtgggatggatatggaggtgctgttctgtacaccagaagcaaagttgtgcctgaatcaatagtacctgagctagaaagggcggcaaaaagcgtaggtcgtgacttctccacattcatcagaaccgacaacacctgcggtcctgagccacctcttgtggagagaatagagaagaccgtcgagcaaggagagaagaccatcatcagggaagtgcaggagatcgagggcgagatcgagggagaggtgaaggagctggaggaggaggaggtcacattgttcaagaggttgacagatggcctcatggaggtgaaacaggacttgatgaacttctttcaggggctaagcaaggaggagatggagcttttggatcagatgaacatggaagcaactgaggttgagaaggtcttcagccgcgccctgccaataaggaaactaaggtag

SEQ ID NO: 3514 - DNA, 1887 bp, Oryza sativa
  Clone ID: PAT_MRT4530_92709C.1
ggcggcgcgcgcgttatccatctccccctcgccgccgccctatcgccgctgctcgagctctcgatcccctcctcctcgctccgccggccgccgcggccgcaacccagatgatgccgcggcagtgcgggaatcgcgcgttgctagcggagggatcgagcacggtggtggtcgtccatggccgcaagaccagaggtggtatcagcactgtcacctccagcaggaggaggagccatgggcggtgtcaggtaccaccggtgctgccccccgagggcttacctatggaggaagggcgatcatcttcctctccatcatgccaaaatctctgctcgttgttccgagatcaaggcccacacggtgctgcaaggttcagatgctctaagcagcatcagggagtggagcaggtcgcatttggtcaccatgacagggctggtggcgtgtgctgttcttgtagtcccttctgccgatgctgtggatgctctcaagacatgcacttgccttctcaaggagtgcagaatagagctggccaaatgcatagcaaacccatcctgtgcagcgaatgtagcatgcttaaatacatgcaacaatcgccctgacgagactgaatgccagatcaaatgtggagatctgtttgagaacactgtggtcgatgagttcaacgagtgtgctgtttcgcgcaagaaatgcgtcccacaaaagtccgacgttggcgagttcccagtccctgatccatccgcccttgtcaagaacttcaacatggctgatttcaacggcaagtggtatatttcaagtggcctcaatcccactttcgacacattcgattgccaacttcacgagttccgtgtcgagggagacaaacttatagcgaacttgacatggagaattcgcacccccgactctggcttcttcaccagaacagccatacagcggtttgtgcaggacccagcacaacccgcgatcctctataaccatgacaacgagttcctgcactatcaagatgactggtacattatctcatccaaagtagagaacaaggaagatgactacattttcgtgtactaccgcggcagaaatgatgcgtgggatggatatggaggtgctgttctgtacaccagaagcaaagttgtgcctgaatcaatagtacctgagctagaaagggcggcaaaaagcgtaggtcgtgacttctccacattcatcagaaccgacaacacctgcggtcctgagccacctcttgtggagagaatagagaagaccgtcgagcaaggagagaagaccatcatcagggaagtgcaggagatcgagggcgagatcgagggagaggtgaaggagctggaggaggaggaggtcacattgttcaagaggttgacagatggcctcatggaggtgaaacaggacttgatgaacttctttcaggggctaagcaaggaggagatggagcttttggatcagatgaacatggaagcaactgaggttgagaaggtcttcagccgcgccctgccaataaggaaactaaggtagcttctagttgccactccagcaagtacaaggcaacaagtaatgctcaaaatatattctattcaccaaggcaataccaatagtaacagattattctacagagaacaaagaattttcgaatccgctaatgcatccccattattacaatacatttccagcttagagctatgtaaagtatcagtaactatgtaacttccattaaaaaaaggtatatagtgaactttgtacaactgttccaaatatgatatggattatgtccttttgatgacgatagtttgaatgctgttaattttcttcggtactttatggcaatttaggttatgtcaaatgcaaataatattgaattgtagcttcataattccaaaaaaaaaaaaa

SEQ ID NO: 3515 - DNA, 1951 bp, Oryza sativa
  Clone ID: PAT_MRT4530_93023C.1
aattgcatccgagctcacctagcttctctcttgcaaccagcgattcgatcgattccatctccaagaagcagcggctagcagcagctagtagttgccatggactcgtcgacggtgggcgctccggggagctcgctgcacggcgtgacggggcgcgagccggcgttcgcgttctcgacggaggtgggcggcgaggacgcggcggcggcgagcaagttcgacttgccggtggactcggagcacaaggcgaagacgatcaggttgctgtcgttcgcgaacccgcatatgaggacgttccacctatcatggatctccttcttctcctgcttcgtctccaccttcgccgccgcccctctcgtccccatcatccgcgacaacctcaacctcaccaaggccgacatcggcaacgccggcgtcgcctccgtctccggctccatcttctccaggctcgccatgggcgccatctgcgacatgctcggcccgcgctacggctgcgccttcctcatcatgctcgccgcgcccaccgtcttctgcatgtcgctcatcgactccgccgcggggtacatcgccgtgcgcttcctcatcggcttctccctcgccaccttcgtgtcatgccagtactggatgagcaccatgttcaacagcaagatcatcggcctcgtcaacggcctcgccgccgggtggggaaacatgggcggcggcgcgacgcagctcatcatgccgctcgtctacgacgtgatccgcaagtgcggcgcgacgccgttcacggcgtggaggctggcctacttcgtgccggggacgctgcacgtggtgatgggcgtgctggtgctgacgctggggcaggacctccccgacggcaacctgcgcagcctgcagaagaagggtgacgtcaacagggacagcttctccagggtgctctggtacgccgtcaccaactaccgcacctggatcttcgtcctcctctacggctactccatgggcgtcgagctcaccaccgacaacgtcatcgccgagtacttctacgatcgcttcgacctcgacctccgcgtcgccggcatcatcgccgcatccttcggcatggccaacatcgtcgcgcgccccaccggcggcctcctctcggacctcggcgcgcgctacttcggcatgcgcgcccgcctctggaacatttggatcctccagaccgccggcggcgcgttctgcctcctgctcggccgcgcatccaccctccccacctccgtcgtctgcatggtcctcttctccttctgcgcgcaggccgcctgcggcgccatcttcggcgtcatccccttcgtctcccgccgctcgctcggcatcatctccggcatgaccggcgccggcggcaacttcggcgccgggctcacgcagctgctcttcttcacgtcgtcgaggtactccacgggcacggggctggagtacatgggcatcatgatcatggcgtgcacgctgccggtggtgctcgtccatttcccgcagtggggctccatgttcctcccgcccaacgccggcgccgaggaggagcactactacggctccgagtggagcgaacaggagaagagcaagggcctccacggtgcaagtctcaagttcgccgagaactcccgctccgagcgtggccgccgcaacgtcatcaacgccgccgccgccgccgccacgccgcccaacaactcgccggagcacgcctaaggcgtaaacaattctgcgaccgagaccagcaatacgctggagttcgactcgatgataacacgccggagcacgtccttgttgcaaacggtgatgaaattaagagtgaaatatttccttaggaattgaatcctttgaaattaattcctttggaatttctccgatacaaacggaggtataataagggagaggcatttatacctatgtacatgttacacttttttgaaaaaaaagtgtattccatattgatgttgtc

SEQ ID NO: 3516 - DNA, 404 bp, Oryza sativa
  Clone ID: PAT_MRT4530_93123C.1
ctcacgcattcgaaccaatactacctgttccaccacaagaaggacgacgagcacgacaccggaggtagactcctacggagggggcgtctacacatcgaatacggtgaccaccgatgtgttcatcggcggacaaaacgagtacaagaggtacaagatggaggagaagtagcacacgcacaagcagcacctggtggaggccggcgccctcgtcgacggcgccttcatcatgtatgagaagcacgaggcgaagaaggacccggagaacgcgcacaagcacaagatcatggaggagatcgcgttcacagactggttcaacgccggaaggtacaccttacacgagcaccacgagaagaataaggaccacacgagcgccgaggagtccaccggcgagaagaaacaccacc

SEQ ID NO: 3517 - DNA, 1809 bp, Oryza sativa
  Clone ID: PAT_MRT4530_93287C.1
atggatacgctgtttaggttggttagcctccaagccgcctccgagcagcagcagcagcagcagcagtcggcgtcctacaactcgaggagcacgacgtcgagcgggtccaggtcgtcgtcgcaccagacgaacgcgtcctacagctactaccaccacagcagcaacagcggcggcggcggcggaggcggcggagggtactactacggcggccagcagccgccgccgtcgcagtactactacctggagccgtaccaagaagaatgcggcaacgccccacaccaccagctttacatggatgaagacttctcctcctcgtcgtcgtcgaggcacttccaccacggcgcgcgggtgcagcagcagcagccgccggcgtcgtccacgcccacggggacggcgccgacgccgccgctgtcgacctcgtccaccgcggcgggcgccgggcacggcctgttcgaggcggcggacctgtcgttcccgccggacctcaacctcgacttctcgtccccggcgtcgtcgtccggcggcgggacagcgtcgtcgggcgcggttgggggcggcggcggcgggaggtgggctagccagctgctgctggagtgcgcgcggtcggtggccgcccgcgacagccagcgcgtgcagcagctcatgtggatgctcaacgagctcgcgtcgccgtacggcgacgtggagcagaagctggcttcctacttcttgcaggggctgttcgctcggctcacggcgtccgggccgcgcacgctgcgcacgctcgccgcggcgtccgaccggaacacgtcgttcgactcgacgcggcgcacggcgctgcggttccaggagctcagcccctggtcctcgtttgggcacgtcgccgccaatggcgccatcctcgagtccttcctggaggtcgccgccgcggcgtcgtcggagacgcagcggttccacatcctcgacctgagcaacacgttctgcacgcagtggccgacgctgctggaggcgctggccacgcggtccgccgacgagacgccgcacctctcgatcaccaccgtggtgtccgccgcgccgtccgcgcccacggcggcggtgcagcgcgtcatgcgggagatcgggcagcgcatggagaagttcgcgcggctcatgggcgtgcccttccgcttccgcgccgtgcaccactccggggacctcgcggagctcgacctcgacgcgctcgacctccgcgagggcggcgccaccaccgcgctcgccgtcaactgcgtcaactcgctgcgcggcgtggttcccggcagggcccgccggcgcgacgcgttcgcggcgtcgctccgccggctggacccgcgggtcgtcaccgtcgtcgaggaggaggcggacctggtggcgtccgatcccgacgcgtcgtcggcgacggaggaaggcggcgacacggaggcggcgttcctcaaggtgttcggcgagggcttgcgcttcttctcggcgtacatggattcgctcgaggagagcttccccaagacgagcaacgagaggctggcattggagaggggagcagggcgcgccatcgtcgacttggtctcgtgcccggcgtcggagtcgatggagcggcgggagacggcggcgtcgtgggcgcggcgcatgcggtcggccgggttctctccggtggcattcagcgaggacgtcgccgacgacgtgcgatcgctgctgcgccggtacagggaagggtggtcgatgcgcgaggccggcacggacgactcggcggccggagccggcgtcttcctcgcgtggaaggagcagcctctggtgtgggcaagcgcgtggcggccatga

SEQ ID NO: 3518 - DNA, 1491 bp, Oryza sativa
  Clone ID: PAT_MRT4530_9330C.1
atgagagaagggaatgtcacacatcatgagtatatgcaagttggtaaggggcgtgatgtgggaatgaatcaaatttcaagctttgaagctaaggtggcaaatggcaatggtgaacaaacattgagtcgtgatatctatcggctggggcgcagattcgatttttatagaatgctatccttctactttactacagttgggttttactttagtagcatggttacagtacttacagtttatgtgtttctatatgggaggttatatctagttatgagtggtctggaaaggtctattttgctggatccacgtatcgagcagaacattaagcctcttgaaaacgcactggcctcgcagtcttttttccagctaggtttgctgcttgttctccctatggtaatggaagttggcttagaaaagggattccgcacagcattaggagagtttgttatcatgcagcttcagctggcatctgtgtttttcacattccagcttggcaccaaaacgcactactacggaagaacaatactgcatggcggggctaaatacagacctacaggtcgtggatttgttgtctaccatgcaaagtttgctgacaattaccgcatgtactcccgcagccactttgttaaaggacttgaactgttgatacttctggtggtttatttagtgtatggaagttcctaccgcagctcaagcatgtacctatttgtcaccttctccatatggttcctggttgcatcttggctcttcgcaccctttatcttcaatccgtcatgcttcgaatggcagaagacagttgatgactggacagattggaggaagtggatggggaaccgtgggggtatcggcatgtctgtggatcaaagctgggaggcttggtggataagtgagcaggagcaccttaggaagactagcattcgctctctcctcttggaaatcattctttcgctccgcttcttgatctatcagtacggtattgtgtaccatctgaacatagcacgccgcagcaaaagcattctggtatatggattgtcatggctggttatgctctcagtcctagtagttctaaagatggtttcgattgggcgacagaagtttggaacagatctgcagcttatgttccgcattctcaagggcctcctgttccttggttttgtctctgtgatggctgtattattcgtcgtttgtaacctcacaatttcggatgtttttgctagtattcttgggttcatgcctactggttggtgcattcttctgattgggcaggcatgttcgccgttggtgaagaaggcaatgctgtgggattccatcatggagctcgggaggtcgtacgagaacctgatgggactcgtcctcttcctccccatcggcctcttgtcatggttccccttcgtgtccgagttccagacacgactgctcttcaaccaggccttcagccgtggcctccagatctcaaggatcctcgccgggcaaaaggacattggagaggaatga

SEQ ID NO: 3519 - DNA, 2043 bp, Oryza sativa
  Clone ID: PAT_MRT4530_94258C.1
atggcggcgccgtcggcggccacgcgcaggaagctgcagcgcaagttcaagctgcgaggcttcaccctcaaggtggacgccctcgaggaggccgccgccttcctcgcccgcttccccgacgccgaggacgacgccctcgacctcctcctcgacgagctcgacaaggagccgctgcagtcgtcgattcttgaccgggacgcggtgcggcgcgtggtggcgctgctcgtcgaggcggacgaggcggtggatgcggcgtctccggcggccaccagcgcgcgctcggcgctgcgggtggtggattcgttcgtcgtgccaaggttccactacgatccgatcaagaaagtcttctacgaattagccatacatggagaagctggagataaagcagccctgtacagggacaggtatcaggttctgcttcagaggctagctcgtgatatatacttctctaagccagcttttgacactgttatgaccgaagatgataattgtgaggtaaatacatgtggattccctcctttagaggatagagaagcatcactttcgatgcttatggggctagatttcttcggtggaggcccttctaaagcccttccaaggtgtgcacttccgaaatatctaactgaggaactgcagaagcacatcccaaatgcaatattcgtaagcaacccttgcagcacccacgggcacgctgtggactgccggctggtccactacacacggtccatcgcggatgctcagccacaggacgtgccgcagtggagctgggccgagaggtttgccataggtcgaccagtggtggacagcgcaccctacggggttggtcgcagcgcgcagtggccagaggacggtcccacgatggggacttactggtgtcgacgtgggcgtcgttacgctcacgtccaggtgagacgaggttacccggacttcgtgtttgagtttgaccgtctccagccgagcgacgtcatctgggagccgtacacagaagaggccgtcgctgcgagagcaccgctaggactttcgtccttgtgcacacgcgaccaggcttactggctcaccatcctgccgatggtgttcgacattttcgttgagcctcactgcccgcagcgtgtgatgagacagttcggacttaggcaggtgttagctacagaggaggtgatcaacgagctcttcctacacacggaggagaactaccgtgactaccttcgctggtaccttcctcgcactcatgcgcgtgtgaccttcactccagacgccccagagccgcacgttgctgctgtcacggacgcgtatcccacgcaccgtgaccgagactacttcgtgggggccgatgccgcacgggatatcagtgccaatatcaccgcagtccaagtgaggttgaacagaggtttgcacttgactgacgttgagcagagggtgaccttcgaccggatgcaggagaagatgcgtgcggtcatgcgcgtcttctcctgtcgcagcgccgtggacgtcgtacctccagctggtccggacctcgtttgccttcgagcgcccctagcttcggagcagtgcgacctacagcaccggaactcgtctgccttcgagcgcgttcacagccacgaccggcgcttccgcgagctccgcaggggcattcgccagcacttccggcgcgttcgccacctcttcgagcgcgttcgccagctcttcctctcacggagcgtcgatccctcgtccacacgccgggatcttcggtactggggcctcttcgtctcacgccgcttggaggagctccagaggcgcacactcaggagcagccagaggtcacacctgtacaggcaggacgggttggccgtgccatacccccggaccgactcacgtactcccaggggcacgttagggcgcaggcgtgacacgcttgaccagactgcaataaatgctgttaggaggagggcggacacctcaccctcgggcccgacgtccccgaaggtgccaggccacgtgggcgattgcgtctgcctcaagcctctggtcatgatactcccggtcccatatcaccgacagtag

SEQ ID NO: 3520 - DNA, 666 bp, Oryza sativa
  Clone ID: PAT_MRT4530_94515C.1
aacaacaaaattacttcctcggtttcactacttgcatgccattatgtcaaccatttttttgtgttgttccacaatgcttgcctcctttaccttcttaagtaagtatcatccactcacgtagaccatatgttttaacttttgaatggccttccaaggtattatcctctgtccacatatgcaaggcctgttcttgattcgctttgtccacaaatgtaaatatttcatacccctgtgcaaaacaagtataatgtcctttatacctctgataagtatccaactttccaatatgcatgtgttaaatatagtagctagagagaataaatagtaaaagtctttttcaatctcattttgaggaaaatatgccatacatttctgaatggcgggagtactagtatttactcatttgaagaattttaccccttgtttttcttatggcaccaaaaacacccctgctgttaagtctctatttaatgtacagataaacatttttttaggagaaaaaaatagatattaggaatagcttcaccttcacctctctctgtactccctctgccccataaagattcaacttttttctacacgaatttggacacaccctatttgtccagatttgtgtataaaagtttatttatttcgggaggatggaagtatatgtttaatataatg

SEQ ID NO: 3521 - DNA, 2903 bp, Oryza sativa
  Clone ID: PAT_MRT4530_94553C.1
gtggtgctgcagcccagccggccgcaccccgaaaccctcctccacggccgcctccccgccgcgccgccggccgccgccgccgccgccatcgcgtctaggatccccgccctcctccgtcgcctctcctcttctcccggagacggtcagtgccggcgacgactggggctcgtcctggtccaccggcatcaccaaggaacactgcgacggccccggctccccggtcggttgcgcggtcacctccccgccggagacgggctggcctgagcgtggggccagcgggcgcggcgggggccgggccgcgcgcggcggcggcgagcggccacgggaatggggccaccggtggagcgcgaaactggaggggctgcggcggccgctggcctacgggcgaccgggagccgctccgcgtcgtcggtccgcgggcgccggggcccatgggggagcgtcttctgcgcgctgatgcaggtcgcgtaggggcacctccgcgacaaggtccaggtacgcatctggcgccgcccgggccgcgccgtcgaccgggccaccgccgagcacctgcttcgaggtcatcaacgcccgggaggacagcatccgccgcaagatccgccgcggcgcctacatcaagtacgtcgagagccgccccagcgactgcaccctctacgccgacaagatactcagggtcagcttctgcctcaacatgatcgacgagtcgctcatcacgctcaagggcgtcacctacctccaggaggccgtctgagaagccgacattgtgatgaactggctgccgtccacggaaaccagggaagtcttcgggtggattaggaggtactggaaggcgaggagtactgcccccagcaggtgctctgtgaccagaagggtcgacgccgcagccgacgacggctggaccaagattgtagctacacgagggacgaactccaagcggaggggaggtggagccgagaagatggctagtcttgcagatgtttacatgaccccacaaaacgacaactaaaagatttctagaaggaggctaagtccagcacgccggaggagaataatcccacccatcatgtagcaataggctactctacttacatgtgtgcagattgtcctagcactgttgcagcattaggcaagaaagcagaaacactgaaaccggctcaagttttacccaccacttctggtcctgtcctcttcaagcatagggaggccaaacctaccggtggttattgtattcatgtcatttgtagcaagttccgttgcccccttttatatgggaaggctgcgacgacaagggaaggcggagaggtggaggagggagcaatgggcggggcggaggacgcgccgcgcgcggcggcggcgaacgggcacgggaatggggccaccgtggaggagaagctggacgagctgcggcgcctgctgggcaaggccgacggcgacccgctccggatcgtcggcgtcggcgccggggcctgggggagcgtcttctgcgcgctgatgcaggacgcgtacggacacctccgcgacaaggtgcaggtccgcatctggcgccgcccgggccgcgccgtcgaccgcgccaccgccgagcacctcttcgaggtcatcaacgcccgggaggacgtcctccgccgcctgatccgccgctgcgcctacctcaagtacgtcgagggccgcctcggcgaccgcaccctctacgccgacgagatactcagggacggcttctgcctcaacatgatcgacacgccgctctgcccgctcaaggtcgtcaccaacctccaggaggccgtctgggacgccgacattgtcatcaacgggctgccgtccacggacaccagggaagtcttcggggagattgggaggtactggaaggagaggattactgcccccatcatcctctctctggccaaagggatagaggcctccctggatcccctgccacggatcataactcccacacagatgattagcaatgcaacgggggttccattggagaacattctttatcttggaggccctaacattgcttcagaaatttacaacaaagaatatgcaaatgctcgtatatgtggagctgacaaatggagaaaacctctagctaaatttttgaggcagcctcattttattgtatgggataatagtgatctcattactcatgaagtcatgggaggtttgaaaaatgtgtatgccattggtgccggtatggtggcagctctaacaaatgagagtgcaaccagcaaatccgtttactttgctctttgcacatctgaaatgatttacataacccaccttttggaagaagagcctgaaaaacttgctgggccattattggctgatacttatgtcacactgctgaagggtcgtaatgcatggtatgggcagaaactagctaaaggtgaactgactctagagatgggggacagtataaagggcaaagggactattcagggtgtctctgcagtccatgcattttatgagctcctgagccagagtagcttaagcgtgacacatccagaagtgaagaagcttgttgctccggtcgagctgtgcccaatactaaaggcactttataaaatcctaatcaagagggagcttgccactgactccattctccaggcaatacgagatgaatcaatgtatgatccacgggagaggattgagatggctcagcgccagtgtctttaccgaccatctcttcttggcctacctaaagtagatattacccaggcttagatctattcttttttttttctgcagatttgttttgagatttgcaggattctttgatgtattctttgcatagtggtcctcaagatccttccttgtgtgccaagtgcatctcgtgttcgaacactgattccattctctactagagaatttgataatgaggtgttttggttttttattgtcag

SEQ ID NO: 3522 - DNA, 2589 bp, Oryza sativa
  Clone ID: PAT_MRT4530_94738C.1
ccgcgccccccccgacttcctcagctgtcttccccctcctgcatgttttttttttttttttttttttttttttttttttttttttttttttgcaagaaacctttttcagctaattacattttataattaaccaagagtaagttacatgtagtatgccaaaaaatccggccggcaaagtaaagttagtgtacaccaagaatcgaaaatatgaacatcttacagcatgttccattcctacaaaactagtgggatttaggcagggagagctgccggcgtggctgggggaacccggttctcgacagggatctccgtgaactcggagagaatcgccctgaactcgtcaccactcaatgtctccttctcaaggagcacctccacgatcttgtccatggcctcccggttgctcctgatctggctcaaagcgatctcgtaggcctcatcggacaaccgcttcacagcggtatcgatgtcctccgcgagcttctccgacatggagttccttgccatcatcctcatgatgacatcgccgctctgagctcctgagtccattagcgaccacggaccaatgtccgacataccgaatgtaaccaccatctgcttggctaggccagtaatttgctgcaagtcaccagcagctcctgtggtcacctcaggctccccaaaaatgatctcctcagcagcacgaccgccaaggccaccaacaattctggcgaacagttgttgcctggagatgagcgttgggtcgtccattggaatgaaccatgtgagaccacgagcttgacccctcgggatcaaagtaaccttttggacagggtcgtggccaggcgtcaaagttccacaaattgcatgcccaacttcatggtaagcaacaagacttttgctcttcccatctgtcatcacagttccttccataccagccactattctgtcaattgaatcatcaatctcctttgaggaaattgctgtccgaccacgtcggcccgctaatatggctgcttcatttagaagatttgccaagtctgctccactaaagccaggtgttctcattgctatgacttcaagagagacatcagtatcgaacttcttgttgctaccgtgcaccttaagaatctctgtccttccgcgtacatcaggaacatcaacacttacctgtctgtcaaaacgtccaggtctgagtaaagcagaatccaggatatcagccctgttggtggcagcaataacaatgattccagtgttcccctcaaaaccatccatctcagtcagcaactgattcaaagtctgctccctttcatcatttccaccaccaatacctgtccctctttgcctcccaacagcatcaatttcatcaacaaatactatgcaaggagcattctcctttgccttcttgaagagatcacgaacccgggaggcaccaactccgacaaacatctccacaaactcagatcctgatatcgagaaaaacggcacaccagcttcccctgcaatagccttggcaagcaaagtcttaccagttccaggaggaccaacaagcagaacacccttagggatgcgagcaccaacagcggtgaacctttctggtttcttcaagaactcaaccacttccatgaagtcttgctttgcttcatcgacaccagcaacatcatcaaatgtaacaccagtgttgggttccatctgaaacttggccctagattgaccaaaaccaaggggaaagccaggaccgttaggtccaccaaggccaccttgtgctcttcttgacagcaaaaatagaccaccaataaggataagtgggaaagccaagtttccgatcaggttgaacagaagagaaccagagtcctcctggttgctgtgtgcagcaaaatcgatattcttttccctcaacttctggagaagctcctggcttagaccaggaagctgcacacgaactctctgcacacggttgccgagctcaggagaaatagcctctacaatggcaatcgtgccattctcaaacaaatcaaccttcttcactctgtccttgtctagatactcaaggaacctcgagtaagacattctcgacgacgagacaccttgctcttcagcaagagctctcttagcacccaacaaggtgggaagcccgaccccgaggttcccaagcgcgagctttaggaacttccttctggcatcattagtcttgtgctcgagggaggcagtcacagaaactggcctctgtgcaacgccactcgaaggaagtgtcgagaagggaagcggcgtctttgcagcaaggctcatggatgttggagccatcttcgctcactgagtggatcggagcggggcgtggaggggagagggggggggggtgggccgaactaggaaggggagggaggagggagtggagtgtataaatagcccgacaccgacgaggagggtagcggcagattgatttttcctcctccgctcgcttggcctctctctctctctctccggtgcgcagttgcgtggggatttggggaggaagaggaggagagggggatgggggcgacgtggccgcctccgtgcccacagcgtcgataaggaagagatgagcccacttagacggaagccaaagcccat

SEQ ID NO: 3523 - DNA, 1230 bp, Oryza sativa
  Clone ID: PAT_MRT4530_94829C.1
tttttttttttttttgtcaagcatcaatgtatataaactggaaattggtgcaaattgcaaacaagatttggggaagaactattcttacatgtatacaacacatggagacaacatcccaataattgtacatcatatccatcaaaacagtcaaaactaaaaaaagaaaagaaaataaaatggctcctcctaattatagtactacatatgaggctataaaaagccagatgcttatcctacatctacatgcaaatattctatgaacacttcatgtaaatacgcaaaataacttatgccacatttggcaggaagaaactgcacgcaccacaacgccacagggatatgctggcaattcttttaccatcttctatcaccaggtgaatctgttaacaatcttaaaatgcaagaaggcttgcaaccacaagaaatccaaccatgattagcagggccttcaggtagatgtctgcctgctgcggttgctccagtggtccttgtcgagggacaccgtgggcggcatgacccatatgtccgccatggaatccatgaccatggccatacccatagtgaaacccagcaggctgtgcataaggatttgcatctggaaatccatgcacttggaagctaagcatagggaataggcctccaaacgcagctgagaatgcataattcccccaccgtgcattagccaatggtactccagtgcccatgaaccatggattggcattagcattaggattggcatgggcaaaattgttgttaggatcggcctgtggagctgtggcaggcctctggccagttgggcggttaggaatgtcagcctcgggtatgttctttgaccttggatcgacgcggtccttgccacgcccataaaggggaacgagcttatcctcttcaacgacagctttgcacaccgggcactctggagagtgtgcgtggatgtgcaaccacctgtaaatacatggccagcagaagaggtggccacagagagtaactattggttcttgtggcaattcaaagcagatattgcattcaaagctccccccagctgcatcgccattggtgccgctgcttgtagattccccaacattggctgccatcttgctgtttcttcaaagtgcaagaagctcctcctcctctcggcgagcgtggggatccgcgacgcggcggcggcggcggcgtggctcgatccgacggcgaggccacgcgggggaaggcgaggcgaggcgaggcgac

SEQ ID NO: 3524 - DNA, 3141 bp, Oryza sativa
  Clone ID: PAT_MRT4530_94961C.1
atgggttgctcctcctccgtgccagctcgaagcactggagggttgaacaatattagcaacgataactccgctactgattcaaaggacttgcgtgctaagttggtattgcttggtgactctggtgtagggaaaagttgcattgttcttcgctttgttcgtggtcagtttgatcccacttccaaggtaactgtcggtgcatcatttttatcacaaacattggctttggaggactcaacaatagtgaaatttgaaatatgggataccgctggacaagagagaggagctgctgctgcagttgttgtctacgacataactagtccagaatcatttagcaaagcacaatactgggtgaaggaacttcaaaaacatggtagtcctgatattatcatggttttggttggtaataaagctgatctacatgaaaatcgacatgtatcttctcaggaagcacaagagtatgcagagaagaataatatggttttcatcgagacatcagcaaagacagctgataatataaaccaagtatttgaggtcaccgtttttgcattagggttccgagcccgaatgcgccctgtgttagttagaagaggtttggggaaggggaagaaggatttctcgacggcgatcctcgagaggaagaagtcgccgaaccggctggtggtcgacgaggccaccaacgatgataactccgtcatcgggatgcaccccgacaccatggagaagctccagcttttccgcggcgacactgtgctgctcaagggtaagaagagaaaagacaccatctgcattgttcttgctgatgacacctgcgaggagccgaagatcagaatgaacaaggttgtcaggaagaacctgagagtacgacttggtgatgtcgtgtctgttcatcaatgcccagatgtcaaatacggcaagcgtgtgcacatacttccaattgatgatactgttgagggcatcaccggaaacttgtttgatgccttcctgaaaccgtacttccttgaagcataccgtcctttgaggaaaggagaccttttccttgttaggggtgggatgagaagtgttgaattcaaagttatagagactgaccctgcagagtactgcattgttgcacctgatacggagatattctgtgatggtgagcctattaagagggaggatgaggaaagacttgatgaagttggttacgatgatgttgggtggagttaggaagcagatggcccaaatcagagaacttgttgagctcccattgcgccatccccaacttttcaagtctattggtgtgaagcctccaaagggcatactgctttatggaccccctggctctggaaagaccctcattgctagagctgttgctaatgaaacaggtgctttcttctttctgattaatggcccggagattatgtcaaagctagcaggagaaagtgagagtaatctcaggaaggcatttgaagaagctgagaagaatgcaccatcaatcattttcatcgatgagatagactccatagcaccaaagagagagaagacccatggagaagttgagaggcgcatcgtttcacagctgttgactcttatggatgggctcaaagctcgttcccatgtcattgtcatgggtgctacaaaccggccaaacagtattgatcctgctctcagaaggtttggtaggttcgatcgggagattgacattggtgttcctgatgaagttgggcggcttgaagttcttcggattcacaccaaaaacatgaagctggctgaagatgttgacctggaacacattgccaaagacactcatgggtatgtgggtgctgatcttgctgctctttgcactgaggctgctctccaatgcatccgtgagaagatggatattatagatcttgaggatgagaccatagatgctgagatacttaactcgatggctgttacaaatgatcacttcaagactgcactagggacaagcaacccgtctgctctccgtgaaactgttgttgaagttccaaatgtctcttgggaggatattggtggactggagaatgtcaaacgggagctgcaggagactgtccaatatccagtggagcatcctgagaaatttgagaagtttggcatgtctccgtccaaaggtgttctgttctatggccctcctggctgtggtaagactttgttggccaaggcaattgctaacgagtgccaggctaacttcattagtgtcaagggacctgagctgcttaccatgtggtttggtgagagtgaggccaatgtgcgtgagatttttgacaaggctaggcagtcagctccttgtgtcctcttctttgatgagcttgactcaattgctacccagagaggaagcagtgttggtgatgccggaggtgctgctgatagagtgctgaaccagttgttgactgagatggacggcatgaacgcgaagaaaaccgtgttcattattggtgctactaacaggccagatatcattgaccctgccttgctaaggccagggcgtcttgatcagcttatctacattcctctgcctgatgatcaatctaggctgcagatcttcaaagcttgcctccggaagtcacctgtggccaaggatgtagacctgaatgctcttgccaaatacacccaaggtttcagtggtgctgatattacagaaatctgccagcgtgcatgcaaatacgccatcagagagaacattgaaaaggacatcgagatggagaagcggaggaaggacaaccctgaagccatggaggaggacgaggttgatgatattgctgagatcaaggcggctcacttcgaggagtcgatgaagtacgcacgccggagtgtgagtgacgccgacatccgcaagtaccaggccttcgcccagactctgcagcagtctcgtgggttcggcaccgagtttaggttcgctgaccagccagcgtctggcgccggcgccgccgctgaccccttcgcatccgctgccgccgcagctgacgatgatgatttatatagttagatcgctgtgctatttatatttaacctccgtgcttttgttcagtatgtctatttcgctttggtaaactttatcatatgtaacatacggggaaacagtgtactatttttaagttaatattttgagaggtactgaaccgaattgcatgtttctgt

SEQ ID NO: 3525 - DNA, 1052 bp, Oryza sativa
  Clone ID: PAT_MRT4530_95069C.1
ggagttcgctctcccgccgccgccgccgccgccgctcgcctgcgtcgatctccaccccgcgagcggagcagcggtgcccggcgtcgtctgctgcttccgccgcatcctccctcgctcgctgggcaaggatcttttattgcttttcttcccctggaatttttttagctagcaaggaacacggttgaaagtaggatgagtctctctaccatagcaagacgactatgttgttcaagaccaacatctgggggtcgtctttcagcggtttgggctcatttgtacagcacagaggctgccaaagacacaggtgctaagaagtataaataccctgaagtctatgatccatacgggcctatgtcacctccatcgcagaaagttgtggatcttgctgatcgcattgctgccctccctcctgaggagatcaaacagattgctccggctctccttctcagactgaaccaacccccaccacaggcaatttctggacagggtttcagtttcagtcctcaaggtggtggcggtgctgctggtgctgcaaaggcagaggagaagaaagcagagaaaacagtctttgacgtcaagctggagaaatttgacgctgctgctaaaattaagatcatcaaggagattagaacattcacagatttggggctgaaggaggcgaaggagctagtggagaaggcccctgtcattctgaagcagtcactcacgaaggaggaagctgaggcaatcatagagaagattaaggtagctggcggtgtcgctgtgatggagtgaaggattaactcctttggcactactacccttttgttttcttcaatttttgttagcatggtcaggcattagaggtcgcagtatctctacacttttgtaggaaatgttcagctgtgacaggtaaacatgggccatgatttggtctgaataaactttcttcgaccactacaactttcctgatgtattattgtgacattgggaccgagtgaatggaatgtagacagaattgcctatgctgatacctgtaacttgttctgcatctgttattgtaacttacaagc

SEQ ID NO: 3526 - DNA, 5406 bp, Oryza sativa
  Clone ID: PAT_MRT4530_95078C.1
cccgtgcggccgcgggagccacggggcccaggccggcgccggggtacacggcggcacgctgtgatcgagaagaaggaggacgggccgggctgccgctgcgggcacacgctcacggggtgccggccgtcggggaggaaggcacgccggggtacatcggccacgcctgatcctcttctggggcgccacggcgctcgagggcaactgctacacgccaccatcctcgggcgggagcgccgggatccgtcttgctggtgctacagcagatgtgcactgctacgatgtgtcatcaaataatgggagcaggagggggagctgctcatatcgcggctgctgctatcgctgccgccgcgtcggcggcggtggtggcgggcccgaggcccgcgccggggtagacggagggcggaaagaatattttcaagtgaaccaagtgtcctacagcttaaagctccaattaagatattgggtgatttgcacggtcaatttggtgacctaatgcgcttgtttgatgagtacggtgctccttcgacagctggagcgattgcttacattgattacctcttcttgggagattacgtggatcgtggtcagcactagtttggagagcttcacctcatctgctcgcccttaaggttgcatatcctcttagggtacatttagttcgagggtgtcatcaagccgatggtgggattggtcctgctggtttatctgcagaagaccttcatgttctggatcttacacaacaacgaccgcgatggcacagagtggtggttcaaggtcctggccctggttctcgatatggacatgtgatggctttggttgggcagcgtttcttgttgacaatcggtggaaatgatgggaagaggcccctggctgatgtgtgggcccttgatacagcagctaagccatatgtgttgaggaaacttgaaccagaaggtgaaggagcacctccatgcatgtatgcaactggaagtgcccgttgtgatggacttctattactctttggtgggagggatgctaatagtgtggttttcgtcaatgcacgacttcatgtcttaggaggaccccttggaggcggtcgcatggttgaagactcctcaaatgttgcagtgttggatcctgctgctggagtgtgatgtgatacaaaatcagtaattactactccaaggacaggaagagatagtgcagatgcagcaggcggtggtgcttctgtagagcttacacgacggtgcaggcatgcagctgctgcagttggtgatatgatatatgtttatggaggtctacggggaggtgtgctgctagatgaccttcttgttgccgaagatcttgctgctgctgaaacaacaaatgcagcaactgaggcagctgcacttgcttaaggctgtgatagacaaccctgaatagatcctgttagatatgcctacaatgatgaacagacaaggtagacagctacgatcacatcaccggatggagctgtggttctaggaaatccagttgctgctcccgttaatggggacatgtatactgatattagccctgagaacgctgtgatccagggacaaaggagaatgagcaaaggtgttgattatttggttgaagcatctgctgcagtggctgaggctatcagtgatacttaagctgctgtgatagctcagcaggttaatggtgaggcagagcattcgcccgacagggttaagtcgatggtcgccacagcgaatgtgaagcagaatgcaatcctgatagatccagactatttgctttccaataagtcaacactacctactggggtttggacacagcattcagcacttggggtactagcattaaccggaagtgccttagaaggcaaggtgaggcagctctagatggaccattatgagaaggggggaaggctgttagtgtatcttaagcttcagagaaggctaggcaggttaacgttgctatggaggaaaatcctgacaagtagcaatctccaaaatgcgcttcgatcagcaagcattcatccctcttcaaagcagacagtattatctctaacattattagacttccacgtggtggtaggttgcatcatagagctgttgtagtggctgcagaaactggaggtgccttaggtggcatggtcaggcagctgtcaattgaccaatttgaaaatgagggaagaagagtcagctatggcacccctgagaatgcaactgctgcaagaaagttgctagatcgacagatgtccattaatagtgttcctaaattacgtggttcgtcgccagcatagtttggagacaatcactcttctccttgcacttaaggttgaatatcctcttaatgtacatttgattcgagggaatcatgaggccgctgatatcaatgctttgtttgggttccgaatagagtgcatagagcgaatgggtgagcgtgatgggatctggacctggcatcgcatgaataggctatttaattggcttcctttggctgccctaatagagaagaaaataatatgtatgcatggtggtattggccggtctatcaatcatgttgaacaaattgagaatcttcaaagaccaattaccatggaagcaggctcggttgttctaatggatcttctgtggtctgatccaactgaaaatgatagtgttgaaggacttagaccaaatgcccgtggcccaggccttgttacctttgggccggatcgtgttatggagttctgcaacaacaatgacttacagttaattgtgcgagcacatgagtgtgtgatggatggttttgagcgttttgctcaaggtacggcaaacaatgcgggtgcaatcttggttctaggaagagatcttgtagtagttccgaaactcatccatcctttgccgcctgccattacatctcccgagacctctccagagcatcatcttgaggacacatggatgcagattcttggcttcttctgcgccggcgtcgtgctcaaccagttcggcctcatcaggaacctcaccgatgtcaagctcctctccgagtgggggattctcttcctgttgtttgagatggggctggagctctcactgtctcgccttaaggctcttgccagatacgcctttgggatgggtttgcctcaggttcttttgtcaacccttgctttcacggcgttcgagcttcctcctaatggtgctattggaaccaagattttgcagttcctctttgattcaagacctgatctggtgaatatcaggagcgttgatgaagcaatagtaattggggctgccctctcactatcctcatctgcttttgtccttcagcttcttgctgagaaaggtgaactcccaacaagatttggctcagctacactgggaatcctcctcctgcaggatattgctgttgttcctctcttggtcatactccctgtgctagagagtcagaatgtggtggagcaaagtgtgtggccaatgttattagctgaaagtctaaaagcactcggtggacttggcctactttttgcatccagattggactggctaaaacgcatcgtgttattgtacgcagtgttctttcctctcgtttttttttttcctttctttttgggatcttgagttctgattttgcaaggtgcttctgaatctgctggagagagaccgatggctggtgttcgtggtccagtcgtgtataatagccttccctcctgctactttcgtcgcagcataccccttgtaatttcagtctgatgatgctgatgtacaattttgtgttcaagttttgggtggcgaatggagtttgatttggtttactaggagagagacattgataattactgcattaggcccaagagttgggctaactcttcaagaaagcgtaaggataggattgctgctttctcaaggaggagaatttggttttgtggtgttttcgttggcaaacaggcttggtgtcctaccacttgagttgaataaactgctcatcattgttgttgtactgtctatggcgctaactccattactcaatgaaattggaagaagggcagcagggatcatcgatgagaaatcagaaacaaaagaaaaaccagctgagatggtgaattatgatgccactgaacctattgtgattcttggttttggagaaatgggaaaggtccttgcaaagtttttgtctgcaccattatcttttgggcttgacaaagatgcggaaggttggccatatgttgcatttgatctaaatcctgctgtcgtaaagtcagctagaaaatcaggctttccagtgctatatggagatggttcacgccctcttgttctgcaatctgccggcgtatcttctccgaaagctgtcatggtcatgtatactggaaaggaaaagacaattgaggctgtcaacagattgcggcaagcttttcctggcgttccaatgtatgcaagggctcaagacatgtcacatttgttagatctaaagaaagcaggtgcaacagaagttgttctggaaaacgctgagactagcttgcaactaggctcgatgcttttgagaggactgggtgtcatgtctgatgatgtatccttctttagtaagcttgtgagagactcaatggagttacaagctcaggaagcactcaacaacatcgaaaatcgagaaattgatatcatgaagccacttgagataagaatatcagacttggttgagcgcaatgggaatggttcaagaatgatagcccaggaggattcactaaggctaagtagtcgcccaaacataccactaattgaagcaactctagaggaccgaatacccgaaactacaggggaaaatgaccagactggatatgacttcaacaacatagattctgaagatggtgtcaaatattgtctcttggaagctagtgatgacgaaagcgaagcctccaattcaagcaaggaaatgatcgaccaatctgtatagcgccactagtaaagaaccaagatactaaacttccacttctaggatcaagcccatagaatggtagccaggcagagcagaagttcagacctggcacttctcttgcaattggacatatgcctatagcttacatgcagcatatatttctgaggactggattgatggttatcagtgaagggcatatgatcactggattatatgtcactcaatcctaaatcatgctgcagatagagaaaaatttcagctgacaaacctgatactcatatacctactgatgcagctcagagtgccagactgaaggatcaccatccagaattcagaatagcatttttactttttacaggacccttaatttgttcagttaggacgacacctatatgcatatatagatgcacattccttacacaattgtgctgtatttgtagcgtatatcggaccgaacattaattcctgtaccaattcaggtacgcacagagaattacagaaatagtattgcagtcatcgtggatttgtgat

SEQ ID NO: 3527 - DNA, 1361 bp, Oryza sativa
  Clone ID: PAT_MRT4530_95103C.1
ccggccgggcaacccaattcatccccaagtccaccaccacacacacacacacacgcacaccactcctctccccacaacccatccactcccacgccgccgccgccgcccggatcgccgcgagatggagcagtacgagaaggtggagaagatcggggaggggacgtacggggtggtgtacaagggcaagcaccggcataccaacgagacgatcgcgctcaagaagatccgcctggagcaggaggacgagggcgtcccctccaccgccatccgcgagatctcgctgctcaaggagatgcagcatcgcaacatcgtcaggctgcaggacgtcgtgcacaaggagaaatgcatatacctcgtcttcgagtacctcgaccttgacctcaagaagcacatggactcatccccggatttcaagaaccaccgcatagtcaaatcgttcctctaccagattctccggggcattgcgtactgccactcgcaccgtgttctccaccgagatttgaagccccagaacctgctgatagatcggcgtaccaactcattgaagctcgcggactttgggttggccagggcatttggcattcctgtccggacatttactcacgaggtggtgacattgtggtatagagcacctgaaattcttcttggtgcaaggcattattccacccctgttgacatgtggtcagttggttgcatttttgctgaaatggtgaatcagaagccactatttcctggagattctgagattgatgaactctttaagattttcagtattatgggcactccaaatgaagaaacttggccaggtgttgcttcactacctgactacatatcaactttcccaaagtggccatctgtggatcttgcaaccgtggtcccaacacttgattcttcaggactcgatcttctctctaaaatgctccgtttagatccaagcaaaagaatcaatgcccgtgctgccctcgagcacgagtacttcaaggacctggaagtggcgtagattatgcctcatcttgtccatttgtaaattaagattgcattgtttgctcagccgagttcttttttggctttccttaatctaagttggtgtgctcctcccccaactctatttttgcccttttggttgtgtagagatgagaacagaaggtacctcctggctatccctctgtgtaattcaagccaattgaaagatccttattgcgggagctctacattgcaattttgctctcttgcctaaaaaaaaaaaaaaaaaaggggcggccttaagctgccaatgtggcatggacttctccagtcattcaaccagttaatttaaactcttttgccaacattttccaactgaaaaaaaaaaaaaaaaaaaa

SEQ ID NO: 3528 - DNA, 241 bp, Oryza sativa
  unsure (1)..(241): unsure at all n locations
  Clone ID: PAT_MRT4530_95268C.1
agnccaggcacctcatgggagagcggcttcaacctgtcctgatcccaaggacgttcgcctccagcatttacaaggtcggtcagaatgacctngacctgagccccgacgcgcccgtggaagaggaagaggaggtcgaggagccgaggtgttgaagagaaggaatcatcccacatcaaggaggaggcgganccgtcgtcgtatgataaggacgagctgtagtgaggtgtcccaccactgttgt

SEQ ID NO: 3529 - DNA, 1757 bp, Oryza sativa
  Clone ID: PAT_MRT4530_95963C.1
ttttttttttttttttttttttttttacaaaaaagaatgtaaactacgtgttgatattatgtcctgctggcaagttgttacaatgctgaagcagatgctgaagttgaacacatgaaaaatattacaaagagatctagcccttttgtgtctagctttaaggccaatctgccatctggagtgtagaggtaaataatttcctcttcaaagtgagatttcatttactgacagcaccacatggtaagcaaaaagaaaaaaaaaagaccaaaaatggaacagacatcgttcattacactcagggttggcttccttccaaccctagtactatctgcctactaagctgaactctgtatagaaccatacactagtatcatcagagcagtttcttcatgcctttgagtacttggagctccacataggtaccttcagagcctcgtcgtcgcctgcgttgcccccattttcagcagtgctcaaagagtccgagatcaaggggtccgattcgctttcttttacctggttgagttgtggggaggcttcagtgggttttggtggagcctcttttgtgcagaagtatgagtacgataccatcccaatcacagcaatgaggattccaagtatatttctccagctaaatggatcgtgaagcaaaacataaccaaaggcaagaaccaagcatgtcttgagatggccaagcacttggtaagttacaggagaggttttcccgatcacaagaaaagtgctgaagttcactgagactgatatcaagcatgacagcacaatgaaaaacacaacttgagatgtgtaatcaaaagcaaagacattttggttagtcaaaaacccatcaaggaaagggccgacgatgaacaaggtcaatgcttggtatgggcatgattggtacagcagctgtgttgaagataccttgaatttcttctgaattgtgtttgtcatgatttgagcaatgcaggttgtaatgattgcgagcaaagacaggacagatcccacagcattaagctgcaggtcagtcacagttgcaactccaacaccaaaaaggagaacactaagggagagctggatattccgactaaacttcttcctgaagaaaagagtctcaagtataacagtgcaggggataattgccagctttgtcatctggtagaaaccaacagaattgaaacctagactcaagttgagaagaccaattgaaatgccattgagcacaccaaatcccatgacagtccttgcatcaaaaggtttgtgctcaaagagcttcatacataatgccacgtgaagagagcaaaatgtaacgaggagatgccagcttgtcaaagtagtggcgaagttgaagccgagggagctcatgagggccttgttgcagatgacaatggagaccgaggacaccaccgagaggctgagcgcccccaccgtccccagctggaacttctcccctgtcacccccatctccaccgctcccaagaaccaccacaaccagcagcaagcacaaaaccgagcaggaacaccaaaattccccaaccaaaacccgccgaatcagaccacctacagagccttgcgcggaattcggaataggcgaagctggatctgggagaagggcgcgcgaatcttggcggggaactggcaatggcggggagatctgggaggcgagcaggggcaggagggatcggctcggctcgcttcagctgctgctgcttcgcctcctccccgtgccggcctcggcccgaggcctcgtgccgaattcctgcagc

SEQ ID NO: 3530 - DNA, 2987 bp, Oryza sativa
  Clone ID: PAT_MRT4530_96163C.1
cttccttctctctcttcctccacctcctcctcgatccccaaatcccccaaaccctagctcgccggagcagtggagggcctcgccgccgtgctgcctcttggcccctccgtgtgatgccactgagtgcgcgtgggtgggtgtgcgtgatggatgcattctctttcatggcgtcgcagcctcccgccgccgtggaggctcgtctcgcggatctctgcaaggagctgggagtggacgagggcgtcgccggcgaggccgcggcggtgctggaggaggggaagggcgcgctcctcgcgtcgccgtcgttcgggagcaaatcgcccgaggatgctgagaagctgtgcttcgcgttcgtgctgtactgcgtctccaagctgaaggagaccaaggcgggttcctccggcgttaggctctgggagatcttgaagggttgcaagctcaagtatgatgatttcttcaaggaatcacagcggcttgcttcaaggatcgaccaggttttgggaagccgttatgggtcagattgggaagctcggctagagctgaagcaattggagaatttagtaaatctattggcagatgcaagccggttctattgcaaagcatttaatgagctattcttgagcccaagtactgatcaggagcctggatcaactacaaatattcctgattatatccgttttgggtggctgctcttcttaattcttcgctcaaaatcacccgaactgtttaaggacctggtatcctgcatccatggactagttgccatattggccatacttttaattcacgtacctgctaactgaaccaatgccatctcttgatggcatagtagcacggcagagtattcaccctgatggctggccacctactccctcataaagaaggtcttgatgctggcccagatggcaagctgttatccgtcgatcaccaaagagattatgcaccgaatctaggaactcattggtagagcacaattcgcagacaccacccccaaagcaaagccaaacagggttaagtattttgaaagcaaaataccatcctctccaggcaacattcgcaagccccactgtcagtaatcctgttagtgggaatgaaaaatgtgctgtagtaggggtccagatcttcttttccaaaatcttgaagttggctgctattagaataagaaacctatgtgaaaggctacgacatgaagagctgactgtgagcgtctataatatctttaagcagattcttgaccaacagacagctttatttttcaacagacacgttgaccaaatcattctttgctgcctctatggtgttgccatggggtctcaattatcattgacgttcgtgcagacgcatttgatattccatgggcagaagcaagaaaaatggaggcttccaagttgtattatagggtgctggaggcaatctgcagagcagagtcacagaacaataatgtaaataatttaaccccattgttgtcaaatgaacgttttcatcgatgcttgattgcatgttcagctgagctagtattggcaacacataagacagtcatcatgatgtttcctgctgtcctggagagtactggtttaactgcatttgatttgagcaaaataattgagaactttgtgagacatgaagaaacccttccaagagaattgaaaaggcatttaaattcattagaagaacagctattggaaagcatgtcatgggagaaaggttcatcgttatataattcactggttgttgccaggccatcactttctacagaaataaacagccttggtcttttggctgaaccaatgccatctcttgatggcatagtagcacggcagagtattcaccctgatggcttgccacctactccctcaaaaagatggccttctgctggcccaggtgctttctcaatcattcttaaatttaatgtttttgtaatcaactactctcatttccaaaactactgttcttattgggaagatggcaactgttatcctcaatcaccaaagagattatgcaccgaatctaggaactcattggtagagcgcaattcgcagacaccacccccaaagcaaagccaaacagggttaagtattttgaaagcaaaataccatcctctccaggcaacattcgcaagccccactgtcagtaatcctgttagtgggaatgaaaaatgtgctgtagtaggggtccagatcttcttttccaaaatcttgaagttggctgctattagaataagaaacctatgtgaaaggctacgacatgaagagctgactgtgagcgtctataatatctttaagcagattcttgaccaacagacagctttatttttcaacagacacgttgaccaaatcattctttgctgcctctatggtgttgccaaggtttctcaattatcattgacgttcaaggagatcgtcaacaattataagagggagccacaatgtaaaccagaagttttcagaagtatctttgttgggagtacaaatcgcaatggtggatttggatcacgtcatgttgatatcattgttttttataatcaagtatttgttcccacggtcaaacctttgctggtggctctaatgccttctagtactcgtcctgaagacaagaggaacactaatagccaaattcctggatcacccaagtcatctcctttctcaaatttaccagatatgtccccgaagaaagtctcatcttctcataatgtgtatgtctctcctctacgacaaactaagatggatgcattgctttcaccaagttcacggagtttctacgcgtgcatcggtgaaagcactcaagcttttcagagcccatccaaggatctggctgctataaatagccgcctaaattaccctaccaggagaatcaacacacgaataaacttcgacatggtgagtgactcggtggtggctggtagtctgggccaacccaatggtggttctgcctcttcggatcctgctgctgcatttagccccctctcaaagaagagcaaaacggactcttga

SEQ ID NO: 3531 - DNA, 2709 bp, Oryza sativa
  unsure (1)..(2709): unsure at all n locations
  Clone ID: PAT_MRT4530_96281C.1
cgcgaggccaccacgaactcccgtcctcctcctcatcttgcacacagctgcgcactcgagcggcgaggcttggatttttccgcggggagatctccctggcgggggtctaggtaggcccgaggcaaatccgggtgggcgggcggcgcgggcattgcagtagcgggactgccccgcgagcgtggtggagtagttcagtgggttcggtcactcccgcaggctcgatggcttggtagccgttgaacgtcgccgcagtagtgtcgcgtggagcgggctagccagacgaagcaattgcaggtgtttaattcgatgtaatagaaagttagttagggagtcgtcgggatgcttggtggtgcagacgaagcagacagagccgcagcatcagcagcggaggtgagggttcgccagagataggatttcttcagcgaatatggtgatgctaacagatacaaaatacaggaagtcattggcaaaggaagctataggtgctagatttgttcagctattgaccaacatactggcgacaaggttgcaatcaagaaaatacacaatatctttgagcacttatctgatgctgcccgaatcctccgtgagatcaaattgctccggctattacggcatcctgatatacttgagatcaagcatgataatgctacctccatcaaggagggacttcaaggacatatatgttgtctttgagctgatggataccgatctccaccaagtcatcaaggcaaatgatgacttaaccaaagaacattatcagttctttctttatctggtgctacgtgctttgaaatatattcatactgctaatgtctatcatcgtgatttgaagccaaagaacatattggcaaacgctaactgtaaactcaaaatatgcgatttcggtctagcacgagtggcatttaatgacactcctacaacggtattctggacggattatgttgctactagatggtatagggctcctgagttgtgtggttctttctttactaagtattcaccagctattgacatatggagtattggctgcatttttgctgagattttaactgggaagcctttgtttcctggtaaaaatgtggttcaccagttggatctgatgactgatctcttgggtactccatcaatggatactgttacaaggattcggaatgagaaagcaaggaggtacttgagcagtatgaggaaaaagcagccagtacctttttctgagagattcccaaaagcagatcctgctgcactcaaacttctgcagaggcttttagcattcgacccgaaggatagaccaactgccgaagaggcgttggctgatccatattttaaaggccttgcgaaagcagagagagaaccatcatgccagccaataacaaagatggagtttgagtttgagcggagaaaggtgactaaagaggatgtgaaggaacttatattccgtgaaatactggagtatcatcctcaacttcttaaggattacatgaatggaaccgaaaaaacaaacttcctatatcctagtgcccttgacaactttcggagacaatttgctaacctggaagaaaatggagggaagaatggagatgctgttccatcagacaggaaacatgtttcgctcccaaggactactacagttcattctgctccaattcctcccaaagatcatcaaaatataacttcccaagtaccccaaaggattccaggtagaacaggacgaggggcttgccctgtaataccatttgagaatttgagtgcaatgggcccatacaatcaacgaagggtggtaaggaatccagtgcttcctccagccaccaccaacctatcagcatatgcctaccaccgtaaatcggatagctcagaaagagagctccagcaggagcttgagaaagatcgcatgcggtaccagccatcagagcatttcatggatgctaaggtggtgtcacatatgtcccatgatttgagagcttcctcttactacgtttcaaaggcgaaatctgatgtagcagacagagctgccttacaatccaacatgatgcagggaattggcccttttaatggcattgctgcagttggaggattgtcagaactgaccgcaccactaactactgagatgtatttggttaacggttacaggcttacagcatgatgnaggtanctacaataaagtcagtactgttcagtatggggtctcgaggatgtattagggtgcaatggccacttcaaaaaatgctccgctgagctgattaataacatgaaagaatccaagtacncaagtgccttatcagccaaagattcagacaaagaatacaggaccaacaatctgatcgaggaagcgtcgaggcggtgaaaatgaaattacagaatgggaaaagacaaacatcttgctagccattgatctagcctgccaagaaaggcatgccatattgccgtgccgtcagttatttgctgctaagaagaaaaagaaatgggagaaaagggaaaaagatgagcgagtgatctactttgaatgaaagagaacttatgggaataaaaatagcgagcttatgtatatacaataacttgattctatatattactgccagagacagccatttcttttgttccacatgtggacatgtggtggtgtgtgttttctttttgtatcactgggcgtctgagcacaaatgcttgcgagacaattcccttgtagaacaggagtacattttggtgtaacat

SEQ ID NO: 3532 - DNA, 296 bp, Oryza sativa
  Clone ID: PAT_MRT4530_96382C.1
gaaaagcatgactgatattgctgataagaataacaagtgggcatcatatgctggacccggtggatggaatgacccggatatgctggaagtcgggaatggtggcatgacctttgcagagtatcgtgcacattttagcatctgggcacttatgaaggcccctctcttaattggttgcgatgtcagaaacatgactaaagaaacaatggaaatattgagcaacaaagaagtaattcaagtaaatcaagatcctcttggagttcaaggaagaagaattttaggtcaagggaaaaatggat

SEQ ID NO: 3533 - DNA, 1567 bp, Oryza sativa
  Clone ID: PAT_MRT4530_9638C.1
atggccattggccaccaccacccaaggggagcgcaagcgcagaggacaagagcgcctcctcgtctggtctgcttcggccccccgctcgctcctcctgccgaagcactcactcttcggctgctcatcctcctcctcctcctcagacaggagcagaaccagacttgccacgaaggatttgataatctaggggttcgggacgagatgatattttcagtcagcttatttggtagttcccaccagtccattcacaaactttacaggaaatgctggtcaagtaactcacattctacactgaatgtgctttcacttgcaaaaactgtgggtcaaagtatgagaatgaagaggatacgtgtcaagcctcatgccactgacctgaagaatcgcccccaggcccatgaggataatgtgttctacaaattggtttataggctccctgaaaacctcagctggctgttggcgtcaccagaaatggctagaagaccaccctcaaagaagaaactaaagaaggaagaaatggtaagtagtaatcaatttggtgtgatcttggagtgggaaggagttgttgtggaagatgatgatccagatttggagcctcgagtttggtacgtgttatcacttgaagaggcaaagtcttttcctccagatgcagtgctgaaggaaattgaggggatgaggactgatcaggctattttagaagtcttacattggtcagaagatccacaagaagtacaaaggctggcagcacgcaaggaggtaatatataaaacattacgtggtagattctaccaactgcgaccaggtgttcttgatttcctgaacacccttgtggattttgacattccaatagcaatcacaactcctcgcccacggttgagcctagaagaagggataaaagctgttggtcttcaaggctactttgatgctatagtggcagcagaggatttctgccgagggaaacccgagggggagatgtttgaggtcacagcagggcaacttggtcttgagcctgatgtttgtcttgtgctgggtaactcaaattcgacaatagaatctgcgcatactgctgggatgaggtgtgttgcggttgcaagccgataccctgcctatgagctccaagcagcaaaccatgttgtaagatggcttgatcagctatctgtcgctgacctgcaaaggattgccaatggcgagattcttgggctcaggggcagaagatctgacatggacatggacatggagattgtgatcgaggagtgatttttctatatgtatggtgtgctaatattgccctatgtatatagctccaattgcaacctaggtaatgcattacattttgttaacagatcaagctgattaacattggccgttagcttgttaactgcttggtttcttgtaatgcagaaatggaacttttgtagcctagatgctttcgatctctagaagaattggaagctaagaaaaactcccaatctgtatcgcgcctgccgcccgaatatataatttatataaaaaaaaaaaaaaaaaaaaaaaaaaaaaaaaaaaaaaaaaaaaggggggggcctgcagcccg

SEQ ID NO: 3534 - DNA, 1667 bp, Oryza sativa
  Clone ID: PAT_MRT4530_96586C.1
gcgtcgagctgcctagctatcgagatcttcgtacgtaaatacgtctccctcgtctccggcgagccaccggcttgggcgtacgtgagagatggcgccgccgtcagccatgaacacgtcgagggcggaggagaaggccatcgacgactggctccccatcacctcctcccgcaacgccaagtggtggtactccgctttccacaacgtcaccgccatggtcggcgccggcgtcctcagcctccccttcgccatgtccgagctcggctggggtccgggggtggcggcgatgatcatgtcgtgggtgatcacgctgtacacgctgtggcagatggtggagatgcacgagtgcgtgccggggcggcggttcgaccggtaccacgagctcgggcagcacgcgttcggggacaagctggggctgtggatcgtggtgccgcagcagctcgtcgtcgaggtcggcgtctgcatcgtctacatggtcaccggcggcaagtcgctcaagaagttccacgacctcgtcgcgccgccctccgcgccgccgatccggacctcctacttcatcgtcatcttcggctgcctccacctcgtcctctcccagctccccaacttcaactccatcagcggcgtctccctcgccgccgccgtcatgtcgctcagctactccaccatcgcctgggccgcctcgctccaccaccacaaccacaacaatggcgccgccgccggaggcgtggactactcgctgacggcggcgacgccggcggggaggacgttcaacttcctgagcgcgctgggggacgtggcgttcgcgtacgcggggcacaacgtggtgctggagatccaggcgacgatcccgtcgacgccggagcggccgtccaaggggccgatgtggcgcggcgtcgtgctggcctacggcgtggtggccgtctgctacctccccgtggcgttcgcggggtactacgtgttcggcaacgccgtcgacgacaacgtgctcatcacgctggagcggcccgcgtggctcatcgccgccgccaacatgttcgtcgtcgtgcacgtcgtcggcagctaccagatctacgccatgccggtgttcgacatgctcgagaccttcctcgtcaagaagctccgcttcaaacccggcatgcctctccgcctcatcgcccgatcactctacgtcttgttcaccatgttcgttgccatcgccgtccctttctttggtggactgctaggcttctttggtggctttgcgtttgctccaacgacctacttcttgccatgcattatgtggctgtcgatcatgaagccaaagaggtttggcttgtcctggtgcatcaactggttctgcatcatcatcggcgttcttctgtcggtgttcgcaccaatcggaggtctccgctcgatcatcgtgaatgcccagagttacaagttcttctcgtgagtgattaattgagaggtgttttaccattcaattaagtgtgttcttaattaattaggggattgttttagataatgcacagagttctatttaattagatgaaagagaaattcgtgtgtccctatgagacatctgtgtgtggatgatatagtagtcgatcaaatgaaggcatattatttatttggcctttgtttgtcgatctatattctagcgttaatttaattcgtgtcgagtttatccc

SEQ ID NO: 3535 - DNA, 2099 bp, Oryza sativa
  Clone ID: PAT_MRT4530_96587C.1
ttgcgttgagctgcctagctatcgagatcttcgtacgtaaatacgtctccctcgtctccggcgagccaccggcttgggcgtacgtgagagatggcgccgccgtcagccatgaacacgtccgggctgcagcccttcttcatcttcttctttttcgtcttcttcttcttcttcttcttcttgatcctccattgctgcaaaagaagaagaggtagacgaaggaggaggagatcaggtgatcatggggactcaggtggcagataactacccaccggccaaggatggccggagcgcgcaggagaaggcgatcgacgactggcttcccatcacgtcgtccaggaacgccaagtggtggtactccgccttccacaatgtcaccgccatggtcggcgccggcgtcctcagcctcccctacgccatgtccgagctcggctggggacctggcatcgcggtgctgatcctgtcatggatcatcacgctctacacgctgtggcagatggtggagatgcacgagatggtgcccgggaagcggttcgacaggtaccacgagctcgggcagcacgcgttcggcgagaagctgggcctctggatcgtggtgccgcagcagctcgtcgtcgaggtcggcgtcaacatcgtgtacatggtcaccggcggcaagtcgctgaagaagttccacgacgtgctctgcgagggccacggctgcaagaacatcaagctcacctacttcatcatgatcttcgcctccgtccacttcgtcctctcgcagctcccaaacttcaactccatctccggcgtgtccctcgccgccgccgtcatgtcgctcagctactccaccatcgcgtggggcgcgtcggtggacaaggggaaggtggccgacgtcgactaccacctgcgcgccacgacgtcgacggggaaggtgttcggcttcttcagcgcgctgggcgacgtcgcgttcgcgtacgcggggcacaacgtggtgctggagatccaggcgaccatcccgtcgacgccggagaagccgtccaagaagccgatgtggaagggcgtcgtcgtcgcctacatcatcgtcgcgctctgctacttccccgtggcgctcgtcggatactgggcgttcggcaaccacgtcgacgacaacatcctcatcacgctctccaggcccaaatggctcatcgcgctcgcaaacatgatggtcgtcatccatgtcatcgggagctaccagatctacgccatgccggtgttcgacatgatcgagaccgtgctcgtcaagaagctcagattccctcccggcctcacgcttcgcctcatcgcaagaacactctacgttgcgttcaccatgttcatcgcgatcaccttcccgttcttcggtggattgcttgggttcttcggtggattcgccttcgcgccaactacttacttccttccctgcatcatgtggctagcaatctacaagccaagaaggttcagtctctcatggttcaccaactggatctgcatcattcttggagtgatgctcatgatcctgtcaccaatcggaggactccggcagatcatcatagatgccaagacatacaagttctactcgtagattacatgttcatcatagtaatctcatgtggctgcaagttcaagttctactcataggcacacatgatgaaaccagttactgcaaaagttttttttttagccaacaaaggaagaagaaagttcaacaccaagttcatacattgtcactacgacgatgatcttttgagacgtgtcatgcatgcatcagtcgttaattatgtgacttaattaaaaacaaagaggttgtgtttgtgcattgtcgctgggttaatcatactgtgtttttatatttcaatctactattatattgtaggctggacatggaaactgtgtgcagaaagatgaaagggatggataattactggttgattctttttaagaaaaaaatttacataaatgaaagaaaaattcgtgtgtccctatgaaacatctgtgtgtggatgatatagtagtcgatcaaatgaaggcatattatttatttggcctttgtttgtcgatctatattctagcgttaatttaattcgtgtcaagtttacccc

SEQ ID NO: 3536 - DNA, 588 bp, Oryza sativa
  Clone ID: PAT_MRT4530_97109C.1
atggtggtggcatccggtggagggcggaacgcgtgggcgaaggagatgaccatccgccgcaggattaccagcatattcaacaagacgcgggagcattttccgtccctgaaagattacaacgactatcttgaggaagtcgaggatatgactttcaacctgatcgaggggatagatgtcgaggtgattgaagctaaaattgccagatatcaacaggaaaatgctgaacagatatatttgtcccgggctaaaagggccgaagatcttgctgccgcacttaaagcaagcagaatgaaccctggcaaggctggtgccaatgacacggctgctggaagctctcagggcattagtagtggcgcgggagttcaggaaggccagtatgcgcctgctgctgttcccggtgggctagctcagcctcggccaacagggatggcccctcaaccgatcggcggttcatcggttcctcttcaaggagatgatgaggagaccatgaggctacgtgcggagagcggggctcgagctggtggatggtccatcgaaatgtgcaagagaagagcattgcaggaagcgttcagtaccatattcgtctga

SEQ ID NO: 3537 - DNA, 2028 bp, Oryza sativa
  unsure (1)..(2028): unsure at all n locations
  Clone ID: PAT_MRT4530_9713C.1
atggcgatggcgctgggccgagcggcgaaatctccggcggagcagcggcggggtgccggcgctcgccagcgcagcatcggcgaggggtttggtgttgggcagcagacagctgcagccacccggcggggtggtggcggtgaagaggatgaaactgtgcgaggaggaggaggaggaggaggaggggatggaggggatgagnagnaggagnaggtggggtgggtgtgnaggccgccgggggggctagcgggggaggataaggcggcggcgtggaaggggagggcgccggcgatcgtggtgtcggacgcggtggaggtggatttcccggtcatctacgtcaacgccgccttcgaggccgccacggggtaccgcgccgacgaggtcctcggccgcaactggctgtcttcaggaggcaaggtttacctcctgacacggaaaacaatccgattcttacaattccgggatccacgtgcccaaagacgacatccgcttgttgatcccatggttgtttcagagatccggcgatgcttgaatgagggaattgagttccaaggtgagctattgaattttcggaaggacggtgctccactgtacaacaggctaaggctcattccaatgcatggggatgatggttttgtgactcacgtcattggaatccagttgttctctgaagctaacattgatcttagcaatgtatcatatccagtgtataaacaacagtccaaccacagacccaacattcaagagatcaaccctgcttctcatgaacatattcctaagattcaaagttccgagtactgctgcatcctccagctctcagatgaagttctggcgcacaacatattgtctcgcttatcgccaagagatgttgcatccatcggatcagtctgcactagaatgcatgagttgaccaagaatgatcacctgagaaagatggtatgtcaaaacgcgtggggaagagacgtcactgtgaggcttgagatgagcaccaagatgttaggatggggtcgtcttgcaagagagcttacaacccttgaggcagcttcatggaggaagtttacagttggaggtcgtgttgagccttcccgttgcaacttcagtgcctgtgctgttggtaatcgccttgtcctgtttggaggtgaaggagtcaacatgcagccaatggatgatacctttgtgctcaacctggaatctgcaaagcctgaatggcgccgtgtcaaagtttcagcttctccacccggccggtgggggcacactctctcatggctgaatggctcatggctagtggtctttggaggctgtggacagcaaggtttgctcaatgatgtctttgtccttgaccttgatgccaagcagcccacctggagggaggttgcaagcgagggcccaccattgccgaggtcatggcacagttcatgtaccctggatggatcaaagcttgttgtctcaggggggtgcactgaatccggtgtgctcctcagtgacacattcctgcttgacctcaccaaggaaaaaccagcatggaaggagatcccaacatcctggtcaccaccatcccgcctcggccacaccttgtccgtctttggtaagaccaaactcttcatgtttggtgggttggcaaagagcggctctctccggctacgctcctgtgatgcctacactatggacgctggtgaagacagcccacaatggaggcaactggcgacaaccgggttcccgagcatcggtccacctccgaggctcgatcatgtcgcggtcagcctcccctgtggacggataatcatattcggtggctccatcgctgggctgcactcgccctcacagctgttcctcctcgacccagcggaggagaagccgacatggaggattttgaacgtccctggccagccacccaagttcgcctggggtcatagcacatgcgtggttggcggcaccagggttcttgtcctgggtggccacactggggaggagtggattctcaatgagctccatgagctgtgcctcgcgagcaggcccgacgaagatgagtga

SEQ ID NO: 3538 - DNA, 1254 bp, Oryza sativa
  Clone ID: PAT_MRT4530_97364C.1
atgatgatgaacgttccatccgccgctgccgcgagctcctgcgatgatttcggctacaacgccaccccgccgccgccgccgtcgcttctcccaatcatggaccaggacggcggcggcggtagcatccagagggatcaccaccaccaccacaaccaccagcagctcggctacaacctggagccgagctccctagctctgcttcccccttccaacgccgccgccgccgcagcacaccacgccaccatcgcccacgcctccccacatgacctcctccagttctacccgacctcgcactacctcgccgctgccggcggcgccggtggcggaggcaacccctacagccacttcacggcggcggcggcggccgggagcaccttccagtcgtactaccagcagccgccgcaggccgcgccggagtactacttcccgacgctggtcagctccgccgaggagaacatggccagcttcgccgccacccagctcggcctcaacctcggctaccggacctacttcccgccgagaggcggctacacctacggccaccacccgccgcggtgccaggccgagggctgcaaggccgacctctccagcgccaagcgctaccaccgccgccacaaggtgtgcgagcaccactccaaggcgcccgtcgtcgtcaccgccggcggcctccaccagagattctgccagcagtgcagcagattccatcttcttgatgagttcgacgatgccaagaagagctgcaggaagcgactcgccgaccacaaccgccggcggaggaagtcgaagccgtccgacggcgagcattctggtgaaaagagaagggcgcaggcgaataaatcggcagctactaaagacaaagcaggaagtagcagcaagaacgcaggcattggagacggtttcgagacacagctactggggggtgcacacatgtccaaagatcaagaccaagccatggatctgggagaggtggtgaaagaagctgtagatcccaaaggtaaggcatcgatgcagcagcagcagcagcaagcacatcatgggattcatcagcagagccaccagcagcatggcttccctttcccttcgtcgtctggctcgtgcttattccctcagagccaaggagctgtctcgagcactgacacatcaaatatagctcaagtgcaagaaccaagcttagccttccatcagcagcatcaccaacacagcaacatccttcagcttggacaggcgatgtttgatctcgacttcgatcactag

SEQ ID NO: 3539 - DNA, 789 bp, Oryza sativa
  Clone ID: PAT_MRT4530_97559C.1
ccggccgggctctcttcggtatcctccacacctcgtcgccgatctcccaccccgcgcggcgccggcgcccgtccgtcctctcctctcctgcctccgccgcatcctcgcctcgcctcgccgaacacacaagattttgaggatgccgagggccacgagcgatgcgaagcttctaattcagtccctgggcaaggcttatgctgccacaccaacaaatctcaagatcattgacctctatgtggtctttgcagtcgccactgcccttattcaggttgtttacatgggaatagtggggtcatttcctttcaactctttcctttctggcgtcctctcatgcataggaactgcagtcctcgctgtttgccttcgtattcaagttaacaaagataacaaggaattcaaggatcttcctcctgaaagggcgtttgcagatttcgttctgtgcaatctggtgctccacttggtgatcatgaacttccttggttgatgtcctgcccctacaactgatcaaggttttgtagccccagtttatggtcactggtcagaacaccctgatgtttgggagtgtcatagtatgagatattcatatgatctttcacacttcaccgatgtaattcgacaatttttcgagaaactataagttctctacctgccgttcgctgcggcttatctttatatctgtgtatttagtgtttaacaatcttagaacatgtgatcctgttttcttcaagtgaccgaaggttggcaacatgctattcgaccatgctgttactgttgtttgtcctttgttac

SEQ ID NO: 3540 - DNA, 313 bp, Oryza sativa
  Clone ID: PAT_MRT4530_97655C.1
gcgtggagaatgccataatggtcaagcttccgaagcgtgccgtttcgtacaagaatgacaagctcgcgtaggacccgttgatgctgcttttcaagactgccctgctgacctccggattgagctcggaggaccccaacaccttctgcaccatggatccagcgcatgctcaagctggtgctgagcatataccaggactagtccaccaaggctgacaccgacatgccgacgatggaggactacccctgcgagagcaagatggacgaggtcgacttaacaggatggacccatggatgccattctggacattttagtg

SEQ ID NO: 3541 - DNA, 451 bp, Oryza sativa
  Clone ID: PAT_MRT4530_97805C.1
ttttcctctcgaccggccacatcttactgcgggtttggtttcattttgataacagtcaacactagctactagctagattaattaattaattaggcatggcggatgataagcaccaagaccacctgctccaccacaagaaggaccactagccggccaccggagtagactcctacggagagggcgtatacacgtgggagaccgtgaccaccgaggtggccgccggcggccaggacaagtacgagaggtacaagaaggaggagaagcagcacaagcacacagcaggacctcggcgaggccgacgccctcgccgacggcgcctccgcccatgatgagaagcacgaggcgaacaaggacccggtgaaggcgcacaggcacatgatcacggaggatatcgcggccacgggggcggccggcgccgggggctacaccttggacgagcaccacgagaaga

SEQ ID NO: 3542 - DNA, 1472 bp, Oryza sativa
  Clone ID: PAT_MRT4530_97968C.1
tccttttcctcgatcctttgtcttcttgcttagctggctctgccatggtggggagctacgcggcgggagggggacggggagcggcagtggcggcggtggcggaggggaagctggacgagctgcggcggaggatggggaaggcggacggcgacctgctgaggatcgtcggggtggggggcggggcgtgggggagcgccttctgcgcgctgctgcaggacgcgtacgggcggcaccgcgacaaggcgcaggtgcgggtgtggcggaggcccgggcgcgccgtcgaccgcgccaccgccgagcacctcttcgaggtcatcaactcccgggaggacgtcctccgcaggctcatccgccgctgcgcctacctcaagtacgtcgaggcccgcctcggcgaccgcacgctctacgccgacgagatcctccgcgacggcttctgcctcaacatggtcgacacgccgctctgcccgctcaaggtcgtcaccaacctgcaggaggcggtctgggacgccgacatagtcatcaacggcttgccctccaccgagaccagggaggtgttcggggagatcgggaggtattggaaggagaggatcagaccccccgtgatcatctcgctggccaaggggatcgaggcgtcgattgaccccgtgccccggatcattaccccgacacagatgatcagcaatgcaactggagttccattggagaatattctatatcttggaggtcctaacattgcatctgagatatataacaaagaatatgcaaatgctcgcatatgtggagctgacaagtggagaaaacctctagctaaatttctgaggcagcctcattttattgtgtgggataatagtgatctcatcactcatgaagtaatgggcggcttaaagaacatatatgccattggtgctggtatggtggctgcactaaccaatgagagtgcaaccagcaaatcggtttacttttcactttgcacgtctgaaatgatatacatcacccatctcctagccgaagaccctgagaaacttgccgggcctttattagccgatacctatgtaacactgctgaaaggtcgtaatgcatggtatgggcagaaattagctaagggtgaactgactcttgaaatgggggacagtatcaagggcaaagggactatccagggtgtctctgcagtccatgcattttatgagctcttgagccagagtagcttaagcgtgacacatccagaagtgaagaagcttgttgctccggtcgagctgtgcccaatactaaaaacactttataaaatcctaatcaagaggcttaagttctttgcacatttcacctgcagggagcttgccactgactccattctccaggcaatacgagatgaatcaatgtatgatccacgggagaggattgagatgtctcagcgccagtgtctttaccgaccatctcttcttggcctacctaaagtagatattacccaggcttag

SEQ ID NO: 3543 - DNA, 3554 bp, Oryza sativa
  Clone ID: PAT_MRT4530_98306C.1
agcgagtcccccgggcggccgcgggcggccaagcgagcgatctctctctctctctcgcatcgcgcgcagccttcctcatccccgtcctgatccactccacctccctaatccacagcgcgcgccagaggaaatccggcgccggtcgaggcggccgcgccgcgccgccgtcacgcccagcccactcgattcggtcgcgtgtgcgctaggaagttcgtcatacgcctcgcggttttcacttcgtgtgtttttcttttaaatttttacctgtgcttcgtttaaagcctctcttgatcttaggtatagctttgctcgatctgattataggtatgtgggatgtttctggtctcccgtgattgcgcgtggattgtgattatgactaatttgcttgatctgaatatctgattgtggtggtggtgtgtgtgtgtgtgtgggcctgatttgcctgatctgttgtggattattattgtatgatttaccgtggttttatgttgtttatatataagcgtttgccatgagtctgattaattgtattgttgcggtttttcctaggtgtcatactgtcatgctcgatttttacaaggtttagtgcaaactgatagatgatgtccatccccaaaactccgtctaccagtattggttcatgtgcgagcacacgggatagttcgagttcctgtttgatattgattcgctggcgctggttgtttggttggtttattagctagagttgtttgtgtgcaaaggtgggatcatggttgcaaaggcatattgatgaatgacgattcataagcgtggaaagcaatctctgtgcaaggggttattaggattctttgtgcgtattcactctaaaccgatagtcttgtattgctatcagcaccacgttatctatttcctaaccaatgttttctgcatatggactctgcattttgcttcctctccttgtaccacacccagtaccctatgtttgtgcctctcccatggtccatctctcctgttaaaaaaataaaaataaaaataatagaatagaaaaattctagaccaaatacagggaagaaaataaattttgtcaggcaagagagcgacgaggcgatggggaacttattacttttctggacaaatccttcaatttgcctcatctatatcaatgggattgggaaagcagtggactacttaccatgtattggctactaatttccaccactccttgccagagaattgggaaagtgaattctcttatgcaggttctgtcagagtattgtaccagtcattgagatgactgtattcagtagagaagttttgtagataggttaaatttcaggtacaaaccaatgaagtaaaaaacgtcttgaggtatgagtggatgtgcagaggctcaagaagttccctgattggagaagcaaaggaataagttttttatatggatgtgctatggattttcctacacctacgggagaagtttcttttgttgaagatgaagctgttggcagctggagagaatgggggtggacaccacagtaagtttgatgcagatggacactgttcgaattgcttgggaactcttccatggaatctggatggataccttattgagtagtaaatttcttaatacagctcgctatccagatagtgctagctgtgattgtttggtgatcaatctattgggattgtgccgactggagctgttcgacattgctttggtcttttgttgatttgcctggagttcggcagtatacagcaaccctggagtgcatgcagtggtttcctcattttttaggacctgactgcattctgtagtgagaactatcctgctaaatgcataatacttgcaggtgttttctgttgtattggcaacgtgatagtttttgtggtgcaaaacattcaagatgggcgccatggacgtacaacttgagtctactgctgttcaacatggacaagctaagataaatgtggaggaacatgctctagtttctctgttgtctgatgagaagtacgcaactgaaaagaccgaagatgtggaccctgatgattatgagaaacttgaggaagggataatgcagtatgggtgtgcacattatcgaagaaggtgccgcattcgagctccatgttgcaacgagatttttgattgtcggcattgccacaatgaaacaaagaattcaattaaaattgatgctgtgaagaggcatgaactcccacgccatgaagtgcagcaggttatatgctcgttgtgtggcacggaacaagaggtacggcaagtatgtatcagttgtggtgtatgcatggggaagtacttctgtgaagtgtgcaagctctttgatgatgatgtttcaaaacagcaatatcattgcaatggttgtggaatatgcagaattggtggcaaggagaatttctttcactgctcaaaatgcggatgctgttattctatagtattgaagaacagtcatgcatgtgttgaaggagcgatgcatcatgactgtccaatctgctttgagtacctttttgaatcaaccaatgatgtttccgtcttgccctgtggtcataccattcatgtcaagtgcttgcgagaaatggaggagcactgccaatttgcttgcccgctttgctctaaatctgtctgcgacatgtcgaaggcatgggagagattggacgaggaactagcaacgatatctgacacctgtgacaataaaatggtgcgcatattgtgcaacgattgtggggcaacatcagaggtgcagttccatttgattgcgcacaagtgccagaagtgcaagtcctacaacacccgccagatctgaagtggcgaagttttgatgtgattcattttgtatgggaagagagccctgggggatgctcattttgcaacacaaatcccgctaacgcctctgggaatctgatgagctctcggtcgttttcttgctcattggatgcctcagccgaggcaaatcactcgcatctgaaattcatctatgaagtggatgctgttccctcctgtgttcaatttattacctcaccatgtcgcagactcagagtcctgttcagcttaagtttctactagcactagccgagataataagtgcacgtctactcaagcttctgggcataaatggtggctagcttgtgtgttatggtgtgtacttgttgagtctcgggcaaacactgtaacggttagtggcatagtattacttcttgctcgtgtgcgtgtgtagtaggatggcggattgcaggacgtgggtgttatttactggtaggaactgtggtacttgcagtagccaccatttctcatgttcaatgccggtcccatatgccggtcttgttcagttcctataccttgctcggttgagaaaaatggcaaatctacctcagttcattttgttctgattatttaaaagagggccaagtattgaattcttaagaaaaaacacattgatggtgctagtatctgggctctagtagggataatggctttttctatcttttgacttgtagcatgtagcatataagcaactttgaaagttttaaattttaaatttgatagaattctaatctaaaaaaaaaaaaaa

SEQ ID NO: 3544 - DNA, 1601 bp, Oryza sativa
  Clone ID: PAT_MRT4530_98621C.1
cggttctttatagagtttattttacttataatctggaccagattgtctttatctggtatcggagggatgctgggcagtttaccaacattactgccttgcaagcgtgcaataaccgtgatcagatttacaatatcctgtgtcctatttgctgcattttcctggtttccaggtagcagcagctgcgaacgaacatctgttggctgggtttttcttcgccgcctgttgtgaccggcgagcctacgtctgcagctcctcttaccctcatcaaactcagagagcgggtgaaatctactgcactgctgacagaagcgctgcatctggttgccaaccagcgccttcgtggtcttgccgtggatctcgcagactttgtgtctccggtgataatccttggcgttggtcagatccgccctgcagtcatccacctggcacatcgggtagcttccgccactaccgcctgagtttccaccgcctccgcctcccccatcctccagtgctacggtgtcacgcagccatggcgctccgctgcgtggcctcgaggaaaaccctagccgccgcggcgctgccgctggctgcggcggcggcggcgaggggtgtgacgaccgtcgcgctcccggacctcccctacgactacggcgcgctggagccggccatctccggggagatcatgcgcctgcaccaccagaagcaccacgccacctacgtcgccaactacaacaaggccctcgagcagctcgacgctgccgtcgccaagggcgacgcccccgccatcgtgcacctccagagcgccatcaagttcaacggcggaggccatgtcaatcattcgatcttctggaataacctcaagcctatcagcgagggtggtggtgagccaccacatgcaaaacttggctgggccattgatgaggattttggttcatttgaggcacttgtaaagaagatgagtgcagaaggtgctgctttacaaggatccggatgggtgtggctagctttggataaagaggcaaagaagctttcagtggaaacaactgctaaccaggaccctctggtaacgaagggggccaacttggttcctttgttgggaattgatgtctgggagcatgcgtactacctgcagtacaagaatgtcaggccagactacctgagcaacatctggaaggtgatgaactggaaatacgcaggggaggtgtacgaaaatgcgactgcttgatgttgtctgaaggcaacgctcgtggttttttttcacctagtactgccatggatctttgtatgcaataaaaatgggcctattgcacttctggaccttgtgtacattgcgtagaggtggactaatgcataacataatgggtctgttcggaagagctggctgctgcagcgctgcggctgcacagcacagccaaccagcagctgcaactagccaatagtagctacaacctatatgtgttaaagctagcaaagtataggagcagtagtttgtatgcagccgaacggattggctgtacagcacagccaaacagctgtaaaaattgacctaccgaacagacccaatatgcctgagattttcttcttgtgctgctttcctgcaaaaaaaaaagaaaacaaaa

SEQ ID NO: 3545 - DNA, 2413 bp, Oryza sativa
  Clone ID: PAT_MRT4530_98682C.1
tcaccatgagtaggctgggtgattgtcttcgtcatcacatgccaggaaggcttttgcaatttcatccattgtaggcctgctgtttctttcttcaagacaagatatagcaacttccaccattacctttgcttgctcagaattgaaatgcccattcagtctagtatcaattacatccttgacgtccccagtagccagaatatgtttcatgacctgcacaaaatctctgagctccacctccctcccatccacttttatcccgcttgatatcctgcttccagttacaatctcaagaagaacaacaccataactgtagacatcaacctttgcattgattggtgagttcaacgcccattctggtgccatgtagcccattgtacccctcatatgcgtgaagtttaaactggtactgtctctctttgagagtttggccagtccaaagtctgctatcttcacttcaaaatctctggtcagaagtatgttctctggttttacatcacaatggacaacccactctaggcactcgtgatggagataggccaaacctctagctgtacccaacgctattttgaaccgttggctccatgcaagcaatcgctcagcacttacatcaccaaataaatacttgtccagtgattcattgtccacatactcatacaccagtagtttttgttgaccctcggagcaaaaaccccacatcctaactaagttcatgtgattgatccttccaataatactcatttctgcccagaattcctcctcaccatgtgaaatattcattagcctcttcacggctatcactctcttatcttcaagtactcctctgtaaacaataccagaggctcctcttccaatctcttccttgaactttccagttgcctcccttaattctcggtacgtgaacatcctgaattggcttgttaccatcctgtagcctgcctccattgacatgggtatgttgtgcttgctgtaaagaaaccaccagcttgtacctgtgaagattagcactagagctcccaatactgctgcaaacacataataggttgcataatttttatttgcatcattcattccatacatacttgaagatcctagtacaatctctttggttgggttgcatgagagatcggactgtttggaaaccatattcttgggtagtttgatgtagttatcacccggaaaatttgtggagctgtagccattgaagagtacatatttgatgtaacaagttccagaccctgtcttatacgtgactgctgagcaggagcagatgtccaagcaagtctttttacattctttaagtgagatggattggttgatgattagatcgaagccataaaagtcggtttgagcgagcttgaagaactcatattcttctattttgctgcagtttttgctgaatagtggacgacaacctctgctccagtttgttggatctctcatctcatatccagggggacaagaacacttgaagcttggcaagaactcacatataccattctcgccacacagtccatgcacatcacacaattttgctatagcctgccatgagactttccagctcccatctgatgcattcaaactatacattcttagattcccatcataatcaagcgtcagccttctgttgattccagcaccccaatcagcagccttgatatccagcttatcacttgagaggaagtgtccttcagtgtcaaggattgcattcctggagccattgtagctagtcctcccaatatcaaacactgagtagtctggacttggccaatagatgctagatatttctggcccatcatacatgaggcgtaacacattgtcattgtcaaaatagaggttgaaataaccagagaccagtcttgtacctttggtgagaggctgtaatggaagcaaggtatccgttggtgcccagaagctttgccataacttcgtgcctgtggagtctctgatgacgagattgccagtgtcaagaaggacagccgttgtgcccttgccagagctcgtcttgctgtcccaatttgcggtgccattgacatcagcgaggaccaggttaccttcatggttcagtgtcaccttagagccatggccatttaccggggacttggggtttgcagaccatacgacggtcctattcttgctgttggtgaaccagatggagaaggagaaagcattccctccaacttcatagaagccacaagagaaatcggcgtttggtgaggtaaggaaggtttgcttatgctcttcaacaaataaggatgagccggtgcttagcatcaacaggggtgaagcatatgagaatggcagtacactttggcggttggctagagccgcgataccggccatggaaggagagtgatgagaggatggttagatacagcagcgcagccattatctccttttccagggagctttggcc

SEQ ID NO: 3546 - DNA, 5923 bp, Oryza sativa
  Clone ID: PAT_MRT4530_98926C.1
gggtttgttttttttttttttttttttttttttttttttttaaaaaaacattcatcacatcaggcaaggtattttgtcttacaattgcatttctcttcccaagtttgttttcatacacacacatcacatcactaccaaacaggaactttacacattctactgtactattctacaacacatcgctccctgggccgcacaataagcggcctcagcagcgcggcgattagcaactaccaaaatgcacgctttctttctttttctttttttttgggtctctcaatcaagataagtggagtagtagaataggagtaacaaattacagcagcaacaggagggaagaagacacaacagaatacatgtccagtgaatggcagacaggctactactccttgttccgtgtagctcggtctttcttgtggccgccaaggattcgcgagatctgcagacctctgctgaaggcctggttgaagagcattctggtctggaactcggacacaaacgggaaccaagcgaggaacgctatgggggtgaatagcaggagtcccattaggatctcatagccccgggcaagagccttgattgatccccaaagcccaatagcctggacagcaggtttgatggcttgcgcaatcagaagcaagccccatccagttggcatgaaagcaaggatgcaaacgaagatatcaagaactgtcatgtgagggatggcaattaatatcacaacaatggcgacaaatgttatgaatataaggcccttgatcaaccggaagacaagctggaactccgcactgaacctcctcctaccgactgaaacagtcttcatgacaagtaaaattacgaaaatcacaacccatgaaaagcaataaaccagtacactgcgagtatgcttggttatattcaaatgatacacaagcccatattggtagacaaagaagcgcaacgcgagcagaatttcaagaatagtaccacgctttccagagtatcgaagaggctcctgctctttttcccaccatgattcccaactttttgttggtgctactccaatacctccacggttgctgatccacttattccaatcagtccagtcatccacaatcttctgccactcaaatccagaaggattgaataggaatggtgcaaagagccaggtgcccaccataaaccacatggaaacagtgatgaaaatgtatgtgatagcccctctgtatgattgcccaaagatttcatacacaaccagcaaaatcatcagctcaatacccttgacaaaatggctgcgagaataaagtcggtagttgtcagcaaacttggcatgaaacaccacaaatccacgcccagtggctctatattcagctcctccgtggagtaatgtccttccgtaataatgagttttggtcccaagtgaaaatgtaaagaaaacagatgccaactgaagttgcataagtacaaagtcgcttagtgctgttctgaatcccctctccagaccaatttccatcatcatgggcaacgccatcaaaaatccaagttgaacaaaagactctgatgcaagagcaacttggaggggtgcattatgcacaaacttctttccagtggctagtgcttggtccagtccactgaggacaagatataagcgcccatagaggaaaacatatacagtccatactgtaatcattgtactaaagtagaagccaattgttgtgtaatagcatgacagcattctgaagaaatcaaaccggtgccctagtcgataaatgtcacggctcagtgtttgttcaccattaccatttgctatctttgcctcaaacagagcaatttggttgagacccacatctcttcccttgccaacttgcatgtactcatgatgagtgacattgccttcacgcaatgttgaattgaaaccggcaaatatatcttcactaagattgataattttggatgctttacttacaccaccccttgtgaggtggaaaagacgatcaaagatatcaggatggccatagtggaatcgaaccctcagggggttggcaagcacacgctgtccaatagtcacaaaactggtctcctgatttgacatgaaccatgcaagggatgaaacactgccagtaaatatatgctctcttactccaagtattgatggatatctcacaccatcatgtttcttcagaaactcatccagcagatttctcattttcaaagcctcctccatataatgctcctgattcatatctatagtttggaggcattcaccacgagtaaaaataattgcatgattctgattttctggttttccttcacctaaaatagcattacctggaagttttatcttgtatatgacctgatcaagactttgtcctggttcattaggttttgtaacggaagctttcaccaatgctgagtagtaaactttgtcagtcttcttgtttctatcttggctaggtgcttcaacctcatcaatataagcaactcgaagtgatggatatagaaagacactcgattgcactgttgcactaagaacaatcatgtgtgctccaaaggcttcaccagaacgtttctggattccatattgctggcacgagacaacatatgtaaatttcatgtcagctatagctttgcattgagtcatcaattgcgagtcctcagacatcagttcagttgctctgtaaccttccataagatcatcatctttggccatgtcaaggaaagcctgaagctccaacgcttttcggtagtacatcattcctctcacagttcttgtcaatgtctgtcccctatatgatgcccaaaggcgaagctcctcttccaatgtttcatcctcacggagctcctcctcgctcttgcggtccaccctatcaaggaaatttttccattcatctgggtagattttttgtaagtagaaaagtatggaaaccccatcctcatttggctcttccagattatgagaggagaaaagaacatcttccttgtaataaggagtcaagacagagaagggcaacatatgccgcacttttggagcattaggcatctccataaaaagagaatttgcaaagaacgatatccgtctcctagcatcaaggttcgtagggacatccatagcagactctttcacagtgagaagaaggtgaagcctctttatcttttccgtccatgcatttgattcctccacggggaacctaatagctttagtgaacaactgatcttgttgatcaagtgaagtcattccttcgtgttttctatttccaccatgtacagaatccaatagtccgcctagctggtcttgctcatccattatatcccttgtgaccacctcaagcatatcttggaataaaatgacaacttggcccaagtcttcttccttattcttttgcagtaattcaagtagttcaatgaacttcttgctcagggcaggaaggctcctcatgttcaaatcctttattagacttcccccttctatgtgttcatcaacaattgtaaaaatctgctgtattactattttctcacgttgaccaaacactaaagtattgatgatgtttttgaatgaaccatagcactctctgatagcataggaaaaatacggatctgatcccattctcttcttcagatcacgatcttttcctccactgtctgccgccatatccaatgctattggaatcttgctagcaagtaggaaaggtggccactggaatatattcaattcacggtctttacagtatgggacaagtagcaagtccatctccctgttatctataagatcttcctcacggaaacttgtgataattaggttccacatttgagcaaatcttgcggctattttctctttctcttgctcatcaccagaagtcttagaaggtttaccagtaaaggcagcacgcaaacctttactcttgtgtgaatcagaaggaatcaagtgctcattgaaggcctcaggcagagattcaaaacgagatctcaacattcctaatgtccgtatctcaccaagacgacgataagccccatagataccaccgatcaatgtagagaaaagtgcataccaaatttgggtgtccatgaagtagacaagaattattggagcccacagcgcaataacaacaccaatgttattgttagcacgagggaaaaattcatgccactggaaatcccggatcggctctttcattatatctttggttggctgtaccagaggcttgattgtcaatttcattgctaaaaggaggacccagaacatggtatacttgaagagggaaaatgcgccttcatgcattcctctgccaacaaatagtcgaggctgagaccaccacatgatgaatgttatgaccttaacatttgaactctcaagaaaccttctgcggatctgttctcctgcattcgcgaccaaacgagaaatgggtacccagaggattaatactccaagcaagtatttctttttcttggcattacattgaaggacaaggctggaaatgtaatccattccaattattccattaagacgactagggtaagcatcttcaggagttttgaaaaaatcagcatctgctctcataggccatcctagccgaaaacaatccactgaccaaaaatactcatttaaatcatcatagttcctccaatgtgagtgttttgactttatggtcttgctccgttcagcttccttctctataactttgtaaattggagtcactactttcatcaggaaggcctcttcatcaccaccatacgctggtttaacattttcaccagtcattggactcacgtttccagccaacatgccatagagttcaaaagccatctcaatgtaatttattgagttcaataaagcttccattatatgatggtagatgtagcaaagacactctggcatgaacctcaagttagccgcctcaccccaaattagcaaatagagacccatgtagagaagcttacgctgctgaacttcctgctggatagttggcaaccataaactgcttttgcggccaaggtacttgcaccacttcttataattcttaaatagcttcttcattacagcatctagagctctgtcgtccaactttgcttgttgctcagtcttaggagactgccttatgtgcacatttgcaagtaacagtattagatgttctctttggttggacacattatctttctgaaacccaaacatggcctgaagccaatcaagaaggtctttgccagtcttcttttcatcaggcttcttttcatgttccttgggccacggcaggcctctaatattccttagcgcattaacagctgcttgaatctctggatattgcataataggttgataagtactctcaggatcgagtggcagaatattgtaaggaacatagagctttttcttttcctcaactttgttgtgtgtatccagaatcgcttgatcgacttcaacagattgggaaacattgacggctttcaagacctcgaacaagacagcagcagtttggtatgccttagtgagcagagcacggtcagccttgtcggcagcattttgaagtgcctggatgtacttcttgtagtattcacggtagaaacgttgcatctctcgagcgtcactctggtgaacccttcccttcaatgttggatcattttccctttcaagcctctgcagaagcgcggttttgaattgacgaacaccacggccattggaggtggggtcgaggcgatgagccttctcgaaagcatagaaacggcataggtaggcgacgcgtgggttggtggcctcgacctcgttggcgacacggaggatgggggcgatctcgacgagcgaggaggggacgacctcactgtcgaagatggactcgcccaagttgccgacggtctgggtgcggagcagcctcctcccggctgcccccgccggcgagggagagggcgaggccgcggaggagaagtcgggcctcctggcgccgccgggcgccgccat

SEQ ID NO: 3547 - DNA, 134 bp, Oryza sativa
  unsure (1)..(134): unsure at all n locations
  Clone ID: PAT_MRT4530_99003C.1
acagaatttagttgcttctggggtcgatggattgcgtgctgggatgggctctggcttaataggcactacccaagaggtttgngccgtgggccgaggacaagctacagcagtgcataaggttgcatcttatgcca

SEQ ID NO: 3548 - DNA, 291 bp, Oryza sativa
  Clone ID: PAT_MRT4530_99181C.1
atggccttcaaccttgaagggcctgaaaatgagaggagcctttccttgagcttcttgtgtgccatggaggagggaagactcatggacattataggtcatcacattcaaactgatgagaatgctggggtgctcgaggaggttgccaaccttgcaagccggtgcctggagatgatcggcaataaccgcccgtcgatgagagatgtcgctgacaaatttggccggctgaggaaggtcatgcagcacccatgggcgcagcatgacccggaggagatggtgcaacattcaaaatag

SEQ ID NO: 3549 - DNA, 478 bp, Oryza sativa
  Clone ID: PAT_MRT4530_99963C.1
tagaggggcaggtgtgaatccaattccacaatagtccaacaattacatagtgtccaggcccttgcgatcgaccttgaagaggatgcagcagctggagggggtgcaggcgatgcccaggatcacctagaggtgtgaggccctccgccctattgtagccgaaaacgtccctttggtctgcacagtttaacagggtgttcgccaaaaattgtgtattcggcgaagcaaaaacaagaaatttgtggcgttgaagggtttgccaacggtgcgatgcccatttcggcctgtttattgcgaaatagtgataaacggccgcagctataaggtttttaaggttgccgactggctacaggcgctgacagctttcgcacttcttgacttgctcaacacagactttcagcatggtgggccagtatactccttttggcgtaatcatggtcaaagctgtttcctgtgtgaaattgttatccgctcccaattc

SEQ ID NO: 3550 - protein, 147 aa, Glycine max
  Clone ID: PAT_MRT3847_100307C.1.pep
LISYLTKSAGTGIGIEFRESGLNINAKNEQLVKEGMVFNVSLGFQNVQRESSKSKNKHFSLLLADTVIINKDKTEVVTSMSSKALKDVAYSFNEDEEEENPRAKADTNGAEPLMSKTTLRSDNHEMSKEELRRQHQAELARQKNEET

SEQ ID NO: 3551 - protein, 371 aa, Glycine max
  Clone ID: PAT_MRT3847_100511C.1.pep
MAKRVFLYKDLVPFGAMVTMECLNVALNTLFKAATLRGMSYHVFVVYAYAVAAIVLIPGPFISQRCRSRVLPPLSFPLLRKIGLLGLIGCASQIVGYTGISFSSPTLSSAISNLVPAFTFLLAIIFRMEKVIVRNTTCQAKVLGTIVSITGAFVVTFYKGPPIIIVHTPSLSLHQPINTLNSVDRSWAIGGLLLTAEYILVPLWYIVQVQIMKVYPNELTVIFFYNLCVSIMAAIVAIFTETNAGAWKIGLDTALASIVCSGIFGSFVNNAVHTWVLRIKGPVYVAMFKPLSIAIAVALGVMFLGDTLHLGSLVGATVISIGFYTVMWGKATEENVDEDVPGQQSPPTTENVPLLQSYKTDTAEKKMHGSV

SEQ ID NO: 3552 - protein, 186 aa, Glycine max
  Clone ID: PAT_MRT3847_101219C.1.pep
MKSMENDDNADLNNQNNWLGFSLSPQMHNIGVSSHSQPSSAAEVVPTSFYHHTAPLSSYGFYYGLEAENVGLYSALPIMPLKSDGSLYGLETLSRSQAQAMATTSTPKLENFLGGEAMGTPHHYECSATETMPLSLDSVFYIQPSRRDPNNNQTYQNHVQHISTNQQQQQQELQAYYSTLRNHDMI

SEQ ID NO: 3553 - protein, 66 aa, Glycine max
  unsure (1)..(66): unsure at all Xaa locations
  Clone ID: PAT_MRT3847_101254C.1.pep
MAGSAPTPREEFVYMAKLAEQAERYEEMVEFMEKXTPTPRAXELTVEERILLCVNYLNAFRARSAF

SEQ ID NO: 3554 - protein, 103 aa, Glycine max
  Clone ID: PAT_MRT3847_101657C.1.pep
MSGRGKGGKGLGKGSAKRHRKVLRDNIQGITKPAIRRLARRGGVKRTSGLIYEETKGVLKIFLKNVIPDAVTYTEHARRKPVTAMDVVYAPKRQGRTLYGFGG

SEQ ID NO: 3555 - protein, 103 aa, Glycine max
  Clone ID: PAT_MRT3847_101658C.1.pep
MSGRGKGGKGLGKGGAKRHRKVLRDNIQGITKPAIRRLARRGGVKRISGLIYEETRGVLKIFLENVIRDAVTYTEHARRKTVTAMDVVYALKRQGRTLYGFGG

SEQ ID NO: 3556 - protein, 103 aa, Glycine max
  Clone ID: PAT_MRT3847_101659C.1.pep
MSGRGKGGKGLGKGGAKRHRKVLRDNIQGITKPAFGRLARRGGVKRISGLIYEETRGVLKIFLENVIRDAVTYTEHARRKTVTAMDVVYALKRQGRTLYGFGG

SEQ ID NO: 3557 - protein, 103 aa, Glycine max; identical to SEQ ID NO: 3555
  Clone ID: PAT_MRT3847_101660C.1.pep

SEQ ID NO: 3558 - protein, 103 aa, Glycine max; identical to SEQ ID NO: 3555
  Clone ID: PAT_MRT3847_101661C.1.pep

SEQ ID NO: 3559 - protein, 103 aa, Glycine max; identical to SEQ ID NO: 3555
  Clone ID: PAT_MRT3847_101662C.1.pep

SEQ ID NO: 3560 - protein, 103 aa, Glycine max; identical to SEQ ID NO: 3555
  Clone ID: PAT_MRT3847_101663C.1.pep

SEQ ID NO: 3561 - protein, 80 aa, Glycine max
  Clone ID: PAT_MRT3847_101916C.1.pep
PQSIAVAPSSTTTTTTNYGYEYGGHLQDQAYYTQQQTTNATLLPQHQSMTPAAAAAALSDAPKQYPAHNIQQSNTASQPV

SEQ ID NO: 3562 - protein, 239 aa, Glycine max
  Clone ID: PAT_MRT3847_102149C.1.pep
MGRGRVDLKRIENKINRQVTFSKRRSGLLKKAREISVLCDADVALIVFSTKGKLLDYSNQPCTERILERYERYSYAERQLVGDDQPPNENWVIEHEKLKARVEVLQRNQRNFMGEDLDSLNLRGLQSLEQQLDSALKHIRSRKNQAMNESISELQKKDRSLREHNNLLSKKIKEKEKELTPQEQEGLQNNMDVTSVLVTQPPESLTIGGFPEAKCNEETPTSCRPKTILPPWMPLPTNE

SEQ ID NO: 3563 - protein, 239 aa, Glycine max
  Clone ID: PAT_MRT3847_102150C.1.pep
MGRGRVEFKRIENKINRQVTFSKRRSGLLKKAREISVLCDADVAFIAFYTKGKLLDYSNQPCSERILEPCERDSYAERELVGDDQPPNENWVIEHEKLRLGWRYYSRNQRNLMGEDLDRLNLTGLQRWEHQLDSALKHIRSRKNQAMNESISELQKKDRTLREHNSLLSKKIKEKEKELTPQEQEGLQNNMDVSSVLVTQPLESLTIGGSPEVKSNKETPPSCRPKTILPPLMPLPTNE

SEQ ID NO: 3564 - protein, 320 aa, Glycine max
  Clone ID: PAT_MRT3847_102634C.1.pep
HASAVIITKDKTEIVTATSSKALKDVAYSFNEDEEEERPSTKPDAKKAEPFMSKTTLRSDNHEVSKEELRRQHQAELARQKNEETARRLAGGGSETGESRSSARTSAELMAYKNINDLPPPREMMIQIDQKNEAVLLPINGSMVPFHVAFIRTVSSQQDTNRNCYVRIIFNVPGTPFSPHDANSMKFPGSIYLKEASFRSKDSRHISEVVQSIKTLRRQVVARESERAERATLVTQEKLQLANNRFKPIRLSDLWIRPAFGGRGRKIPGTLEAHVNGFRYSTTRQDERVDIMFPNIKHAFFQPAENEMITLLHLHLDNHI

SEQ ID NO: 3565 - protein, 511 aa, Glycine max
  Clone ID: PAT_MRT3847_103232C.1.pep
MLLELALGLCVLAWFLHLRPTPSAKSKALRHLPNPPSPKPRPPFIGHLHLLKDKLLHYALIDLSKKHGPLFSLSFGTMATVGGSTPELFKLFLQTHEGTSFNTRFQTSAIRRLTYDNSVAMVPFGPYWKFVRKLIMNDLLNATTDNKLRPLRTQQIRKFLRVMAQSAEAQKPLDVTEELLKWTNSTISMMMLGEAEMIRDIAREVLKIFGEYSLTDFIWPLKYLKVGKYEKRIDDILNKFDPVVERVIKKRREIVRRRKNGEVVEGEASGVFLDTLLEFAEDETMEIKITKEQIKGLVVDFFSAGTDSTAVATEWALAELVRRSTAVVGKDRLVDEVDTQNLPYIRAIVKETFRMHPPLPVVKRKCTEECEINGYVIPEGALVLFNVWQVGRDPKYWDRPSEFRPERFLETGAEGEAGPLDLRGQHFQLLPFGSGRRMCPGVNLATSGMATLLASLIQCFDLQVLGPQGQILKGDDPKVSMEERAGLTVPRAHSLVCVPLARIGVASKLLS

SEQ ID NO: 3566 - protein, 521 aa, Glycine max
  Clone ID: PAT_MRT3847_103233C.1.pep
MLLELALGLLVLALFLHLRPTPTAKSKALRHLPNPPSPKPRLPFIGHLHLLKDKLLHYALIDLSKKHGPLFSLYFGSMPTVVASTPELFKLFLQTHEATSFNTRFQTSAIRRLTYDSSVAMVPFGPYWKFVRKLIMNDLLNATTVNKLRPLRTQQIRKFLRVMAQGAEAQKPLDLTEELLKWTNSTISMMMLGEAEEIRDIAREVLKIFGEYSLTDFIWPLKHLKVGKYEKRIDDILNKFDPVVERVIKKRREIVRRRKNGEVVEGEVSGVFLDTLLEFAEDETMEIKITKDHIKGLVVDFFSAGTDSTAVATEWALAELINNPKVLEKAREEVYSVVGKDRLVDEVDTQNLPYIRAIVKETFRMHPPLPVVKRKCTEECEINGYVIPEGALILFNVWQVGRDPKYWDRPSEFRPERFLETGAEGEAGPLDLRGQHFQLLPFGSGRRMCPGVNLATSGMATLLASLIQCFDLQVLGPQGQILKGGDAKVSMEERAGLTVPRAHSLVCVPLARIGVASKLLS

SEQ ID NO: 3567 - protein, 521 aa, Glycine max
  Clone ID: PAT_MRT3847_103235C.1.pep
MLLELALGLFVLALFLHLRPTPSAKSKALRHLPNPPSPKPRLPFIGHLHLLKDKLLHYALIDLSKKHGPLFSLSFGSMPTVVASTPELFKLFLQTHEATSFNTRFQTSAIRRLTYDNSVAMVPFGPYWKFVRKLIMNDLLNATTVNKLRPLRTQQIRKFLRVMAQSAEAQKPLDVTEELLKWTNSTISMMMLGEAEEIRDIAREVLKIFGEYSLTDFIWPLKYLKVGKYEKRIDDILNKFDPVVERVIKKRREIVRRRKNGEVVEGEASGVFLDTLLEFAEDETMEIKITKEQIKGLVVDFFSAGTDSTAVATEWALAELINNPRVLQKAREEVYSVVGKDRLVDEVDTQNLPYIRAIVKETFRMHPPLPVVKRKCTEECEINGYVIPEGALVLFNVWQVGRDPKYWDRPSEFRPERFLETGAEGEAGPLDLRGQHFQLLPFGSGRRMCPGVNLATSGMATLLASLIQCFDLQVLGPQGQILKGDDAKVSMEERAGLTVPRAHSLVCVPLARIGVASKLLS

SEQ ID NO: 3568 - protein, 560 aa, Glycine max
  Clone ID: PAT_MRT3847_103671C.1.pep
MGEVPAVMQATQGEQSNNASAVHWERFLPRMVLRVLLVEADDSTRQIIAALLRKCGYKVVAFCDGLKAWETLKNKAFDLDLILTEVDLPSISGFSLLTLIMEHDICKNIPVIMMSSHDSVSMVFKCMLKGAADFLIKPVRKNELRNLWQHVWRRHAISRPPQNLTLPEIELGFAAENHAASNDSSGSVASTPKDDECSEKTSEAHSTCPSPFLEAESTYMENMQDILQLKSSSNLSNIDTVKHENSTKYPSTGAIDLIATFKNLPKSTDEKCSFSSGNTAKFDFDTQLELSLRRDFPGSSCKAAFKERQILNHSNASAFSRYSNSKLLQPLFPTPSTISAKLTNASQNSHESLKLSKNTSTSHQYSEKSQNQEEKIITSVIGQSGQVDPKLPNSQLGLFPATGVTSDHKSKGNGNVFPSKLYAKSGVHPISTPKSVCQKESSPFPTSTSSQSNPQSHNSERHHWLEDATHASDQNVNDQSNLECETHDSPAASQSADSHRTSQREAALTKFRLKRKDRCYEKKVRYQSRKRLAEQRPRVKGQFVRQVHDDHPVADVGGGS

SEQ ID NO: 3569 - protein, 555 aa, Glycine max
  Clone ID: PAT_MRT3847_103672C.1.pep
MGLVAADKGSMQTQEEQSDNASAVQWERFLPRMVLRVLLVEADDSTRQIISALLHKCSYKVVAFCDGLKAWETLKNKPSDIDLILTEVDLPSISGFSLLTLIMEHDICKNIPVIMMSSHDSVSMVLKCMFKGAADFLIKPVRRNELRNLWQHVWRRHAISRPPQNFTLPEIEIGFAAENHAASNDSSGSVASTAKNGECSEKTSEAQDISQLKRSSNLSNIDTVKHENSTKYIHGCSDELVDPYTGAIDLIATFKNLPKSTDEKCSFSSGNTAKFDFDTQLELSLRRRDFPGSSCKAASEERQLLNHSNASAFSRYSSSKLLQPLFPTPSTISAKLTNSSLSSHESHKFSENASTSHQYGGKNQNQEKIITPVIGQSGQVDPKLPNSQLGYFPATGVTSDHKSTGNGNVFPSMLYAESGVHPIWTPKSVCQKESSPFPTITSSQSNPQSHNSECHLWSEDSTHASDKNLNDQINLDCETHDSPDASQSAGTNSHRTSHREAALTKFRLKRKDRCYEKKVRYQSRKRLAEQRPRVKGQFVRQVQDDHPVADVGGGS

SEQ ID NO: 3570 - protein, 155 aa, Glycine max
  Clone ID: PAT_MRT3847_104342C.1.pep
MDVGQMQRQWIDYTKSLFLEGFLDGQFLQLQQLQDENNPDFVVEVVSLFFEDSERLLKDLTFALDQNGVDFKKVDAHVHQLKGSSSSIGAQRVKNACIAFRNFCEEQNTDACLRCLQQVKQEYCIVKNKLETMFRLEQQIVAAGGSIPTELSFIG

SEQ ID NO: 3571 - protein, 200 aa, Glycine max
  Clone ID: PAT_MRT3847_104343C.1.pep
MDVGQMQRQWIDYTKSLFLEGFLDGQFLQLQQLQDENNPDFVVEVVSLFFEDSERLLKDLTFALDQNGVDFKKVDAHVHQLKGSSSSIGAQRVKNACIAFRNFCEEQNTDACLRCLQQVKQEYCIVKNKLETMFRLEQQIVAAGGSIPWVTERVYYDPRLLKIILYLIKSMVNVWVFIKIEVFHPMYLFLHQKALHASDL

SEQ ID NO: 3572 - protein, 155 aa, Glycine max
  Clone ID: PAT_MRT3847_104344C.1.pep
MDVGQMQRQWIDYTKSLFLEGFLDGQFLQLQQLQDENNPDFVVEVVSLFFEDSERLLKDLTFALDQNGVDFKKVDAHVHQLKGSSSSIGAQRVKNACIAFRNFCEEQNTDACVRCLQQVKQEYCLVKNKLETMFRLEQQIVAAGGSIPTELSFSG

SEQ ID NO: 3573 - protein, 392 aa, Glycine max
  Clone ID: PAT_MRT3847_104458C.1.pep
ISCVFLKIICLSSTFDALSSYLPNASWHNRKIQKEYNFLRFRWPSLNHHYKSIEGACTCKKCNIKFVVKATSEKSFESEPQAFDPKSILDSVKNSLDAFYRFSRPHTVIGTALSIISVSLLAVEKISDISPLFFTGVLEAVVAALFMNIYIVGLNQLSDVEIDKINKPYLPLASGEYSFETGVTIVASFSILSFWLGWVVGSWPLFWALFVSFVLGTAYSINVPLLRWKRFAVLAAMCILAVRAVIVQLAFFLHIQTHVYKRPPVFSRSLIFATAFMSFFSVVIALFKDIPDIEGDKVFGIQSFSVRLGQKPVFWTCVILLEIAYGVALLVGAASPCLWSKIVTGLGHAVLASILWFHAKSVDLKSKASITSFYMFIWKLFYAEYLLIPFVR

SEQ ID NO: 3574 - protein, 159 aa, Glycine max
  Clone ID: PAT_MRT3847_104508C.1.pep
MTGSADPLVISFGEMLIDFVPDTSGVSLAESCAFIKAPGGAPANVACAISKLGGNAAFVGKMGDDEFGRMLVDILRKNGVNTDGVCFDTEARTALAFVTLRKDGEREFMFYRNPSADMLLKESELNMGLIKQAKVFHYGSISLISEPCRSAHLAAMKVA

SEQ ID NO: 3575 - protein, 197 aa, Glycine max
  Clone ID: PAT_MRT3847_10478C.1.pep
SRIEAVVIATGVHTFFGKAAHLVDTTNQVGHFQKVLTAIGNFCICSIAVGMVIEIIVMYPIQDREYRPGIDNLLVLLIGGIPIAMPTVLSVTMAIGSHRLSQQGAITKRMTAIEEMAGMDVLCSDKTGTLTLNKLTVDKNLIEVFAKGVDADTVVLMAAQASRLENQDAIDTAIVGMLADPKEARLGIQEVHFLPFN

SEQ ID NO: 3576 - protein, 354 aa, Glycine max
  Clone ID: PAT_MRT3847_105008C.1.pep
MVEAQTWTTRRMSNPRLDTSTTDQVLDIPPTPPGELRNSFGSNPNNLSPTLLTALIISSWYLSNIGVLLLNKYLLSFYGYRFPIFLTMLHMLSCAAYSYASINFLELVPLQHIHSKKQFLKIFALSAIFCFSVVCGNTSLRYLPVSFNQAIGATTPFFTAIFAFLITCKKETGEVYLALLPVVFGIVVASNSEPLFHLFGFLVCVGSTAGRALKSVVQGILLTSEAEKLHSMNLLLYMAPLAAMILLPFTLYIEGNVLALTIEKAKGDPFIVFLLLGNATVAYLVNLTNFLVTKHTSALTLQVLGNAKAAVAAVVSVLIFRNPVTVMGMAGFGITIMGVVLYSEAKKRSKVTTH

SEQ ID NO: 3577 - protein, 444 aa, Glycine max
  Clone ID: PAT_MRT3847_105313C.1.pep
MDEEYDVIVLGTGLKECILSGLLSVDGLKVLHMDRNDYYGGESTSLNLIQLWKRFRGDDKPPPHLGASRDYNIDMNPKFIMANGNLVRVLIHTDVTKYLYFKAVDGSYVFNKGKVHKVPANDMEALKSPLMGLFEKRRARKFFIYVQNYNESDPKTHEGMDLTRVTTKELIAKYGLDDNTIDFIGHALALHSDDRYLAEPALDTVKRMKLYAESLARFQGGSPYIYPLYGLGELPQAFARLSAVYGGTYMLNKPECKVEFDEEGKVVGVTSEGETAKCKKVVCDPSYLPGKVRKVGRVARAIAIMSHPIPSTDDSHSVQIILPQKQLGRKSDMYLFCCSYTHNVAPKGKFIAFVSTEAETDQPAIELKPGIDLLGPVDEIFFDIYDRYEPVNEPTLDNCFISTSYDATTHFESTVDDVLNMYTLITGKVIDLSVDLSAASAAEE

SEQ ID NO: 3578 - protein, 224 aa, Glycine max
  Clone ID: PAT_MRT3847_105406C.1.pep
MAAAGCQKLLELSTKIVAVGRNYAAHAKELGNAVPKEPVLFLKPTSSYLSNGGTIQIPHNEGSLHHEVELAVVISKKARDVSESSAMDYVAGYALALDMTARDLQAAAKSAGLPWSLAKGQDTFTPISSILPKTTVPNPDDLELWLKVDEEIRQKGSTKDMIFKIPFLISYVSSVMTLFEGDVILTGTPPGVGPVKEGQTITAGITGLVDVQFNVEKRARPVLS

SEQ ID NO: 3579 - protein, 749 aa, Glycine max
  unsure (1)..(749): unsure at all Xaa locations
  Clone ID: PAT_MRT3847_105522C.1.pep
SNASGTGTVAVAAAAAAAAPTMSFSYPNMPGNETPYLAILQNNAYSFPIPAHVGGPPGYRGTPHAQAFPFFNGSFYSSQMLHPSQIQQQQLPAQSQQQSQQGHQNASMSSGSSTSQKQHAQNQQQKPNNNATGSNGGGSLQGFPVTKNPPSLPLQLQQQQPQQRQNHHPSHPARQVESEMGGEDSPSTADSRLARATMNIYGQNFAMPMQSPNFALMTPASISAAGSNGGHGEKKQPQQHPGPNDAXTWKKQANWSRSRPTKIEMIWIPQFWXEIDQTKNIDVPELCLVICLYPGVYKSDKVDXKSNQNSIGXSEGCGGEKKMEERKGKNHLFFFWGCNGXLPTCSFSSSFLFSYFILSSRATWAAVXGSASSRASTSVMPAGISTNPASSQQQMQRNQQQQQILQHQKQNQFAAAAAAAARNKTPSTSNGSVYSDNLPSTSSMANKFPSAVSAFPQSLVQSSNTVAQSPQWKNSVRATTTSQSPPSMASTTPPSSVKNLPQQQARSQQPHTQISFATNPKSSAAQVQPSSSTQSPSPPVMVGSPTTSSMSKNTGSPRTTSASTTNNKISQSSSLSSQQAKNSSAVPARKSSPVGSRNVPSILNVPQLTPSSSTGSKSQLPQKQQPQQQIPKQALQQAQLLFSSPYVHPQSNSTTSTTTVPSGYYLQHQQRRGPEQMQRPGSSPAVNNVKGSSALPTQGLLHPAQVAAMQPSGSHPQFVPTGFSYASYHVHSVPSVQVKPAEQKQPAGE

SEQ ID NO: 3580 - protein, 315 aa, Glycine max
  unsure (1)..(315): unsure at all Xaa locations
  Clone ID: PAT_MRT3847_105727C.1.pep
MTVEKEDLGLSLSLSFPQNPPTHLHLNLVSSSPSSHNPQKPSWNDPFTSSAGSSFLRGIDVNRLPSVVDCEEEAGVSSPNSTVSSVSGKRSEREEANGEENDTDRACSRGIISDEEDAETSRKKLRLSKDQSIILEESFKEHNTLNPKQKLALAKQLGLRARQVEVWIQNRRARTKLKRTEVDCEFLKRCCENLTVENRRLQKEVQELRALKLSPQFYMHMTPPTTLTMCPSCERVAVPPSSAVDPAMRHHHVPPTQPRAFPIGXMGHRCRHYPAQALRCPPSQILTRRNKMTKFEKKKTVVIVGSHELCVQSVV

SEQ ID NO: 3581 - protein, 58 aa, Glycine max
  Clone ID: PAT_MRT3847_106565C.1.pep
IDKDFKNPISFFGQILIKPRKNGDLVCLRPNSPGGSPSFYGGSVTLKLVLPPYSKWKK

SEQ ID NO: 3582 - protein, 234 aa, Glycine max
  Clone ID: PAT_MRT3847_10661C.1.pep
MAAKIFCFLMLLGLSASAATATIFPQCSQAPIASLLPPYLSPAVSSVCENPILQPYRIQQAIAAGILPLSPLFLQQSSALLQQLPLVHLLAQNIKAQQLQQLVLANLAAYSQQQQFLPFNQLAALNSASYLQQQQLPFSQLPAAYPQQFLPFNQLAALNSPAYLQQQQLLPFSQLAGVSPATFLTQPQLLPFYQHAAPNAGTLLQLQQLLPFNQLALTNPTAFYQQPIIGGALF

SEQ ID NO: 3583 - protein, 44 aa, Glycine max
  unsure (1)..(44): unsure at all Xaa locations
  Clone ID: PAT_MRT3847_106796C.1.pep
LMTHGTGFKPYERCSMXAKRNRVGAISNQGVEQGCXRIRLEGKT

SEQ ID NO: 3584 - protein, 452 aa, Glycine max
  unsure (1)..(452): unsure at all Xaa locations
  Clone ID: PAT_MRT3847_106878C.1.pep
MVEKSSRTNLGHHQDFGMEAYSIDGVSSQSESKFYDDDGHVKRTGNVWTTSSHIITAVVGSGVLSLAWAMAQMGWVAGPVVMIFFSAVTLYTMXFLADCCRHVVTVTRKRNYTFMDAVQSILGGYYDTFCGVDQYSVLYGTAVGYTIAASISMMAIKIQIFMKSGGSPXVAAIMSLVYPTMXSIIQILFSQIPDFHKTGSLSIVAAIMSFVYSTIGLALGIAKVAEMGTFKGSLTGVRIGTVTEATKVWGVFQGLGDIAFAYSYSQILIEIQDTIKSPPSEAKTMKKSAKISIGVTTTFYMLCGFMGYAAFGDSAPGNLLTGFGFFNPYWLIDIANAAIVIHLVGAYQVYAHPFRLVWRTVFVIITTFVAMLIPFFNDVLGLLGALGFWPLSVFLPVQMSIKQKRTPRWSGRWIGMQILSVVCFIVSVAAAVGSVASIVLDLQKYKPFHVKY

SEQ ID NO: 3585 - protein, 371 aa, Glycine max
  Clone ID: PAT_MRT3847_106879C.1.pep
MEPYSIDGVSSQTNSKFYDDDGHVKRTGTVWTTSSHIITAVVGSGVLSLAWAMAQMGWVAGPAVMIFFSVVTLYTTSLLADCYRCGDPVTGKRNYTFMDAVLSILGGYYDAFCGVVQYSNLYGTAVGYTIAASISMMAIKRSNCFHSSGGKSPCQVSSNPYMIGFGIIQILFSQIPDFHETWWLSIVAAIMSFVYSTIGLALGIAKVAEMGTFKGSLTGVRIGTVTEATKVWGVFQGLGDIAFAYSYSQILIEIQDTIKSPPSEAKTMKKSAKISIGVTTTFYMLCGFMGYAAFGDSAPGNLLTGFGFFNPYWLIDIANAAIVIHLVGAYQVYAQPLFAFVEKWASKRWPEVETEYKIPIPCFSPYNLSPF

SEQ ID NO: 3586 - protein, 59 aa, Glycine max
  unsure (1)..(59): unsure at all Xaa locations
  Clone ID: PAT_MRT3847_106982C.1.pep
FARSSARGTNTVHTGTGPRSGXTGGTGSGGHGATGYGPTGGTGYGSGTGYGVTTGGALT

SEQ ID NO: 3587 - protein, 202 aa, Glycine max
  unsure (1)..(202): unsure at all Xaa locations
  Clone ID: PAT_MRT3847_107885C.1.pep
SSSRSSRATLYVLTLTLPSASAVYWAFGDQLLTHSNALSLLPKTGFRDTAVILMLIHQFITFGFACTPLYFVWEKFIGVHETKSLFKRALARLPVVIPIWFLAIIFPFFGPINSTVGSLLVSFTVYIIPALAHMVTFASAPARENAGERPXSKLGGFXILYSMNVFVAVWVWGVGFGFRRWPTSICRLPLFLLFLFFFYHII

SEQ ID NO: 3588 - protein, 103 aa, Glycine max; identical to SEQ ID NO: 3555
  Clone ID: PAT_MRT3847_107992C.1.pep

SEQ ID NO: 3589 - protein, 45 aa, Glycine max
  unsure (1)..(45): unsure at all Xaa locations
  Clone ID: PAT_MRT3847_108009C.1.pep
KIFHGMPGRFQGYGVSMSRPIITXGLXLLPXPVSLTXXGNXQDII

SEQ ID NO: 3590 - protein, 103 aa, Glycine max; identical to SEQ ID NO: 3555
  Clone ID: PAT_MRT3847_108585C.1.pep

SEQ ID NO: 3591 - protein, 109 aa, Glycine max
  Clone ID: PAT_MRT3847_108680C.1.pep
MASETASSADEETVVVVSAAAGAGGTDKRGKHRILAELKRLDQESKFLQEELEELEKTENVSTICTELLQNIDTRPDPLLPEVHGPVNLLWDRWFEGPQDPQACRCWIL

SEQ ID NO: 3592 - protein, 45 aa, Glycine max
  Clone ID: PAT_MRT3847_108684C.1.pep
FLRNASYSSTTHNLSKSLTNDNQIRRVNKTKLYLATHIASPQPTT

SEQ ID NO: 3593 - protein, 326 aa, Glycine max
  Clone ID: PAT_MRT3847_109156C.1.pep
MDNTKPLIELELDDDGRIRRTGNVWTASIHIITVVVGAGVLSLAWVMAQLGWLAGIASIITFSAVSIFTYNLVADCYRYPDPVTGKRNYTYMQAVKAYLGGTMHVFCGLVQYTKLAGITVGYTITSSTSLVAIRKAICIHKTGDAASCKFLNNPFMIGFGILQLFLSQIPNFHELTWLSTAACITSFGYVFIGSGLCLLVVLSGKGAATSITGTKLPAEDKLLRVFTGLGNIALACTYATVIYDIMDTLKSHPSENKQMKRANVLGVTAMAILFLLCSGLGYAAFGDNTPGNILTGFTEPFWLVALGNGFIVIHMIGAYQVRSFFH

SEQ ID NO: 3594 - protein, 106 aa, Glycine max
  Clone ID: PAT_MRT3847_109315C.1.pep
TRPRTRGHGDKKDEPWWPVLDTRDSLVETLTTIMWVTSGHHSAVNFGQYHFAGYFPNRPTTIRKNMPVEEGGPGEEMEKFLKQPETTLLDMLPTQMQAIKVMTTLD

SEQ ID NO: 3595 - protein, 411 aa, Glycine max
  Clone ID: PAT_MRT3847_110258C.1.pep
MEMDPPPKSWSIHTRSEIIAKYEVMERVGSGAYADVYRGRRLSDGLTVALKEIHDYQSAFREIDALQLLEGSPNVVVLHEYFWREDEDAVLVLEFLRTDLATVIADTAKANQPLPAGELKCWMIQILSGLDACHRHMVLHRDLKPSNLLISEHGLLKIADFGQARILMEPGIDASNNHEEYSRVLDDIDNKDTITSTHDGNATCNTSDVDREEEELGCFTSCVGTRWFRAPELLYGSRNYGLEVDLWSLGCIFAELLTLQPLFPGTADIDQLSRIIGVLGNLDENAWAACSKLPDYGIISFSKVENPAGLEACLPNRSPDEVALVKKLVCYDPAKRATAMELLHDKYFSDEPLPVLVSELRVPLTRKEQDGDSPGGWGDINDMDSDSDSQFDEFGPLNITRTGTGFSIQFP

SEQ ID NO: 3596 - protein, 105 aa, Glycine max
  unsure (1)..(105): unsure at all Xaa locations
  Clone ID: PAT_MRT3847_110470C.1.pep
QVPYNQPITIXQKHYDDQGRXVDXYGNVEKHTDXYGNPVXHAASVTYVAXXTAAGGYSDVINXQHDTTNAYGGGTGRQHSSGGYDGDTXXQHXTTGGYNDDTNSH

SEQ ID NO: 3597 - protein, 331 aa, Glycine max
  Clone ID: PAT_MRT3847_110893C.1.pep
MANSMSFFLLLSFLAFAPLCLCHYNQEGYLYPQFYDYSCPQAQHIVKSVLAKYVAEQPRLAASILRLHFHDCFVKGCDASLLLDSSESINSEKGSNPNRNSARGFEVIDAIKAELERQCPSTVSCADILTLAARDSVVLTGGPNWEVPLGRRDSLGASISGSNNNIPAPNNTFQTILTKFKLQGLDLVDLVALSGGHTIGNARCTTFRQRLYNQSGNGEPDSTLDQYYASTLRTRCPSSGGDQNLFFLDYATPYKFDNSYFKNLLAYKGLLSSDQVLFTMNQESAELVKLYAERNDIFFEHFAKSMIKMGNISPLTNSRGEIRENCRRINA

SEQ ID NO: 3598 - protein, 78 aa, Glycine max
  unsure (1)..(78): unsure at all Xaa locations
  Clone ID: PAT_MRT3847_111031C.1.pep
MASXXKHXADQGXARLHXYSNVEKQXDXYGNPXHAASVTYVSTRTAAGXYSDDINKQXXAXNXYXXDTGRRHSSXGYX

SEQ ID NO: 3599 - protein, 113 aa, Glycine max
  unsure (1)..(113): unsure at all Xaa locations
  Clone ID: PAT_MRT3847_111790C.1.pep
AASKDRENCSCIAKLAEHAERYEEMVESLKNEANLDVELTEEERNLLSVGYKNVIGARRASWKILSSIRQLEXTKGNEXNAKRIKDNTHXVKLELTNICNDEMTVIDEHLMAS

SEQ ID NO: 3600 - protein, 295 aa, Glycine max
  Clone ID: PAT_MRT3847_111906C.1.pep
MAQSSSIVVTLRQHLFKRNLTSLTLPHSPSLPSFSFSLRTTPHTPLSLSASFSSHTSMAHTSLPSADAGMDAVQRRLMFEDECILVDENDRVVGHDSKYNCHLMEKIEAENLLHRAFSVFLFNSKYELLLQQRSATKVTFPLVWTNTCCSHPLYRESELIDENALGVRNAAQRKLLDELGIVAEDVPVDKFTPLGRILYKAPSDGKWGEHELDYLLFIVRDVNVNPNPDEVADIKYVNRDQLKELLRKADAGEEGLKLSPWFRLVVDNFLFKWWDHLEQGTLGEATDMKTIHKLT

SEQ ID NO: 3601 - protein, 35 aa, Glycine max
  Clone ID: PAT_MRT3847_111927C.1.pep
TLELIGVQYFCILSCIILWFNHMHYFMLCKIVIRI

SEQ ID NO: 3602 - protein, 595 aa, Glycine max
  Clone ID: PAT_MRT3847_112250C.1.pep
VATKTESNKVAGNAILYECVQTIMSIEDNGGLRVLAINILGRFLSNRDNNIRYVALNMLMKAVTADAQAVQRHRATIIECVKDSDASIRKRALELVYVLVNETNVKPLAKELIDYLEVSDLDFRGDLTAKICSIVAKYSPEKIWYIDQMLKVLSEAGNFVKDEVWYALVVVISNASELHGYTVRALYRAFQTSAEQETLVRVTVWCIGEYGDMLVNNVGMLDIEDPITVTESDAVDVIEIAIKRHASDLTTKAMALVALLKLSSRFPSCSERIKEIIVQFKGSFVLELQQRAIEFSSIISKHQNIRSTLVERMPVLDEATYIGRRAGSLPGAASTPTAPSFNLPNGVAKPVAPLVDLLDLSSDDAPAPSSSGGGDILQDLLGVDLSPASQQSVAGQASKSGNDVLLDLLSIGSPSAESSSSTVDILSSNSSNKAPVSSSLDGLSSLSLSTKTTSNAAPMMDLLDGFAPIPPTENNGPVYPSVTAFESSSLRLTFNFSKQPGNPQTTVIQATFMNLSSNTYTDFVFQAAVPKFLQLHLDPASSNTLPANGSITQSLKITNSQHGKKSLVMRIRIAYKINGKDTLEEGQVNNFPRGL

SEQ ID NO: 3603 - protein, 537 aa, Glycine max
  unsure (1)..(537): unsure at all Xaa locations
  Clone ID: PAT_MRT3847_112527C.1.pep
MYEKGQSDEKGHFSSIFMGSDKILPSHVVANGHAPLDSGHARLKELGYKQELKRDLSVISNFAFSFSIISVLTGVTTLYNTGLNYGGPVSLVYGWFLASAFTMLVAFSMAEICSSYPTSGGLYYWSAKLAGPRWAPFASWITGWFNIVGQWAVTTSVDYSLAQLIQVIILLSTGGKNGGGYEASKYVVIAFHGGILFLHGIINSLPISLLSFLGQLAAIWNVIGVFVLMIVIPSVATERASAKFVFTHFNTENGEGINSKPYIFLLGLLMSQYTLTGFDASAHMTDDTKDADRNGPKGIISSVGISIVVGWGXILGITFAVTDILYLLSEDNDAGGYAIAQVFXQAFKKRSVHGSGDIINXVIVAVVIFFCGMSYVNRNSNMASAPNRDGCMPLSSLWHKVNKQEVPIYAVWLSVFISFCMALTSLGSIVAFEAMVSIATIGLYIAYAFPIFLRVTLARKHFVSGPFNLGRYGVVVGWVAVLWVLTISVLFSLPVSYPITIKTLNYTPVAVGCLLILVVSYWLISGRRWFKGPITNI

SEQ ID NO: 3604 - protein, 444 aa, Glycine max
  Clone ID: PAT_MRT3847_112528C.1.pep
MATIVSIKARQIFDSRGNPTVEVDLTCSDGTFARAAVPSGASTGIYEALELRDGGSDYLGKGVSKAVDNVNTIIAPALVGKDPTQQTAIDNLMVQQLDGTVNEWGWCKQKLGANAILAVSLAVCKAGAAVLKVPLYKHIANIAGNKKLVLPVPAFNVINGGSHAGNKLAMQEFMVLPVGASSFKEAMKMGVEVYHNLKSVIKKKYGQDAVNVGDEGGFAPNIQENKEGLELLKTAIAKAGYTGKVVIGMDVAASEFYKEDKTYDLNFKEDNNDGSQKISGDALKDLYKSFVTEYPIVSIEDPFDQDDWEHYAKLTAEVGTNVQIVGDDLLVTNPKRVQKAIDTKACNALLLKVNQIGSVTESIEAVRMSKKAGWGVMASHRSGETEDTFIADLSVGLATGQIKTGAPCRSERLAKYNQLLRIEEELGAEAVYAGANFRTPVEPY

SEQ ID NO: 3605 - protein, 101 aa, Glycine max
  unsure (1)..(101): unsure at all Xaa locations
  Clone ID: PAT_MRT3847_113563C.1.pep
RALALSSRSFNRERDTVAAGARTPREEFAYMAKLAEQAERYEEMVEFMEKVSDCAESEELTVEERNLLLVAYKNVIGARRASXRIICCIEQKEESRGIEDH

SEQ ID NO: 3606 - protein, 125 aa, Glycine max
  Clone ID: PAT_MRT3847_114189C.1.pep
MENSTQESHFRSENSVSYESPYPIYGMSFSPSHPHRLALGSFIEEYTNRVDILSFHPDTLSLTPNPSRSFDHPYPPTKLMFHPRKPPSSSSDLLATSGDYLRLWEVRDNFGEAVSLFNNSKTSEF

SEQ ID NO: 3607 - protein, 85 aa, Glycine max
  unsure (1)..(85): unsure at all Xaa locations
  Clone ID: PAT_MRT3847_114269C.1.pep
SSRFGSRAFDEAIATLDTLDEESYKDXTLIMQLLRDNLTLWTSDMQDDGADEIKEAAPKPDDSKNILLLIRIELLLKIFLKGEVF

SEQ ID NO: 3608 - protein, 283 aa, Glycine max
  unsure (1)..(283): unsure at all Xaa locations
  Clone ID: PAT_MRT3847_114296C.1.pep
YLEIHLFWAGKGTCCIPTQGTYGPLIQAIHAIPDFIPTVSNKPPSSNNNNIGLIIRLELGVGVVSVLSIFAIFCIIRRRRRRDDEKELLGIDTKPYTFSYSELKNATNDFNLENKLGEGGFGPVYKGTLNDGRVIAVKQLSVGSHQGKSQFITEIATISAVQHRNLVKLYGCCIEGSKRLLVYEYLENKSLDQALFGKCLTLNWSTRYDICLGVARGLTYLHEESRLRIVHRDVKASNILLDYELIPKISDFGLAKLYDDKKTHISTGVAXTIGYLAPEYAMR

SEQ ID NO: 3609 - protein, 124 aa, Glycine max
  Clone ID: PAT_MRT3847_11449C.1.pep
MEDLKEKVNEGEPTQIKYRGVRRRPWGKFAAEIRDSARHGARVWLGTFNTAEEAARAYDRAAFEMRGATAILNFPDEHPPCNVTSLSKKSSSSNTEIGKQVVVFECLDDKLLEELLDCDGENHQ

SEQ ID NO: 3610 - protein, 139 aa, Glycine max
  Clone ID: PAT_MRT3847_114734C.1.pep
VGCSSLDGRNLLESSKIALDKGKLEDAVNYGTKALAKMMAVCGPFHQNTASAYSLLAVVLYHTGDFNQATIYQQKALDINERELGLDHPDTMKSYGDLSVFYYRLQHIELALNYVNRALFLLHFTCGLSHPNTAATYIN

SEQ ID NO: 3611 - protein, 78 aa, Glycine max
  Clone ID: PAT_MRT3847_115437C.1.pep
STMTPSMMPPIMMPSMIPPTMMQSMVSSMIMPNMMTVPQCYSDSISHIIQQQQLPFMFSRTLVAISPMFLQQPFVGAA

SEQ ID NO: 3612 - protein, 65 aa, Glycine max
  Clone ID: PAT_MRT3847_115982C.1.pep
FHDNPTAASRPYDKDRDGFVMGEGAGVVVLEELEHAKARGARIYAEVAGYGLSGDAYHITAPSED

SEQ ID NO: 3613 - protein, 127 aa, Glycine max
  Clone ID: PAT_MRT3847_116452C.1.pep
MSQGRGSASLPIVVTVVSLLCLLVLLERADAATYTVGGPGGWTFNTNAWPKGKRFRAGDILIFNYDSTTHNVVAVDRSGYNSCKTPGGAKVFSSGKDQIKLARGQNYFICNYPGHCESGMKVAINAV

SEQ ID NO: 3614 - protein, 147 aa, Glycine max
  unsure (1)..(147): unsure at all Xaa locations
  Clone ID: PAT_MRT3847_116633C.1.pep
MIQMNMKQPLVLPAHRGNVIGSRLASSPSPVAAAAAAASRRRGVVSSPRSRLQRHMRLPRISCSATEEASGAVSAVTVEKMLTVTASVQAAPAIGQMYXQRALDDAGDFFGKTLLMELVSSEVDAXTGLEKPPVTAFAHKTLREGHY

SEQ ID NO: 3615 - protein, 352 aa, Glycine max
  Clone ID: PAT_MRT3847_116966C.1.pep
MAPSFDFASSLLCTEDSTVFDESHNNGGTMMTAMGVYEDTRSPRRRHFDEEPDELPLLSDESLVMMVEKECQHWSGLRYLNKFQTGDLDFGARMEAIDWIHKVRSHFGFGPLCGYLSINYLDRFLFAYELPKGRVWTMQLLAVACLSLAAKLDETEVPLSLDLQVGESKFLFEAKTIQRMELLVLSTLKWRMQAITPFTFLDYFLCKINDDQSPLRSSIMRSIQLISSTARGIDFLEFKPSEIAAAVAMYVMGETQTVDTGKAISVLIQHVEKERLLKCVQMIQELSCNSGSAKDSSASVTCLPQSPIGVLDALCFNYKSDDTNASSCVNSSHNSPVAKRRKLNKTCGAEQL

SEQ ID NO: 3616 - protein, 114 aa, Glycine max
  Clone ID: PAT_MRT3847_117245C.1.pep
MPRDGAQAAPPPERGEMDEVVEADPDTEAEDQEERWARLLPELLSDVVRRVEASGGERWPARKDVVSCACVCRRWREAAVSVVRPPAESGKITFPSSLKQVDCMASLIWRHQRF

SEQ ID NO: 3617 - protein, 320 aa, Glycine max
  Clone ID: PAT_MRT3847_117585C.1.pep
MSDHLPREVLTEILSRLPVRSLLRFRSTSKSWKSLIDSQHLNWLHLTRSLTLASNTSLILRVDSDLYQTNFPTLDPPVSLNHPLMCYSNSITLLGSCNGLLCISNVADDIAFWNPSLRQHRILPYLPVPRRRHPDTTLFAARVCGFGFDHKTRDYKLVRISYFVDLHDRSFDSQLKLYTLRANAWKTLPSLPYALCCARTMGVFVGNSLHWVVTRKLEPDQPDLIIAFDLTHDIFRELPLPDTGGVDGGFEIDLALLGGSLCMTVNFHKTRIDVWVMREYNRRDSWCKVFTLDESREMRSWKCVRPLGYSSDGNKVLLEH

SEQ ID NO: 3618 - protein, 45 aa, Glycine max
  unsure (1)..(45): unsure at all Xaa locations
  Clone ID: PAT_MRT3847_117614C.1.pep
HGSXAISXFPCLSPCLXAKHXXHXPXSYXTNGFXHCXXPLCYXLC

SEQ ID NO: 3619 - protein, 109 aa, Glycine max
  Clone ID: PAT_MRT3847_117866C.1.pep
MAGRGKAGGSAAAKKATSRSSKAGLQFPVGRIARFLKAGKYAERVGAGAPVYLAAVLEYLAAEVLELAGNAARDNKKTRIVPRHIQLAVRNDEELSKLLGMVTIANGGV

SEQ ID NO: 3620 - protein, 55 aa, Glycine max
  unsure (1)..(55): unsure at all Xaa locations
  Clone ID: PAT_MRT3847_118323C.1.pep
XGHKLRXXXTDTPMRTITTEXGISTQSXIAVSSTRXXAIALXPSFRAAXSDSVSL

SEQ ID NO: 3621 - protein, 64 aa, Glycine max
  Clone ID: PAT_MRT3847_118387C.1.pep
RHYSIRRGYKGLPSIGDYILPPPCECDQRLQNELHNCRGCKLTIHRYILVWLWIRPANIANIQT

SEQ ID NO: 3622 - protein, 73 aa, Glycine max
  unsure (1)..(73): unsure at all Xaa locations
  Clone ID: PAT_MRT3847_118549C.1.pep
MASXXKHYDDQGRXVDEYXNVXXXTXXYGNPVHAASVTYVXTRXAAGGYXDDINXQHDTXXAXGXDTGRQHSS

SEQ ID NO: 3623 - protein, 142 aa, Glycine max
  Clone ID: PAT_MRT3847_118762C.1.pep
TKLERGSRNHVRYEDENSRYLCIGSVEKVLCLIARWVEDPNSEAYKLHLARIPDYFWLAEDGLKIQSFGCQMWDAAFAIQAILACNVSEEYGPTLRKAHSFVKASQVRENPSGDFKAMYTHISKGSWTFSMHDHGWQVSDCT

SEQ ID NO: 3624 - protein, 503 aa, Glycine max
  Clone ID: PAT_MRT3847_119165C.1.pep
MSSTTQNRRSSFTPSTASSLAKAKRHPSSVSSSSSGKAKVVSTQNLAVKRAPLANLTNQRNAPYSSSSSSLVQGSNKVAKTKKEAPARTSVSKSTISGNKSSQLKSVNSSSVVIPKANSLSQKKDAAPTVATFAVPVRSGIDVSPSKSDGRFVSMDETTSSCDSIKSPDEVEYLDNRDVSDVDSIQKKIISNLNISDTTEPEGNVCSREIIVELEERVDKIVNIDNIYSDTQLCATYVCDIYKHLRESEEKKRPSTDFMDTIQKDINVSMRAILVDWLVEVAEEYRLVPETLYLTVNYLDRYLSGNAMNRQRLQLLGVSCMMIASKYEEICAPQVEEFCYITDNTYLKEEVLQMESAVLNYLKFEMTAPTVKCFLRRFVRAAAHDVQEIPSLQLEYLTNFIAELSLLEYSMLSYPPSLIAASVIFLARFILFPSKKPWNSTLQHYTLYRPSDLCACVKDLHRLCCSSHDSNLPAIRDKYSQHKYKCVAKKHIPPSIPQEVFQS

SEQ ID NO: 3625 - protein, 75 aa, Glycine max
  Clone ID: PAT_MRT3847_119722C.1.pep
MPYISVPKRYYLPTPYAFQKIWRRSSILISKKIFLLDILNRCVYFKFICSIILHVRGPKGEVFTKDSTLIMQLLT

SEQ ID NO: 3626 - protein, 184 aa, Glycine max
  Clone ID: PAT_MRT3847_12032C.1.pep
MTSLNLTLLTSVNPDDFRCPISLELMTDPVTVSTGQTYDRASIQKWLKAGNTKCPKTGEKLTNTDLVPNTTLKRLIQQFCADNGISVANSCNRKTNTVSAGSPAAAHAIQFLAWFLTRRLAFGTQDQKHKAAQEIRFLARTSIFNRACLIEMGTVPPLIELLASASNDNKSTQETTISALLKLS

SEQ ID NO: 3627 - protein, 329 aa, Glycine max
  Clone ID: PAT_MRT3847_120799C.1.pep
MATFEQFWSRKTLLGLALGQFLSLLITSTGFTSSLLAKKGINAPTSQSFLNYVFLAIVYGIIVLYRREALKAKWYYYILLGLVDVEANFLVVKAYQYTSLTSVMLLDCWSIPCVMLFTWIFLKTKYGFKKVTGVVVCIAGLVLVVFSDVHAGDRAGGSNPSIGDILVIAGATLYAVSNVSEEFLVKNADRVELMAMLGLFGGIISAIQISILERNELKSIHWSAGAVLPFVGFAVAMFMFYSLVPVLLKINGSTMLNLSLLTSDMWAVLIRIFAYHEKVDWMYYVAFGAVVVGLIIYSGGDGDENQDPHHVAEDASQRQHDEEATSGKS

SEQ ID NO: 3628 - protein, 159 aa, Glycine max
  unsure (1)..(159): unsure at all Xaa locations
  Clone ID: PAT_MRT3847_120904C.1.pep
MTAHAGLFEVGSPKKGDTVYDTPASGAVGQLLGQYAKSTGRNVVGSAGRKEKVDLLKNKXXLDESDNYKEEPDLNTPSKRYFPEGIDLNSENVAGKTLDAVLPNMKFHGRIPVCGLISQDNLTQSDGVTNMANLICKRVYMDGLIATDLYHLYPIFLKL

SEQ ID NO: 3629 - protein, 227 aa, Glycine max
  unsure (1)..(227): unsure at all Xaa locations
  Clone ID: PAT_MRT3847_121346C.1.pep
VRTSRVDPRVRKAPVSGGALGGGRMVEXTHSSVAVLDTAAGVWCDIKSVVTSSRTGRYSADAAGGDAAVELTRRCRHAAAAVGDLIFIYGGLRGGVLLDDLLVAEDLAAAETTAAASHAAAAAAASASNVQAGRLPGRYGFADDRTRETMPEAAADGSVVLGNPVAPPMNGDIYTDISTENAMLQGPRRTAKGVEYLVEASAAEAEAISAALAAAKARQETGEVELP

SEQ ID NO: 3630 - protein, 159 aa, Glycine max
  Clone ID: PAT_MRT3847_121950C.1.pep
ETARTREGAIAKDTTETELTKIPLLRATVETLHPSSKEEDDFMIRRFLRARDLDVEKASAMFLKYLKWRHEFVPNGSVSVSDVPIELAQDKVFMQGRDKIGRPILIVFGRRHFQNKDGLDEFKRFVVYVLDKVCASMPPGQEKFVGIAELKGWGYSNSD

SEQ ID NO: 3631 - protein, 256 aa, Glycine max
  Clone ID: PAT_MRT3847_121951C.1.pep
MEAVRAGREGAIGLGQGDGVAKDSTETELTKIRLLRAIVETRDPSSKEEDDFMIRRFLRARDLDVEKASAMLLKYLKWRNSFVPNGSVSVSDVPNELAQDKVFMQGHDKIGRPILMVFGGRHFQNKDGLDEFKRFVVYVLDKVCASMPPGQEKFVGIAELKGWGYSNSDVRGYLSALSILQDYYPERLGKLFIVNAPYIFMKVWQIVYPFIDNKTKKKIVFVEKNKVKSTLLEEMEESQVPEIFGGSLPLVPIQDS

SEQ ID NO: 3632 - protein, 294 aa, Glycine max
  Clone ID: PAT_MRT3847_12197C.1.pep
MEQYEKVEKIGEGTYGVVYKGRDRVTNETIALKKIRLEQEDEGVPSTAIREISLLKEMQHRNIVRLQDVVHDEKSLYLVFEYLDLDLKKHMDSSPEFAKDPRQVKMFLYQILCGIAYCHSHRVLHRDLKPQNLLIDRSTNALKLADFGLARAFGIPVRTFTHEVVTLWYRAPEILLGSRQYSTPVDIWSVGCIFAEMVNQRPLFPGDSEIDELFKIFRIMGTPNEDTWPGVTSLPDFKSAFPKWQPKDLKIVVPNLKPAGLDLLSSMLYLDPSKRITARSALEHEYFKDIKFVP

SEQ ID NO: 3633 - protein, 420 aa, Glycine max
  Clone ID: PAT_MRT3847_122017C.1.pep
MDKDKSLGLPPPSGRYSGYSSTGSVFNVKSEPSPSSSTTLYPPLAPGTTSSESSHFGHGLSTDSSGFSHDISRMPDNPPRNRGHRRAHSEILTLPDDISFDSDLGVVGGGDGPSFSDDAEEDLLSMYLDMDKFNSSSATSTFQHSQSMDGSTTIKPESPAGAPTSSTENVVIGAIERPRVAHQHMIAIDGANRIWPEMLVAASEDMSAADSKKAMSAAKLAELALIDPKRAKRIWANRQSAARSKERKMRYIAELERKVQTLQTEATSLSAQLTLLQRDTNGLNSENNELKLRLQTMEQQVHLQDALNDALKEEIQHLKILTGQAMPPNGGPMMNFASFGGGQQFYPNNHAMHTLLAAQQFQQLQIHPQKQQQHQFQQLQQQQREQHQQSIDLKMREATPTPCPKDNASSDVNPSGAKDC

SEQ ID NO: 3634 - protein, 244 aa, Glycine max
  Clone ID: PAT_MRT3847_122018C.1.pep
HSQSMDGSTTIKPELLVSGSEDMSAADSKKAISAAKLAELALIDPKRAKRIWANRQSAARSKERKMRYIAELERKVQTLQTEATSLSAQLTLLQRDTNGLNSENSELKLRLQTMEQQVHLQDALNDALKEEIQHLKILTGQVMAPNGGPMMKLASFGGGQQFYPNNHVMHTLLAAQQFQQLQIHPQKQQQQQHQHQFQQFQQQHQHQHQQHQQSSDLKMRETSPTPCPKDNTSSDVNPSGAKDC

SEQ ID NO: 3635 - protein, 476 aa, Glycine max
  Clone ID: PAT_MRT3847_122890C.1.pep
MGGGFRVLHLVRPFLSFLPEVQTADRKVPFREKVIYTVISLFIFLVCSQLPLYGIHSTTGADPFYWMRVILASNRGTVMELGITPIVTSGLVMQLLAGSKIIEVDNNVREDRALLNGAQKLLGILIAVGEAVAYVLSGMYGSVGQLGVGNAILIIIQLCFAGIIVICLDELLQKGYGLGSGISLFIATNICENIIWKAFSPTTINSGRGAEFEGAVIALFHLLITRTDKVRALREAFYRQNLPNVTNLLATVLIFLIVIYFQGFRVVLPVRSKNARGQQGSYPIKLFYTSNMPIILQSALVSNLYFISQLLHRKYSGNFFVDLLGKWKESEYGGGQSVPVGGIAYYITAPSSLADMAANPFHALFYLVFMLSACALFSKTWIEVSGSSAKDVAKQLKEQQMVMPGHRESNLQKELNRYIPTAAAFGGICIGALTVLADFMGAIGSGTGILLAVTIIYQYFETFEKERASELGFFGF

SEQ ID NO: 3636 - protein, 39 aa, Glycine max
  Clone ID: PAT_MRT3847_123247C.1.pep
SPLIMQLFCDNLTLWASDMQEDGANEIKKAAPKGGGGQN

SEQ ID NO: 3637 - protein, 167 aa, Glycine max
  Clone ID: PAT_MRT3847_123814C.1.pep
MVLSKTTSESDVSVHSTFASRYVRTSLPRFKMPEESIPKEAAYQIINDELMLDGNPRLNLASFVTTWMEPECDKLIMAAINKNYVDMDEYPVTTELQNRCVNMIAHLFNAPLEETETAVGVGTVGSSEAIMLAGLAFKRRWQNRRKLEGKPYDNPNIVTGANVQVCW

SEQ ID NO: 3638 - protein, 271 aa, Glycine max
  Clone ID: PAT_MRT3847_124335C.1.pep
MANPEGSSRGSRWSLKGTTALVTGGTRGIGHAVVEELAEFGATVYTCSRNEEELNACLKEWKEKGFSVSGLVCDASSPPHRENLIQQVASAFNGKLNILVNNVGTNVRKPTIEYTAEEYSKLMATNLDSTYHLCQLAYPLLKASGNGSIVSISSVASQTSVGSGAIYAATKAAIDQLTKYFACEWAKDNIRSNGVAPWYTITSLVEPLLANKQLVSEIISRTPIKRMAETHEVSSLVTFLCLPAASYITGQIVSVDGGFTANGFQPSMRIS

SEQ ID NO: 3639 - protein, 267 aa, Glycine max
  Clone ID: PAT_MRT3847_124426C.1.pep
MREEGSGYDSTPFLDTQYAECHVERTGTVWTAVAHIVTGVIGSGVLSLAWSIAQLGWIGGPLTIVFFAAITLLSSFLLSNTYRSPDPELGPHRSSSYLDAVNLHKGEGNSRFCAVFVNVSLYGFGIAYVITAAISMRAIQKSNCSQDNGNEVTCGFGDGYFMLIFGAMQVLLSQIPNFHNIQWLSILAAIMSFAYAFIGMGLSVGQVTENGHAEGSIEGIPTSSGIEKLWLVAQALDDIAFSYPFSVILIEIRDTLKCPPPEDVAMK

SEQ ID NO: 3640 - protein, 580 aa, Glycine max
  Clone ID: PAT_MRT3847_124570C.1.pep
MATPNPTRFSLAMERTGQWVFSPEIPTDVIVAVGQTNFSLHKFILAAKSNYVRKVIMESEESDLTRIEISDIPGGSEAFEKAAKFCYGVNFEITVHNVAALHCAAVFLQMTDEYCDGNLAGRTEDFLSQVGLSTLHSAVAVLKSCQKILPFAAEVNVVDRCVEVISCKACNEANFPSQSPPNWWTEELAVLDVDSFAKVITAMKQRGAKYLTVAGALITYTERALRELVRDQTGGGKGIRSPESGDSDSESKRSEQRELLQAIVPLFPTEKAAFPINFLCCLLRCAIYLRASSACKRELEKRVTEILEHVTVDDLLVLTFSYDGERLLDLDSVRRIISGFVEREKGTTVFNAGVNFNEDFSAAMQRVAKTVDSYLAEIAAYAELSISKFNGIAILIPKGARKSDDDLYRAVDIYLKVHPNLDEIEKEKVCSVLDTLKLSYEARVHASKNKRLPLQIVLHALYYDQLQIRSGTAADKQAVVAAAEKKQLQADVSLVRENEELRSELMKMKMFISDLQKNVHGTSSSGRENIGPTKKPTFFSSMSKKLSKLNPFKNGSKDTSHIDDAPVDLTKPRKRRFSIS

SEQ ID NO: 3641 - protein, 213 aa, Glycine max
  Clone ID: PAT_MRT3847_124754C.1.pep
LSKVPEGVDNNRGNVYIGSTSPTNVARAYYEQFQRDFSLFLKCRAEELVKGGRMVLTFLGRRSDDPSSKDGGYVWELMATALNDMVLQGIIKEEQLDTFNIPLYTPSPSEVKLEVLKEGSFASNRLEVSEVNWNAFDDWNALEFESERSDTLSDGGYNVAQCMRAVAEPMLVSHFGEAIIEEVFSRYQQILTDRMSKEQTKFINVTVLLTRKA

SEQ ID NO: 3642 - protein, 623 aa, Glycine max
  Clone ID: PAT_MRT3847_124919C.1.pep
MPAVYGARLTTFEDSEKESEYGYVRKVSGPVVVADGMAGAAMYELVRVGHDNLIGEIIRLEGNSATIQVYEETAGLMVNDPVLRTHKPLSVELGPGILGNIFDGIQRPLKTIAKRSGDVYIPRGVSVPALDKDTLWEFQPKKIGEGDLLTGGDLYATVFENSLMQHHIALPPDNMGKITYIAPPGQYSIKDTVLELEFQGVKKKFTMLQTWPVRTPRPVASKLAADTPLLTGQRVLDALFPSVLGGTCAIPGAFGCGKTVISQALSKYSNSDAVVYVGCGERGNEMAEVLMDFPQLTMTLPDGREESVMKRTTLVANTSNMPVAAREASIYTGITLAEYFRDMGYNVSMMADSTSRWAEALREISGRLAEMPADSGYPAYLAARLASFYERAGKVKCLGGPERTGSVTIVGAVSPPGGDFSDPVTSATLSIVQVFWGLDKKLAQRKHFPSVNWLISYSKYSTALETFYEQFDPDFINIRTKAREVLQREDDLNEIVQLVGKDALAEGDKITLETAKLLREDYLAQNAFTPYDKFCPFYKSVWMMRNIIHFYNLANQAVERGAGSDGQKISYTLIKHRMGDLFYRLVSQKFEDPAEGEAALVAKFQKLHEDLTNGFRNLEDETR

SEQ ID NO: 3643 - protein, 85 aa, Glycine max
  unsure (1)..(85): unsure at all Xaa locations
  Clone ID: PAT_MRT3847_125358C.1.pep
AIRREHKHSDDQGRKVDKYDNITKQANEYGNPIHPASVTXMYPTKPPTGSYSDDINKQHDTTNAYDVDTRKQHSSGSYDGDTNKH

SEQ ID NO: 3644 - protein, 39 aa, Glycine max
  Clone ID: PAT_MRT3847_125661C.1.pep
LDTLGKESTKDTLLIMHLLCYTLTLWTSEMQDDGADEIK

SEQ ID NO: 3645 - protein, 299 aa, Glycine max
  unsure (1)..(299): unsure at all Xaa locations
  Clone ID: PAT_MRT3847_125727C.1.pep
MNRGIEVLSPASYLQNSNWLFQESKEARWTAEENKLFENALAYYDKDTPDRWMRVAAMIPGKTVGDVIKQYRELEEDVSVIEAGLIPVPGYTTASSFTLEWVNNQGYDEFKQFCNVGAKRGASTRPTEQERKKGVPWTEEEHRQFLLGLKKYGKGDWRNISRNFVTTRTPTQVASHAQKYFIRQLTGGKDKRRSSIHDITMVNLQETKSPSSDTTKPSSPLQNQALSSMVKEEYEWKLPCEGMPIVFNSTSGNMFMSAPLHGISSYESRPQEQNLLRXLHGCQFSPCDAILQMQLMRHR

SEQ ID NO: 3646 - protein, 305 aa, Glycine max
  Clone ID: PAT_MRT3847_126514C.1.pep
PRVRDKKDEEGKVEDVDEKEEKEKKKKKIKEVSHEWQLVNKQKPIWMRKPEDITKEEYAAFYKSLTNDWEEHLAVKHFSVEGQLEFKAVLFVPKRAPFDLFDTRKKPNNIKLYVRRVFIMDNCEELIPEWLSFVKGIVDSEDLPLNISREMLQQNKILKVIRKNLVKKCIEMFFEIAENKEDYNKFYEAFSKNLKLGIHEDSQNKTKLAELLRYHSTKSGDEMTSLKDYVTRMKEGQNDIYYITGESKKAVENSPFLEKLKKKGFEVLYMVDAIDEYAVGQLKEFEGKKLVSATKEGLKLDESEA

SEQ ID NO: 3647 - protein, 627 aa, Glycine max
  Clone ID: PAT_MRT3847_126516C.1.pep
MASETETFAFQAEINQLLSLIINTFYSNKEIFLRELISNASDALDKIRFESLTDKSKLDAQPELFIHIIPDKTNNTLSIIDSGIGMTKADLVNNLGTIARSGTKEFMEALAAGADVSMIGQFGVGFYSAYLVADKVIVTTKHNDDEQYVWESHAGGSFTVTRDTSGENLGRGTKITLFLKEDQLEYLEERRLKDLIKKHSEFISYPISLWIEKTTEKEISDDEDEEEKKDEEGKVEDVDEDKEKEEKKKKTIKEVSHEWSLVNKQKPIWMRKPEEITKEEYAAFYKSLTNDWEEHLAVKHFSVEGQLEFKAVLFIPKRAPFDLFDTKKKPNNIKLYVRRVFIMDNCEELMPEYLSFVKGIVDSEDLPLNISREMLQQNKILKVIRKNLVKKCIEMFFEIAENKEDYNKFYEAFSKNLKLGIHEDSQNKTKLAELLRYHSTKSGDEMTSLKDYVTRMKEGQNDIYYITGESKKAVENSPFLEKLKKKGFEVLYMVDAIDEYAVGQLKEFEGKKLVSATKEGLKLDESEDEKKKKEELKEKFEGLCHVIKDVLGDKVEKVVVSDRVVDSPCCLVTGEYGWTANMERIMKAQALRDSSMAGYMSSQKTMEINPENPIMDDLMKRADADKK

SEQ ID NO: 3648 - protein, 665 aa, Glycine max
  Clone ID: PAT_MRT3847_126518C.1.pep
MASETETFAFQAEINQLLSLIINTFYSNKEIFLRELISNASDALDKIRFESLTDKSKLDAQPELFIHIIPDKTNNTLSIIDSGIGMTKADLVNNLGTIARSGTKEFMEALAAGADVSMIGQFGVGFYSAYLVADKVIVTTKHNDDEQYVWESHAGGSFTVTRDTSGENLGRGTKITLFLKEDQLEYLEERRLKDLIKKHSEFISYPISLWIEKTTEKEISDDEDEEEKKDEEGKVEDVDEDKEKEEKKKKTIKEVSHEWSLVNKQKPIWMRKPEEITKEEYAAFYKSLTNDWEEHLAVKHFSVEGQLEFKAVLFIPKRAPFDLFDTRKKPNNIKLYVRRVFIMDNCEELMPEYLSFVKGIVDSEDLPLNISREMLQQNKILKVIRKNLVKKCIEMFFEIAENKEDYNKFYEAFSKNLKLGIHEDSQNKTKLAELLRYHSTKSGDEMTSLKDYVTRMKEGQNDIYYITGESKKAVENSPFLEKLKKKGYEVLYMVDAIDEYAVGQLKEFEGKKLVSATKEGLKLDESEDEKKKQEELKDKFEGLCHVIKDVLGDKVEKVVVSDRVVDSPCCLVTGEYGWTANMERIMKAQALRDSSMAGYMSSKKTMEINPENPIMEELRKRADADKNDKSVKDLVLLLFETALLTSGFSLDDPNTFGYRIHRMLK

SEQ ID NO: 3649 - protein, 511 aa, Glycine max
  Clone ID: PAT_MRT3847_126530C.1.pep
MEAPSLTKPNDPTKPSNTSSTLSLEGGPGEASPLRKMFAVASIAAGIQFGWALQLSLLTPYVQLLGVPHAAASFIWLCGPISGLVVQPIVGYYSDHCTSRFGRRRPFILGGALAVAIAVFLIGYAADIGHSAGDDITKKTRPRAVGVFVIGFWILDVANNMLQGPCRAFLADLAAGDQQKTRIANGFFSFFMAVGNVLGYAAGSYSGLHKIFPFTETKACDVFCANLKSCFFFSILLLLFLATVALLYVKDKQVEAIPLDDATQPSCFFQLFGALKELKRPMWMLMLVTAVNWVGWFPYFFFDTDWMGREVYGGQVGEDAYANGVRVGSLGLMVNAVVLGFMSLAVEPLGKMVGGVKRLWAIVNFILAIGFGMTVVITKVAEHQRKMNPAAVGHPSEGVVVGSMVFFGVLGVPLAITFSVPFALASIYCSASGAGQGLSLGVLNLAIVVPQMVVSALSGPWDSLFGGGNLPAFMVGAAAAALSAIMAIVLLPTPKPADEAKASSMMAGGFH

SEQ ID NO: 3650 - protein, 636 aa, Glycine max
  Clone ID: PAT_MRT3847_127203C.1.pep
MMESCDCIDTQYPPDELLVKYQYISDVLIALAYFSIPVELIYFVQKSAFFPYRWVLMQFGAFIVLCGATHFINLWTFSPHSKSVAVVMTIAKVSCAIVSCATALMLVHIIPDLLSVKRRESILKNKAEELDREMGLILTQEETGRHVRMLTHEIRSTLDRHTILKTTLVELGRTLGLEECALWMPSRSGLNLQLSHTLTYHVQVGSTVQTNNPIVNEVFNSPQAMRIPPTCPLARIRPLVGRYVPPEVVAVRVPLLNLSNFQINDWPDISAKSYAIMVLILPTDSVRKWRDHELELVDVVADQVAVALSHAAILEESMRARDQFMEQNVALDLARREAEMAIHARNDFLAVMNHEMRTPMHAIIALSSLLLETELTPEQRVMIETVLKSSNVLATLINDVLDLSRLEDGSLELEMGKFNLHGVLGEIVELIKPIASVKKLPITLILSPDLPTHAIGDEKRLTQTLLNVVGNAVKFTKEGYVSVRVSVAKPESSQDWRPPEFYPASSDGHFYIRVQVKDSGCGILPQDIPHLFTKFAQSRSGPARPSSGAGLGLAICKRFVNLMGGHIWIESEGLDKGSTATFIVKLGICGNPDPSDHQAANRSQAYSGSGGLARFKPFITDENDTGFSTRRNQRSF

SEQ ID NO: 3651 - protein, 173 aa, Glycine max
  Clone ID: PAT_MRT3847_127234C.1.pep
MKVAQVLHMNGGVGHASYANNSLLQQKVICLTKPIREEAITSLYCNTVPRSLAVADLGCSSGPNTLLVVSEFIKIVEKLCRELNHKSPEYKVFLNDLPGNDFNNIFKSLDSFKKKLCDEMESGIGPCYFSGVPGSFYGRVFPNQSLHFVHSSYSLHWLSKVPEGVDNNRAMLH

SEQ ID NO: 3652 - protein, 67 aa, Glycine max
  unsure (1)..(67): unsure at all Xaa locations
  Clone ID: PAT_MRT3847_127507C.1.pep
MAXAXXXXEXFVYMAXXAXXAERXXEMVXFMXKVXASAESEEXTVEEXNXLXVAYXNXIGXRXASWR

SEQ ID NO: 3653 - protein, 279 aa, Glycine max
  Clone ID: PAT_MRT3847_127582C.1.pep
MRVGSTANCCYLQLEAPQQNNVTESSSDMSDRMIKIQIANHPLYPDLLSAYIECQKVGAPPELACLLEEIGRESHRMNARREIVEGPELDHFMETFCEVLHRYKEELSRPFNEATLFLGDMESQLSNLCNGTLTKSSDNNNRSDEVASGASEEELSCGEMEAFEDHVSSSVTCPSDQRLKEMLLRKYSGHFSGLRKEFLKRRKKGKLPKDARIALMDWWNTHYRWPYPTEEEKVKLSEITGLDQKQINNWFINQRKRHWKPTDDMRSAVMDGIRGPMLF

SEQ ID NO: 3654 - protein, 311 aa, Glycine max
  Clone ID: PAT_MRT3847_127587C.1.pep
MEAVYRLKPLLDVVRVGNATTSEMRLDSTANCYLQLEAPQPQENNNVTDSSSDMSDRIIKIQIANHPLYPDLLSAYIECQKVGAPPELACLLEEIGRESHRMNARREIGEGPELDHFMETFCQVLHRYKEELSRPFNEATLFLGDMESQLSNLCNETLTKSSDNNNRSDEVASGASEEELSCGEMEAFEDNVSSVTCPSDQRLKEMLLRKYSGHFSGLRKEFLKRRKKGKLPKDARMALMGWWNTHHRWPYPTEEEKVKLSEITGLDQKQINNWFINQRKRHWKPTEDMRFAVMDGLRGGGGGGIGGPMLF

SEQ ID NO: 3655 - protein, 80 aa, Glycine max
  Clone ID: PAT_MRT3847_127714C.1.pep
PLERPPFYFFFFFFFFWSHTSHRSHLLLNTIIHACRENEASTGTRLSRRSPTPTTSSPSVSHSHSPQASSYQGPERDSLL

SEQ ID NO: 3656 - protein, 512 aa, Glycine max
  Clone ID: PAT_MRT3847_127767C.1.pep
MAPFPLMCFVILLLSSTVSVTATATQTTLTVGKLDQVPHIMCKECELPPPPPKECPPPPIPLAPPPPLPPSPSPPLPPSPPPPLPPSPSATLPAPIPLTHSLPKLIQVANPSSFNSSLATTAVLPLAAFFKSDFRELAMGIERGGFKGFRSAWSVPPKPCDSCKLASAALFCRPDSAFLCIACDSNIHCSNKLASRHERVWMCEVCEQAPAAVTCKADAAALCVTCDSDIHSANPLAQRHERVPVEPFFDSAESIVKASAAATFGFIVPSDDGGASDAFAPDDSDAAAWLIPNPNFGSKLMDAPEIKSKEIFFSEMDPFLDFDYSNSFQNHNSAGNDSVVPVQKPSLAPPLINNHHHHQSETCFDVDFCRSKLSSFNYPSNSLSQSVSSSSLDVGVVPDGNTVSDMSYSFGRNSSDSSGIVVVSGNSVGQGATQLCGMDREARVLRYREKRKNRKFEKTIRYASRKAYAETRPRIKGRFAKRTEIDSDVERLYSPGPAVLMLDTPYGVVPSF

SEQ ID NO: 3657 - protein, 203 aa, Glycine max
  unsure (1)..(203): unsure at all Xaa locations
  Clone ID: PAT_MRT3847_128170C.1.pep
KMNTIKLYVRRVFIMDNCEELIPEYXLGFVKGVVDSDDLPLNISRELLQQNKILKVIRKNLVKKCIEMFNEIAENKEDYNKFYDAFSKNLKLGIHEDSQNRSKLADLLRYHSTKSGDELTSLKDYVTRMKEGQKDIYYITGESKKAVENSPFLERLKKKGYEVLFMVDAIDEYAVGQLKEYDGKKLVSATKEGLKLDDETEEE

SEQ ID NO: 3658 - protein, 86 aa, Glycine max
  Clone ID: PAT_MRT3847_128189C.1.pep
ETLGGIFTRLINRNTTIPTKKSQVFSTAADNQTQVGIKVLQGEREMAVDNKSLGEFELVGIPPAPRGMPQIEVTFDIDANGIVTVS

SEQ ID NO: 3659 - protein, 145 aa, Glycine max
  Clone ID: PAT_MRT3847_12866C.1.pep
MPVPLAPYPTPPAPYTPPANGVQSQLVCSGCRNLLVFPVGATSVCCAVCNAVTAVPPPGTEMAQLVCGGCHTLLMYIRGATSVQCSCCHTVNLALEANQVAHVNCGNCRMLLAYQYGARSVKCAVCNFVTSVGATASTTEQKFST

SEQ ID NO: 3660 - protein, 96 aa, Glycine max
  unsure (1)..(96): unsure at all Xaa locations
  Clone ID: PAT_MRT3847_128763C.1.pep
ASSHHLPLPSAPSKSQFFGLSLSHSSLSILPASSSSLMCAIFAIVPKGSEPPNFTLIAXNGKSVSLANFSSTPVCVYFYPADETPGCSIQACAFRD

SEQ ID NO: 3661 - protein, 90 aa, Glycine max
  unsure (1)..(90): unsure at all Xaa locations
  Clone ID: PAT_MRT3847_129210C.1.pep
DXXGNPVHAAXVTXXATRTAAGGXSDDIXXQHXTTNAYGVDTGRXXSSGGYDGDTXXXXGTXGGXXDDXXRHXGTTGVYGXDTDRQXRGT

SEQ ID NO: 3662 - protein, 203 aa, Glycine max
  Clone ID: PAT_MRT3847_129723C.1.pep
LQTVNLRSSEILDHPHTQICNEGRQNALSEILEILTVVCETHNLPLAQTWIPCKHRSVLAQGGGVKKSCSSFDGRCMGKVCMSTTDIAFYIIDAHLWGFREACVEHHLQQGQGVAGRAFLSHGMCFCSNITQFYKTDYPLVHYALMFGLTTCFAICLRSSHTGNDDYVLEFFLPPRITHIHEQKTLLGSILAIMTQHFQSLHI

SEQ ID NO: 3663 - protein, 132 aa, Glycine max
  unsure (1)..(132): unsure at all Xaa locations
  Clone ID: PAT_MRT3847_1298C.1.pep
IPTKPVQEVIAEMPNGGVDRAXECTGSIQASISAFECTHDGWGTAVLVSVPKKDAEFKTHPMKFMEGRTLKGTFYGHYRPRTDIPGVVEKYLNKELELDKFITHSVPFSEINTAFDLMLKGEGIRCLICMEE

SEQ ID NO: 3664 - protein, 379 aa, Glycine max
  Clone ID: PAT_MRT3847_1301C.1.pep
MSTAGQVIKCRAAVAWEAGKPLSIETIEVAPPQKGEVRLRILFNSLCRSDVYWWDAKDQTPLFPRILGHEASGIVESVGEGVTHLKPGDHALPIFTGECGECTYCKSEESNLCELLRINTDRGVMLSDGKTRFSKNGQPIYHFVGTSTFSEYTVLHEGCVAKINPNAPLDKVAIVSCGFCTGFGATVNVAKPKPNNTVAVFGLGAVGLAACEGARVSGASRIIGVDLLPNRFEQAKKFGVTDFVNPKDHNKPVQEVIAEMTNGGVDRAIECTGSIQASISAFECTHDGWGTAVLVGVPKKDVEFKTNPMKFMEGRTLKGTFYGHYRPRTDIPGVVEKYLNKELELDKFITHSVPFSKINTAFDLMLKGEGIRCLICMEE

SEQ ID NO: 3665 - protein, 343 aa, Glycine max
  Clone ID: PAT_MRT3847_13029C.1.pep
MAEVRNKQVVLRDYVSGFPKESDMNIVEGTTILKLPQGSNDVLLKNLYLSCDPYMRMLMTKVEGLDVFGTYTPGSPLTGYGVSKVLESGHPDYKKGDLVWGSTKWEEFSLVSPTQILFKIEHTDVPLSYYTGILGMPGMTAYAGFFEVGSPKKGENVFVSAASGAVGQLVGQFAKLTDCYVVGSAGSKEKVDLLKNKLGFDEAFNYKEESDLNATLKRYFPEGIDIYFENVGGKTLDAVLPNMKFHGRIPVCGMISQYNLTQFDGVTNLANLIFKRVKMEGFIATDFYHLYPKFLEFVLPHIRKGKVVYVEDIAEGLEKGPAALVGLYTGRNVGKQVVVVTHE

SEQ ID NO: 3666 - protein, 40 aa, Glycine max
  Clone ID: PAT_MRT3847_130881C.1.pep
GFLGKLNFSLKPKSAFSTVISSKTGRLSYEGDVERYCKKS

SEQ ID NO: 3667 - protein, 620 aa, Glycine max
  Clone ID: PAT_MRT3847_131458C.1.pep
MAVTKEKEDVRNTGKRLKCMRNEEEEVYEEEESELPLKPGFFFYPTTPTSFVVSDALEPDFPIIYVNKVFEISTGYRADEALGRNCRFLQYRDPRAQRRHPLVDPVVVSEIRRCLEEGVEFQGELLNFRKDGTPLVNRLRLAPIHDDDGTVTHVIGIQLFSEANIDLNRVSYPVFKETCNQDFDKTGKYNPKSGQSLYSQHQEMCGILQLSDEVLAHNILSRLTPRDVASIGSVCRRIRQLTKNEHVRKMVCQNAWGKEVTGTLELMTKKLGWGRLTRELTTLEAVCWRKLTVGGAVEPSRCNFSACAAGNRLVLFGGEGVDMQPMDDTFVLNLDAKNPEWRRVSVKSSPPGRWGHTLSCLNGSWLVVFGGCGRQGLLNDVFVLDLDAQQPTWREVCGGTPPLPRSWHSSCTIEGSKLVVSGGCTDAGVLLSDTYLLDLTTDNPTWREIPTSWAPPSRLGHSLSVYGRTKILMFGGLAKSGHLRLRSGEAYTIDLEDEQPQWRQLEYSAFTGLASQSAVVPPPRLDHVAVSMPCGRIIIFGGSIAGLHSPSQLFLLDPSEEKPSWRILNVPGQPPKFAWGHSTCVVGGTRVLVLGGHTGEEWILNELHELCLASRQDSDL

SEQ ID NO: 3668 - protein, 509 aa, Glycine max
  Clone ID: PAT_MRT3847_131774C.1.pep
MCSKPSFFPAMTKIVGTLGPKSRSVDVISQCLEAGMSVARFDFSWGDPEYHQETLENLRAAIKSTKKLCAVMLDTVGPELQVVNKTEHPISLQADTLVVLTPDQNKEATSNLLPVNFSGLSKAVKNGDTIFIGQYLFTGSETTSVWLEVSEVNGDDVTCVIKNSATLAGSLYTLHVSQIHIDLPTLDNKDKEVISTWGAQNNIDFLSLSYTRHAEDVRHAREFLSKLGNLKQTQIFAKIENIEGLTHFDEILREADGIILSRGNLGIDLPPEKVFLFQKAAIYKCNMAGKPAVVTRVVDTMTDNLRPTRAEATDVANAVLDGSDAIVLGAETLRGLYPVETISTVGKICAEAEKVYNQDLYFKKAVKFVGEPMTHLESIASSAVRAAIKVKASVIICFTSSGRAARLIAKYRPTMPVISVVIPQLKTNQLRWTFTGAFEARQSLIVRGLFPMLADPRHPAESKSATNESILKVALDHGKAFGIIKAHDRVVVCQKVGDSSVVKIIELDE

SEQ ID NO: 3669 - protein, 55 aa, Glycine max
  unsure (1)..(55): unsure at all Xaa locations
  Clone ID: PAT_MRT3847_131964C.1.pep
MASSAPTPGEEFVYMAXLSKQASRYAEMVEFLETVSASAETEDLTVEKRNFLSVA

SEQ ID NO: 3670 - protein, 309 aa, Glycine max
  Clone ID: PAT_MRT3847_13199C.1.pep
MAITLNNGFKMPIIGLGVWRMEGNEIRDLILNSIKIGYRHFDCAADYKNEAEVGDALKEAFDSGLVKREDLFITTKLWNSDQGHVLEACKDSLKKLQLTYLDLYLVHFPVAVRHTGVGNTSSPLGDDGVLDIDTTISLETTWHAMEDLVSSGLVRSIGISNYDIFLTRDCLAYSKIKPAVNQIETHPYFQRDSLVKFCQKHGICVTAHTPLGGAAANAEWFGTVSCLDDQVLKGLAEKYKKTAAQISLRWGIQRNTVVIPKSSKLERLKENFQVFDFELSKEDMELIGSIDRKYRTNQPAVFWGIDLYA

SEQ ID NO: 3671 - protein, 454 aa, Glycine max
  Clone ID: PAT_MRT3847_132102C.1.pep
MASSRPANVGILAMDIYFPPTCVTQDALEGHDGVSKGKYTIGLGQDCMAFCSEVEDVISMSLTVVTSLLEKFNVDPKQIGHLAVGSETVIDKSKSIKTFLMQVFEASGNTDIEGVDSTNACYGGTAALFNCVNWVESSSWDGRYGLVVCTDTAVYAEGPARPTGGAAAIAMLVGPDAPIAFESKLRGSHMSHAYDFYKPNLASEYPIVDGKLSQTCYLMALDSCYRLYCEKFEKLEGRPFSMSDSDYFVFHSPYNKLVQKSFGRLYFNDFLRNASFVDEVARETLAPYASLSGDESYQSRDLEKANQQAAKHLYDAKVQPSTLIPKQVGNMYTASLYAAFASLLHNKNSSLVGKRVVMFSYGSGLTATMFSFQLQEGQHPFNLSNIVTVMNVSDKLKQRVEIPPEKFVETLKIMEHRYGGKDFVTSKDCSYLTPGTFYLTNVDSMYRRFYAKKD

SEQ ID NO: 3672 - protein, 36 aa, Glycine max
  Clone ID: PAT_MRT3847_132766C.1.pep
LVEAMSTTGQGIKCRTAVALEAGKPLSIGTIEVAPP

SEQ ID NO: 3673 - protein, 563 aa, Glycine max
  Clone ID: PAT_MRT3847_133042C.1.pep
MGQSVSSAAVASRRERDQGHRSVNSSKTRFTASVSPMAGYSSGAAEEGENHRVEAVADESTDYISDLPNECLASVFQFLSSADRSRCSLVCRRWLQIEGQSRHRLSLNAELDLFPAIPSLFSRFDSVTKLALKCDRRSVSIRDDALVLISQRCPNLTRLKLRACRELTDAGMEAFAKNCKGLKKLSCGSCTFGSKGMNAVLDNCAALEELSVKRLRGIADTAAAEPIGPGVAAASLKIVCLKELYNGQCFGTLILGAKNLKTLKLFRCSGDWDRLFQLMADRVTNMVEVHLERLQISDVGLQAIANFSSLEILHLVKTPECSDIGLVAIADRCKLLRKLHIDGWKANRIGDEGLIAVAKGCPNLLELVLIGVNPTKASLEMLASNCQNLERLALCGSDSVGDPEISCIAAKCVALKKLCIKSCPVSDQGMEALGNGCPNLVKVKVKKCKGVTPEGGDWLRRTRGSVAVNLDTGEAELQEASASDGGAQDNGVEFPQMPAQIAAASSSTRSSSSRFALMSARISAAALRSTRSGSSRLGLLPTRISAASTFRRWSGGSTSARHG

SEQ ID NO: 3674 - protein, 409 aa, Glycine max
  Clone ID: PAT_MRT3847_13379C.1.pep
MDWGLAISSHPKPYSVTTGGNLWRSKHTTKNIYFASSWISKASRHKRETQIEHNVLRFQQPSLDHHYKCIRGGSTYQECNRKFVVKAISKQPLGFEAHASNPKNILDSVKNVLSAFYWFSYPYTMIGITLCAFSSSLLAVEKLSDISLSFLIGVLQGVLPQLFIEIYLCGVNQLYDLEIDKINKPHLPMASGQFSFKTGVIISAAFLALSFGFTWITGSWPLICNLVVIASSWTAYSIDVPLLRWKRYPFVAAMCMISTWALALPISYFHHMQTVVLKRPIGFPRSLGFLVAFMTFYSLGLALSKDIPDVEGDKEHGIDSFAVRLGQKRAFWICVSFFEMAFGVGILAGASCSHFWTKIFTGMGNAVLASILWYQAKSVDLSDKASTGSFYMFIWKLLYAGFFLMALIR

SEQ ID NO: 3675 - protein, 692 aa, Glycine max
  Clone ID: PAT_MRT3847_134145C.1.pep
LWVEPALSSLVRSVCSHAPGVSPSPRYQHAAVFVNARLHVSGGALGGGRMVEDSSSVAVLDTAAGVWCDTKSVVTSPRTGRYSADAAGGDAAVELTRRCRHAAAAIGDLIFIYGGLRGGVLLDDLLVAEDLAAAETTAASHAAAAAAASNVQAGRLPGRYGFIDDRTRQTMPETDPDGSVVLGNPVAPPVNGDMYTDISTENALLPGSRRTSKGVEYLVEASAAEAEAISATLAAAKARQVNGEVELPDRDRGAEATPSGKQISSLIKPDSAGSNSIPPGGVRLHHRAVVVAAETGGALGGMVRQLSIDQFENEGRRVSYGTPESTTAARKLLDRQMSINSVPKKVVAHLLKPRGWKPPVRRQFFLDCNEIADLCDSAERIFSSEPSVLQLRAPIKIFGDLHGQFGDLMRLFDEYGAPSTAGDIAYIDYLFLGDYVDRGQHSLETITLLLALKVEYPNNVHLIRGNHEAADINALFGFRIECIERMGERDGIWTWHRINRLFNWLPLAALIEKKIICMHGGIGRSINHVEQIENIQRPITMEAGSIVLMDLLWSDPTENDSVEGLRPNARGPGLVTFGPDRVMEFCNNNDLQLIVRAHECVMDGFERFAQGHLITLFSATNYCGTANNAGAILVLGRDLVVVPKLIHPLPPAISSPETSPERHIEDTWMQELNANRPPTPTRGRPQVTNDRA

SEQ ID NO: 3676 - protein, 343 aa, Glycine max
  unsure (1)..(343): unsure at all Xaa locations
  Clone ID: PAT_MRT3847_134494C.1.pep
MASVMLSGTEKLTLRTLTGNGLGFTGSDLHGKNFPRVSFVATTSAKVPNFRSLVVPKCSVSASRPSSQPRFIQHKKEAFWFYRFLSIVYDHVINPGHWTEDMRDDALEPADLNDRNMIVVDVGGXGSDTTRLVPIHMWMQESILSQRSPHQLAKAKQXKEPLKECKIIEGDAEDLPFRTDYADRYVSAGSIEYWPDPQRGIKEAYRVLKLGAKACLIGPVYPTFWLSRFFADVWMLFPKEEEYIEWFQKAGFKDVQLKRIGPKWYRGVRRHGLIMGCSVTGVKPASGDSPLQLGPKEEDVEKPVNPFVFALRFVLGALAATWFVLVPIYMWLKDQVVPKGQPI

SEQ ID NO: 3677 - protein, 352 aa, Glycine max
  unsure (1)..(352): unsure at all Xaa locations
  Clone ID: PAT_MRT3847_134495C.1.pep
MASVMLSGTEKLTLRTLTGNGLGFTGSDLHGKNFPRVSFVATTSAKVPNFRSLVVPKCSVSASRPTSQPRFIQHKKEAFWFYRFLPRVNDMVIIPHVLGPMARVNDMVIHNXRDDALEPADLNDRNMIVVDVGGGTGFTTLGIVKHVDAKNVTILDQSPHQLAKAKQKEPLKECKIIEGDAEDLPFRTDYADRYVSAGSIEYWPDPQRGIKEAYRVLKLGGKACLIGPVYPTFWLSRFFADVWMLFPKEEEYIEWFQKAGFKDVQLKRIGPKWYRGVRRHGLIMGCSVTGVKPASGDSPLQLGPKEEDVEKSVNPFVFALRFVLGALAATWFVLVPIYMWLKDQVVPKGQPI

SEQ ID NO: 3678 - protein, 214 aa, Glycine max
  Clone ID: PAT_MRT3847_135197C.1.pep
MYTLNHSSYLYHVSPELSSSLDSSSPASEGSRGVAFSDEEVRLAVRHPKKRAGRKKFRETRHPVYRGVRRRNTDKWVSEVREPNKKTRIWLGTFPTPEMAARAHDVAAMALRGRYACLNFADSTWRLPIPATANAKDIQKAAAEAAEAFRPSQTLENTNTKQECVKVVTTTTITEQKRGMFYTEEEEQVLDMPELLRNMVLMSPTHCIGYEYED

SEQ ID NO: 3679 - protein, 796 aa, Glycine max
  Clone ID: PAT_MRT3847_135935C.1.pep
MAFSISLFLLVLLFSFQSSSSSLLSLNKGSSLSVEKHAEDVIVSPNQMFCAGFFQVGENAFSFAIWFNDPHTHNNNHTVVWMANRETPVNGRLSKLSLLNSGNMVLVGAGQITTWSSNTASDAPVKLHLQDDGNLVLLDLQGTILWQSFDTPTDTLLPGQLLTRYTQLVSSRSQTNHSPGFYKMLFDDDNVLRLIYDGPDVSSTYWPPPWLLSWQAGRFNYNSSRVAVLNSIGNFTSSDNYDFSTDDHGTVMPRRLKLDSDGNARVYSRNEALKKWYVSWQFIFDACTSHGICGANSTCSYDPKRGRRCSCLPGYRVKNHSDWSYGCEPMFDLTCSRNESIFLEIQGVELYGYDHNFVQNSTYINCVNLCLQDCNCKGFQYRYDGNQIFSCFTKSQLLNGRRSPSFNGAIYLRLPITNNFSKEESVSADDHVCSVKLRKDYVRKPENRLVRFFLWLATAVGALEVIFFFLIWGFLIWNLKTSSADQQGYHLAAVGFRKYSYLELKKATKGFSQEIGRGAGGIVYKGILSDQRHVAIKRLYDAKQGEGEFLAEVSIIGRLNHMNLIEMWGYCAEGKHRLLVYEYMENGSLAQNLSSNTLDWSKRYSIALGTARVLAYLHEECLEWILHCDIKPQNILLDASYQPKVADFGLSKLLNRNNLNNSSFSMIRGTRGYMAPEWVLNLAITSKVDVYSYGIVLLEMITGKSPTTTGVQNIDGEEPYNGRLVTWVREKRSATSWLEHIIDPAIKTNYDECKMNLLATVALDCVEEDKDVRPTMSHVVEMLQSHESDPRNIINA

SEQ ID NO: 3680 - protein, 218 aa, Glycine max
  Clone ID: PAT_MRT3847_136001C.1.pep
MADAETFAFQAEINQLLSLIINTFYSNASDALDKIRFESLTDKSKLDAQPELFIRLVPDKDNKTLSIIDSGIGMTKADLVNNLGTIARSGTKEFMEALQAGADVSMIGQFGVGFYSAYLVAEKVIVTTKHNDDEQYIWESQAGGSFTVTRDTDGEQLGRGTKITLFLKEDQLEYLEERRIKDLVKKHSEFISYPIYLWTEKTTEKEISDDEDDEPKRR

SEQ ID NO: 3681 - protein, 356 aa, Glycine max
  Clone ID: PAT_MRT3847_136003C.1.pep
MADAETFAFQAEINQLLSLIINTFYSNKEIFLRELISNASDALDKIRFESLTDKSKLDAQPELFIRLVPDKDNKTLSIIDSGIGMTKADLVNNLGTIARSGTKEFMEALQAGADVSMIGQFGVGFYSAYLVAEKVIVTTKHNDDEQYIWESQAGGSFTVTRDTDGEQLGRGTKITLFLKEDQLEYLEERRIKDLVKKHSEFISYPIYLWTEKTTEKEISDDEDDEPKKEEEGDIEDVDEEKEKDSKKKKKIKEVSHEWQLINKQKPIWLRKPEEITKDEYASFYKSLTNDWEEHLAVKHFSVEGQLEFKAILFVPKRAPFDLFDTRKKMNNIKLYVRRVFIMDNCEELIPEYLGFV

SEQ ID NO: 3682 - protein, 349 aa, Glycine max
  Clone ID: PAT_MRT3847_136440C.1.pep
MVSSLNSIKPLNMSSATKGDRKTALDVASWMFNIVTSVGIILVNKALMATYGFSFATTLTGLHFATTTLLTVFLKWLGYVQTSHLPLPDLIKFVLFANFSIVGMNVSLMWNSVGFYQIAKLSMIPVSCFLEVILDNVRYSRDTKLSISLVLLGVAVCTVTDVSVNAKGFIAAAVAVWSTSLQQYYVHFLQRKYSLGSFNLLGHTAPVQAASLLLVGPFLDYWLTNKRVDAYNYGFTSTLFIIISCTIAVGTNLSQFICIGRFTAVSFQVLGHMKTILVLALGFVFFGKEGLNLQVILGMTIAIAGMIWYGNASSKPGGKERLSLPINHTTNKTQEYNVLPVSSETDQEI

SEQ ID NO: 3683 - protein, 337 aa, Glycine max
  Clone ID: PAT_MRT3847_136906C.1.pep
MEFETSYPTCFMSNSSWFSQESQFTEWTREENKKFESALAIYDKDTPDRWLRVAAMLPGKTVYDVIKQYRELEEDVCEIEAGRIPVPGYPTSSLTLKMVDNQCYDACRKKPATLRSSDQERKKGVPWTEEEHRRFLMGLLKYGKGDWRNISRNFVVTKTPTQVASHAQKYYIRQKLSGGKDNKRRPSIHDITIVNLTSDQEKPLLLNDESHMTFEQQKLTSMPKVQLEWINHHDNGSRMVVNPNYDMFMSPSSGISSKTLKLQGQDFYECAFHETYAKLKNSGFRTTSRDFNKEVRQLFNMSISLYRLNLHHRMRHSGILSLGQRDNIQYSCTLILL

SEQ ID NO: 3684 - protein, 321 aa, Glycine max
  Clone ID: PAT_MRT3847_136907C.1.pep
MEFETSYPTCFMSNSSWFSQESHYTEWTREENKKFESALAIYDKDTPDRWLRVAAMLPGKTVYDVIKQYRELEEDVCEIEAGRIPVPGYPTSSFTLKMVDNQCYDACRKKPATLRSSDQERKKGVPWTEEEHRRFLMGLLKYGKGDWRNISRNFVVTKTPTQVASHAQKYYIRQKLSGGKDNKRRPSIHDITIVNLTSDQEKPLLLNDESHMTFEQQKLTSMPKVQLEWINHHDNGSRMVVNPNYDMFMSPSSGISSKTLKLQGQDFYECAFHETYAKLKNSGFRTTSRDFNKEDSICITGCAIQVANSLADVADSHEHLN

SEQ ID NO: 3685 - protein, 364 aa, Glycine max
  Clone ID: PAT_MRT3847_136948C.1.pep
MVKSNENGSGSVSVPPFLKKCYDMVEDRNTDSIIRWSDGGDSFVISDITQFSVTLLPTYFKHNNFSSFIRQLNIYGFRKIDTDSWEFANENFVRGQKHLLKNIHRRKHPHSADQQKALPQQDNCDEPSQEAPNHGLWKEVENLKLDKNSLTQELVKLRQHQESAESKLLLLSDRLQGMEKHQQQMLSFLVMVVQSPGFMVQLLHPKENNWRLAESWNRLDQDKQDDKPVASDGMIIKYKPPVGEKLKPVVPLSPGFENQPEPELSADGLKDLCISSEFLKVLLDEKLSPLENHSPFLLPDLPDDGSWEQLFLGSPFLGNIQDSKNESEGHTNSGMEMEPTISETPNENSRTFESMIVEMEKTRE

SEQ ID NO: 3686 - protein, 742 aa, Glycine max
  Clone ID: PAT_MRT3847_137166C.1.pep
MATGAAVPTTFSTLKTWDSSLGFAKNIDFVRVSDMKSMKSSARKRVSIIRNSNPGQDIAELQPASPGSPLLVPRQKYCESLHKPIRRKTSTVMVGNVAIGSEHPIRIQTMTTTDTKDVAGTVEQVMRIADKGADIVRITVQGKKEADACFEIKNTLVQKNYNIPLVADIHFAPSVALRVAECFDKIRVNPGNFADRRAQFETLEYTEEDYQKELEHIEKVFTPLVEKCKKYGRAMRIGTNHGSLSDRIMSYYGDSPRGMVESAFEFARICRKLDYHNFVFSMKASNPVIMVQAYRLLVAEMYVQGWDYPLHLGVTEAGEGEDGRMKSAIGIGTLLQDGLGDTIRVSLTEPPEEEIDPCRRLANLGMRASELQKGVEPFEEKHRHYFDFQRRSGQLPVQKEGEEVDYRGALHRDGSVLMSVSLDQLKMPEVLYKSLAAKLIVGMPFKDLATVDSILLRELPPVDDADARLALKRLIDISMGVITPLTEQLTKPLPNAMVLVNLKEISTGAYKLLPQGTRLVVSVRGDEPYEELDILKGVDATMLLHDLPYTEDRISRVHAARRLFEYLSDNSLNFPVIHHIQFPNGIHRDDLVIGAGSDAGALLVDGLGDGLLLEAPDKDFEFIRNTSFNLLQGCRMRNTKTEYVSCPSCGRTLFDLQEVSAQIREKTSHLPGVSIAIMGCIVNGPGEMADADFGYVGGTPGKIDLYVGKTVVKRGIAMEHATNALIDLIKEHGRWVDPPAEE

SEQ ID NO: 3687 - protein, 498 aa, Glycine max
  Clone ID: PAT_MRT3847_137229C.1.pep
KWSNLVRQQKMASDKVVETVIAGNYVEMETEGKPKDVKTKLSSLLWHGGSVYDAWFSCASNQVAQVLLTLPYSFSQLGMLSGILFQIFYGLLGSWTAYLISILYVEYRTRKEREKVNFRNHVIQWFEVLDGLLGKHWRNVGLAFNCTFLLFGSVIQLIACAGNIYYINDHLDKRTWTYIFGACCATTVFIPSFHNYRIWSFLGLLMTTYTAWYLTVASLLHGQMEGVKHSGPTKLVLYFTGATNILYTFGGHAVTVEIMHAMWKPQKFKALYLLATLYVLTLTLPSAAAVYWAFGDMLLNHSNAFALLPKSPFRDMAVILMLIHQFITFGFACTPLYFVWEKAIGMHECKSLCKRALVRLPVVIPIWFLAIIFPFFGPINSTVGSLLVSFTVYIIPALAHIFTFRSPSSRQNAVEQPPKFVGRWVGTFIINTFVVVWVLVVGFGFGGWASMVNFIRQIDTFGLFTKCYQCPPPLLPPMPPHQLNATAPSPLHHPHHAH

SEQ ID NO: 3688 - protein, 348 aa, Glycine max
  Clone ID: PAT_MRT3847_137321C.1.pep
QFYRSVNKTDYLTLRNGFITVHLAPGSKYNFQKFIKRSLEDDFKVVVGVSPILWASVVVYLLININGWRTTIWAALIPVVLILAVGTKLQAILAKMALEITERHAVVQGMPLVQGSDKYFWFGQPQLVLHVIHFALFQNAFQITYILWIWYSFGVRNCFRTDYKLAALKVAIGISMLCLCSYITLPLYALVTQMGSRMKTAVFEEQTNKALKKWHMDAKKKKKKHVGTVTLGKSSARIMDGSPIGNSSTVHSSSVPTLHRFKTTGHSTRSSSKEYEDHDHDHEYESDDVELFPVSSQTTSFIVRVDRGDQQQQAEEEHRQHSEGETNSSSEGEFSFAKPDPVEIRTTT

SEQ ID NO: 3689 - protein, 84 aa, Glycine max
  Clone ID: PAT_MRT3847_137585C.1.pep
LDLGVEGAVLQVDEVRDADELVVGTCMVEAEAVDAGGEESGVGVEAAAGEGQRGKNTVLAEGGVPKGDVVGDVGYTEESVAGTE

SEQ ID NO: 3690 - protein, 346 aa, Glycine max
  Clone ID: PAT_MRT3847_138356C.1.pep
MGKGGSLSDGVVKKIVLSYSYVAIWIFLSFTVIVYNKYILDKKMYNWPFPISLTMIHMSFCATLALLLVRVLRLVEPVSMSRDVYLSSVVPIGALYSLSLWLSNSAYIYLSVSFIQMLKALMPVAVYSIGVMLRKESYKNDTMLNMLSISLGVGVAAYGEARFDAWGVLLQLGAVAFEATRLVMIQILLTSKGISLNPITSLYYVAPCCLVFLSIPWIFVEYPVLRDTSSFHFDFVIGWTNSFCAFALNLAVFLLVGKTSALTMNVAGVVKDWLLIAFSWSVIKDTVTPINLFGYGLAFLGVAYYNHSKLQALKAKEAQKKTAQADEEEGRLLEDRDDNKRNEQQT

SEQ ID NO: 3691 - protein, 662 aa, Glycine max
  Clone ID: PAT_MRT3847_139152C.1.pep
MEGENASNKVIELMNEIASISDYRPPVKKQYCNLARRLKLLIPMFEEIRDMNKDALPDNTSNAVLAFKEALESAMELLRFGSEGSKLYLVLERDEIMNKFYKVTAQLEQSLGGISYDKLDISDEVKEQVELVLAQFRRAKGRVDEPDVRLYEDMLSVYNNSSDAATDPSVLSQLAEKLKLMGIADLTQESLALHEMVASSGGDPGARIEKMSMLLKKIKDFVQIENLVKDDNLGGKGIFSKVYGLGTNEKSHQAPVIPDDFRCPISLELMKDPVIVSTGQTYERTCIEKWLQAGHGTCPKTQKTLTSTVLTPNYVLRSLIAHWCEANGIEPPKRPSDSQPSKSASAYSPAEQSKIESLLQKLTSVSPEDQRSAAGEIRLLAKRNADNRVAIAEAGAIPLLVGLLSVPDSRTQEHAVTALLNLSIYENNKGSIVSSGAVPGIVHVLKKGSMEARENAAATLFSLSVIDENKVTIGSLGAIPPLVTLLSEGNQRGKKDAATALFNLCIYQGNKGKAVRAGVIPTLMRLLTEPSGGMVDEALAILAILASHPEGKATIRASEAVPVLVEFIGNGSPRNKENAAAVLVHLCSGDQQYLAQAQELGVMGPLLELAQNGTDRGKRKAGQLLERMSRLVEQQQEVPIQTETQAQNEDTQPPLITNPDDS

SEQ ID NO: 3692 - protein, 411 aa, Glycine max
  Clone ID: PAT_MRT3847_139372C.1.pep
MMLRRRGSVTSFYSKFIDSHNLNCGRSSSNPHRVAASATSFDISSASASKATTDFVSLTRHYGRCYWELSKARLSMLVVATSGTGFVLGSGSAVDLSALSCTCLGTMMVAASANSLNQVFEINNDAKMKRTSRRPLPSGRITIPHAVGWASSVGLAGTALLATQTNMLAAGLAASNLILYAFVYTPLKQIHPINTWVGAVVGAIPPLLGWAAASNDISLNGMILPAALYFWQIPHFMALAYLCRDDYAAGGFKMYSLADASGHRTALVALRNSIYLIPLGFLAYDWGLTSGWFCLESAALTLAISAAAFSFYRNRTKEKARRMFHASLLYLPVFMSGLLIHRRSENEQFLEDKAKGFVKSASSTESSELDDDNGDQNIKARRPYRTEARPPVSYASVAPFPFLPAPSYNFP

SEQ ID NO: 3693 - protein, 148 aa, Glycine max
  Clone ID: PAT_MRT3847_139958C.1.pep
IRLELRAESARVREDDRRGKYSEDDAKAVMVQILNVVAFCHLQGVVHRDLKPENFLYAKKDESSELKAIDFGLSDFVRPDERLNDIVGSAYYVAPEALHRSYSTEADVWSIGVIAYILLCGSRPFWARTESGIFRAVLKADPSFDETP

SEQ ID NO: 3694 - protein, 421 aa, Glycine max
  Clone ID: PAT_MRT3847_140022C.1.pep
MTSHSHYPPDLDADSVTSSPRSDHFHDAPPRIRFMCSFGGKILPRPHDNQLRYVGGDTRIVAVNRSITFSALILKLSKLSGMSNITAKYQLPNEDLDALISVTTDEDVENMMDEYDRVAHNQNPRSARLRLFLFPEGEDSRASSISSLLNGSAKRENWFLDALNGGVSGLERGRSEASSMVSEVPDYLFGLDNSEEITNHQRDPRPKPGPIIQDNVSVSDPGSPAPVVSSPYCSTSSAPPVPSLPNLPYVKTKPLNLNPVPDTDSKENQTEPETEPHPNLNLNQNPNMYSNNPVVHYPPEAAYSAHSVNPVPVYYVSGPVRPGSVPVPMQTPYHYVQQSYHAVVPPQVPIGYHPLVPGSGQVYGAGVRHMTPLQPYSPSTTAVVHDGLKQHVYHAVPNSGPVPVHPVIPMTGLDEPQRGGA

SEQ ID NO: 3695 - protein, 69 aa, Glycine max
  unsure (1)..(69): unsure at all Xaa locations
  Clone ID: PAT_MRT3847_140192C.1.pep
MAASAPTPREDFVYMAXLAEKAERYEEMVDFMEKVSASAESEELTVEERNLLSVAXKNVMGARRASWRI

SEQ ID NO: 3696 - protein, 331 aa, Glycine max
  Clone ID: PAT_MRT3847_140374C.1.pep
MASSTNALPPTGNGLIVSFGEMLIDFVPTVSGVSLAEAPGFLKAPGGAPANVAIAVARLGGKAAFVGKLGDDEFGHMLAGILKENDVRSDGINFDQGARTALAFVTLRADGEREFMFYRNPSADMLLTPEDLNLELIRSAKVFHYGSISLIVEPCRSAHLKAMEVAREAGCLLSYDPNLRLPLWPSAEEARQQILSIWDKADVIKVSDVELEFLTGSDKIDDASALSLWHPNLKLLLVTLGEHGSRYYTKNFHGSVEAFHVSTVDTTGAGDSFVGALLSKIVDDQSVLEDEARLREVLKFANACGAITTTKKGAIPALPTEADALNLIKEA

SEQ ID NO: 3697 - protein, 330 aa, Glycine max
  Clone ID: PAT_MRT3847_140375C.1.pep
MASTNALPPTGNGLIVSFGEMLIDFVPTVSGVSLAEAPGFLKAPGGAPANVAIAVARLGGKAAFVGKLGDDEFGHMLAGILKENDVRSDGINFEKGARTALAFVTLRADGEREFMFYRNPSADMLLTPEDLNLELIRSAKVFHYGSISLIVEPCRSAHLKAMEVAREAGCLLSYDPNLRLPLWPSAEEARQQILSIWDKADVIKVSDVELEFLTGSDKIDDASALSLWHPNLKLLLVTLGEHGSRYYTKNFRGSVEAFHVNTVDTTGAGDSFVGALLSKIVDDQSILEDEARLREVLKFTNACGAITTTKKGAIPALPTEADALKLIKEA

SEQ ID NO: 3698 - protein, 261 aa, Glycine max
  Clone ID: PAT_MRT3847_140671C.1.pep
MTASKDRENFVYIAKLAEQAERYEEMVESMKNVANLDVELTVEERNLLSVGYKNVIGARRASWRILSSIEQKEETKGNELNAKRIKEYRQKVELELSNICNDVMRVIDEHLIPSAAAGESTVFYYNMKGDYYRYLAEFKSRNEKNEAADQSMKAYESATAAADADLPSTHAIRLGLALNFSVFYYEILNSPERACHLAKQAFDEAISELDTLNEESYKDSTLIMQLLRDNLTLWTSDIPEDGEDAQKVNGTAKLGGGEDAE

SEQ ID NO: 3699 - protein, 261 aa, Glycine max
  Clone ID: PAT_MRT3847_140672C.1.pep
MAASKDRENFVYIAKLAEQAERYEEMVESMKNVANLDVELTVEERNLLSVGYKNVIGARRASWRILSSIEQKEETKGNELNAKRIKEYRQKVELELSNICNDVMTVIDEHLIPSAAAGESTVFYYKMKGDYYRYLAEFKAGNEKKEAADQSMKAYESATTAAEADLPPTHPIRLGLALNFSVFYYEILNSPERACHLAKQAFDEAISELDTLNEESYKDSTLIMQLLRDNLTLWTSDIPEDGEDAQKVNGTAKLGGGEEAE

SEQ ID NO: 3700 - protein, 267 aa, Glycine max
  Clone ID: PAT_MRT3847_141088C.1.pep
MDPKLKEVSQLFDRFKASFLRNDFDNCSNLLSQLKVLLTGFRSLPPLFADTPNAVHELTIARDIYEHAVVLSVKIEDQDAFERDFFQLKPYYTDACNRLPPSPQEYPILGLNLLRLLVQNRIAEFHTELELLSSAALENPCIKHAVELEQSFMEGAYNRVLSARQTVPHDTYVYFMDLLAKTVRDEIAGCSEKAYDYLSIKDAKQMLLFSSDQELLEYIKEEHPEWEIKNDSVFFQKAKESAPCKEIPSLQLINQTLSYARELERIV

SEQ ID NO: 3701 - protein, 267 aa, Glycine max
  Clone ID: PAT_MRT3847_141090C.1.pep
MDPKLKEVSQLFDRFKASFIRNDFDTCSNLLSQLKVLLTGFRSLPPLFADTPNAVHELTIARDIYEHAVVLSVKNEDQDAFERDFFQLKPYYTDACNRLPPSPQEYPILGLNLLRLLVQNRIAEFHTELELLSSAALENPCIKHAVELEQSFMEGAYNRVLSARQTVPHDTYVYFMDLLAKTVRDEIAGCSEKAYDYLSIKDAKQMLLFSSDQELLEYIKEEHPEWEIKNGSVFFQKAKESAPCKEIPSLQLINQTLSYARELERIV

SEQ ID NO: 3702 - protein, 63 aa, Glycine max
  Clone ID: PAT_MRT3847_141452C.1.pep
MATLLASFIQCFNLQVLGPQEQILKGGAPKVSMKKKPALLVPRAQNFVFVPLPRMGVAFKPLF

SEQ ID NO: 3703 - protein, 68 aa, Glycine max
  Clone ID: PAT_MRT3847_141685C.1.pep
CNFRSYIFRSIKTTFGFCTSFLYPSNRCTYIVCLFLILQLKKHVVQMCVPYSITVYALSPSLYDVNAV

SEQ ID NO: 3704 - protein, 161 aa, Glycine max
  Clone ID: PAT_MRT3847_14188C.1.pep
VTCGKKLHRQGKNNTEPKQVPIYTKLAYILGLRVSPHHRRMGIGMKLVKKMEEWFRDNGAEYAYMATEKDNVASVKLFTDKCGYSKFRTPCILANPVFSHPARISHKVTIIELSPSDAEILYRSKFSTTEFFPRDVDSVLRNKLSLGTFLAVPKGLYRADT

SEQ ID NO: 3705 - protein, 145 aa, Glycine max
  Clone ID: PAT_MRT3847_141898C.1.pep
MEVAKVLHMNGGVGDASYANNSFVQQKLICLTKPLREEAIKSLYCGTLPRRLAMADLGCSSGQHALIVVSDFIKTVEKLCLELNHKSPEYKVFFNDLPGNDFNNIFKSLDSFKQKLCEEMESGIGPCYFFGAPGSFYGRIFSNQS

SEQ ID NO: 3706 - protein, 68 aa, Glycine max
  Clone ID: PAT_MRT3847_141941C.1.pep
MFGTTNSCVSVMDGIYPKVFENSDGARTSPSVVAFYQKGELLVGSPAKRQAVTNPTNTLFGTKRLIGR

SEQ ID NO: 3707 - protein, 173 aa, Glycine max
  Clone ID: PAT_MRT3847_142333C.1.pep
PRVRPRVRNDAALRPLAKCSELLVLKLGLCSSISDKGLAFISSSCGKLIELDLYRCNSITDDGLAALANGCKKIKMLNLCYCNKITDTGLGHLGSLEELTNLELRCLVRITGIGISSVAIGCKNLIEIDLKRCYSVDDAGLWALARYALNLRQLTISYCQVTGLGLCHLLSSL

SEQ ID NO: 3708 - protein, 196 aa, Glycine max
  unsure (1)..(196): unsure at all Xaa locations
  Clone ID: PAT_MRT3847_142358C.1.pep
PRVRASCRMALLLGLLLLVVASPAIADDDSGIYYQLALMWPGAYCEQTSAGCCKPTTGVSPARDFYITGFTVLNATTDAAVTGCSNKVPYDPNLITGIQGLNQYWSNIRCPSNNGQSSWKNAWKKAGACSGLSEKDYFETALSFRSRINPLVRLKAKGIEPDFGLYGLKAITKVFKSGINATPVIQCSXGPFDKYM

SEQ ID NO: 3709 - protein, 145 aa, Glycine max
  Clone ID: PAT_MRT3847_142490C.1.pep
MEVAQVLHMNGGVGDASYANNSFVQQKAICLSKPIREEAITGLYCNTVPRSLAIADLGCSYGPNTLSVVSEFIKTVEKLCRKLNHKSPEYKVFLNDLPGNDFNNIFMSLDNFKEKLCDEIETGVGPCYFFGVPGSFYSRVFPNQS

SEQ ID NO: 3710 - protein, 103 aa, Glycine max; identical to SEQ ID NO: 3555
  Clone ID: PAT_MRT3847_142514C.1.pep

SEQ ID NO: 3711 - protein, 160 aa, Glycine max
  Clone ID: PAT_MRT3847_14254C.1.pep
MTQVRNKQVVLRDYVTGFPKESDMNIVEGTIILKVPEGSNDVLLKNLYLSCDPYMRLLMAKDRSFGDGSFTLASPLKGYGVSQVLESGRPDYKKGDLVWGITKWEEYSLVPSSLIHFKIEHTDVPLSYYTGILGMPGMTAYAGFFEVGSPKKRDTVFVSA

SEQ ID NO: 3712 - protein, 309 aa, Glycine max
  Clone ID: PAT_MRT3847_142712C.1.pep
MNRGIEVLSPASYLRSSNWLFQESLGTRWTPQENKLFENALAVFDKDTPDRWLKVAALIPGKTVGDVIKQYRELEEDVSVIESGFIPLPGYTAADSFTLEWVNNQGFDGLRQFYGVTGKRGASTRPSEQERKKGVPWTKEEHRQFLMGLKKYGKGDWRNISRNFVTTRTPTQVASHAQKYFIRQLSGGKDKKRSSIHDITMVNLPEAKSPSSESNNRPYSPDHSVKDVNPPSQNQRLSTTMVIKQEHDWKLPCETVPMLFNSTNGNMFMTPLCGISSYGSKPLQEQYFLSGCQFGPYDTIMQMPSMQNQ

SEQ ID NO: 3713 - protein, 272 aa, Glycine max
  Clone ID: PAT_MRT3847_142931C.1.pep
RAESARAQLGMVSGILLQIFYGLIGSWTAYLVSVLYIEYGSRKEKENVSFKNHVIQWFEVLDGLLGRYWKAVGLAFNCTFLLFGSVIQLIACASNIYYINDKLYKRTWTYIFGACCAFTVFIPSFHNYRIWSFLGLGMTTYTAWYLAIAAILHGQVENVTHSGPTKLILYFTGATNILYTFGGHAVTVEIMHAMWQPRKFKSIYFLATLYVFTLTIPSAVAVYWSFGDQLLDHSNAFSLLPKNVFRDAAVILMLIHQFITFGFACTPLYFCV

SEQ ID NO: 3714 - protein, 54 aa, Glycine max
  Clone ID: PAT_MRT3847_143114C.1.pep
AGRLSEPYKGIGDCFGRTTKDEGLVSLWRGNTANVIRYFPTQALNFAFKTNLRK

SEQ ID NO: 3715 - protein, 371 aa, Glycine max
  Clone ID: PAT_MRT3847_143255C.1.pep
MMEGVSREAQMSIAASSMFPGFRFCPTDEELISYYLRKKLEGHEESVQVISEVELCKYEPWDLPAKSFIQSDNEWFFFSPRGRKYPNGSQSKRATECGYWKATGKERNVKSGSNIIGTKRTLVFHLGRAPKGERTEWIMHEYCINDKSQESLVICRLKRNTEFRLSDASNRASSSQRHPVNSHESGCAISGGGIDQRDACEQDKEVGCSSKRDSSSYGSPSMEQIDSVSESNQRPVNEATFTESSGQPKEGYEEDCYAEILKDDIIKLDESSVLVESHTRPQDPTQMQPAPQGTAQRRIRLRVGNSKHSRAVVRFPSTMHSSKNTFFARTTNSLVVLAFFVFTLMVLYFLSLVRGQKQDKYCGEFSGVNHD

SEQ ID NO: 3716 - protein, 47 aa, Glycine max
  unsure (1)..(47): unsure at all Xaa locations
  Clone ID: PAT_MRT3847_14659C.1.pep
MGLGSKXKKKKKKKKKKKKKKKKKKKKKKKKKKKKKKKGGGVLKDQS

SEQ ID NO: 3717 - protein, 49 aa, Glycine max
  unsure (1)..(49): unsure at all Xaa locations
  Clone ID: PAT_MRT3847_14773C.1.pep
TTRAATRTLTPNYVLRSLRAEWCEANGIXPPKRPNDSQPNKITSSYSSG

SEQ ID NO: 3718 - protein, 46 aa, Glycine max
  Clone ID: PAT_MRT3847_14878C.1.pep
FQNPMNLSFRGRHHCGGSVLSVLAFKMVRAWLGCFSVVHIQASKAI

SEQ ID NO: 3719 - protein, 102 aa, Glycine max
  unsure (1)..(102): unsure at all Xaa locations
  Clone ID: PAT_MRT3847_1499C.1.pep
KTAQDIWNAELPPXTHPNRVGPAFNFFGFYYEILNFPDWACNLAKQGFDEAIAELDTLGEESFKDSPLVMQLLCDNLPLWAFAMQGDGADXIKKAAPKPDGQ

SEQ ID NO: 3720 - protein, 154 aa, Glycine max
  unsure (1)..(154): unsure at all Xaa locations
  Clone ID: PAT_MRT3847_15347C.1.pep
SILTVVCETHSLPLAQTWVPCKHRSVLAHGGGHKKSCSSFDGCCMGQVCMSITEVAFYVIDAHTWGFHEACVEHHLQQGQGVAGRAFLSHNMCFCGNIAQFCKTEYPLVHYALMFGLTSCFAXCLQSSHTGKDDYVLEFFLPPGITDFNEQIDC

SEQ ID NO: 3721 - protein, 164 aa, Glycine max
  Clone ID: PAT_MRT3847_15380C.1.pep
RRVVSLLINRNQHGISDRSISYANDLKHNQIWLSEIEEEAKKGIPLDMYLILGVEHSVSSSEIKKAYHKAALRHHPDKAGQSLARSDNGDDQIWKDIVEEISKDADRLFKIIGEAYAVLSDTAKRSQYDSEEEMRNSQKKRHGNSINRNNVIDQTDNRRHWKEV

SEQ ID NO: 3722 - protein, 607 aa, Glycine max
  Clone ID: PAT_MRT3847_15714C.1.pep
MDTNIGSLSLDACKPANNDVGCPPNGAVSAIKPSVPATTMTSSDATLGRHLARRLVQVGVTDVFSVPGDFNLTLLDHLIAEPQLKNIGCCNELNAGYAADGYARCRGVGACVVTFTVGGLSVINAIAGAYSENLPLICIVGGPNTNDFGTNRILHHTIGLSDFSQELRCFQTVTCYQAVVNNIEDAHELIDTAISTCLKESKPVYISISCNLPGIPHPTFSREPVPFSLSPRLSNKMGLEAAVEAAAEFLNKAVKPVMVGGPKLRVANACDAFVELADACGYPFAVMPSAKGLVPEHKPHFIGTFWGAVSTAFCAEIVESADAYLFAGPIFNDYSSVGYSLLLKKEKAIIVQPERVVISNGPAFGCVLMKDFLRELAKRLKHNNTAYENYSRIFVPEGKPVKAEPREPLRVNVLFKHIQDMLSGETAVIAETGDSWFNCQKLKLPKGCGYEFQMQYGSIGWSVGATLGYAQAVPEKRVISCIGDGSFQVTAQDVSTMLRNEQKTIIFLINNGGYTIEVEIHDGPYNVIKNWNYTGLVDAIHNGEGKCWTTKVTCEEELVEAIQTATGDKKDCLCFIEVIVHKDDTSKELLEWGSRVCAANGRPPNPQ

SEQ ID NO: 3723 - protein, 60 aa, Glycine max
  Clone ID: PAT_MRT3847_15851C.1.pep
MASYQKHYDDQGRKVDEYGNPEKHTREYGNPVHAGSGTYVAPITGAGGFRGDIYKPPDSP

SEQ ID NO: 3724 - protein, 126 aa, Glycine max
  Clone ID: PAT_MRT3847_15920C.1.pep
DHNTNTDFDSIRFDSVEVLSSSKMSGRGKGGKGLGKGGAKRHRKVLRDNIQGITKPAIRRLARRGGVKRISGLIYEETRGVLKIFLENVIRDAVTYTEHARRKTVTAMDVVYALKRQGRTLYGFGG

SEQ ID NO: 3725 - protein, 411 aa, Glycine max
  Clone ID: PAT_MRT3847_16358C.1.pep
MDVDSSMVPETDHDPAVQNHAADDPAPDAAEGEQLGEPPSSGGGSPEQTQPAPASAPQSPVVGPRLAPSYTVVNAILEKKEDGPGPRCGHTLTAVAAVGEEGTPGYIGPRLILFGGATALEGNSAATGTPSSAGNAGIRLACATADVHWYARVRNKWSRITPIGEPPTPRAAHVATAVGTMVVIQGGIGPAGLSAEDLHVLDLTQQRPRWHRVGVPGPGPGPRYGHVMALVGQRYLMAIGGNDGKRPLADVWALDTAAKPYEWRKLEPEGEGPPPCMYATASARSDGLLLLCGGRDANSVPLSSAYGLAKHRDGRWEWAIAPGVSPSPRYQHAAVFVNARLHVSGGALGGGRMVEDSSSVAVLDTAAGVWCDTKSVVTSPRTGRYSADAAGGDAAVELTRRCRHAAAAIGD

SEQ ID NO: 3726 - protein, 80 aa, Glycine max
  unsure (1)..(80): unsure at all Xaa locations
  Clone ID: PAT_MRT3847_16403C.1.pep
PVHAPSVTYVATRTAARGYSDDINKQHDTTNAYGVDTVRXHFYGGFDGDTNKPHGITGGYNDDSXRPYGTPGVFCINPDR

SEQ ID NO: 3727 - protein, 113 aa, Glycine max
  Clone ID: PAT_MRT3847_16414C.1.pep
STRVGRAQRKQEEELSLWRKKLVLQSNRVDVFMGYSENPINPPQGKEMGGFLRRAAPSGGPADRPGAELQLELLRRGLTRRDRPMMDAAASVFLFPSFLYLSGVSFGRIRTRG

SEQ ID NO: 3728 - protein, 453 aa, Glycine max
  Clone ID: PAT_MRT3847_16575C.1.pep
MATWILSECGLKPLAPVIPRPRTGAALSSTSRVEFLDTNKVVAGPKFQPLRCNLRERNWGLKVSAPLRVASIEEEQKSVDLTNGTNGVEHEKLPEFDPGAPPPFNLADIRAAIPKHCWVKDPWRSMSYVVRDVIAVFGLAAAAAYLNNWLVWPLYWAAQGTMFWALFVLGHDCGHGSFSNNSKLNSVVGHLLHSSILVPYHGWRISHRTHHQHHGHAENDESWHPLPEKLFRSLDTVTRMLRFTAPFPLLAFPVYLFSRSPGKTGSHFDPSSDLFVPNERKDVITSTACWAAMLGLLVGLGFVMGPIQLLKLYGVPYVIFVMWLDLVTYLHHHGHEDKLPWYRGKEWSYLRGGLTTLDRDYGWINNIHHDIGTHVIHHLFPQIPHYHLVEATEAAKPVFGKYYREPKKSAAPLPFHLIGEIIRSFKTDHFVSDTGDVVYYQTDSKINGSSKLE

SEQ ID NO: 3729 - protein, 453 aa, Glycine max
  Clone ID: PAT_MRT3847_16577C.1.pep
MATWVLSECSLKPLAPVIPRPRTGAVLSSTSKVGFLETNKVLEGSKFQPLRCNLRERNWGLKVSVPLRIASIEEEEQKSVDVINGSNGVEHEKLPEFDPGAPPPFNLADIRAAIPKHCWVKDPLKSMSYVVRDVIAVFGLASAAAYLNNWLVWPLYWAAQGTMFWALFVLGHDCGHGSFSNNPKLNSVVGHLLHSSILVPYHGWRISHRTHHQHHGHVENDESWHPLPEKLFRSLDTVTRMLRFTAPFPLLAYPVYLWGRSPGKTGSHFDPSSDLFVPNERKDVITSTACWAAMLGLLVGLGFVMGPIQLLKLYGVPYVIFVMWLDLVTYLHHHGHEDKLPWYRGKEWSYLRGGLTTLDRDYGLINNIHHDIGTHVIHHLFPQIPHYHLVEATEAAKPVFGKYYREPKKSSPLPFHLIGELIKSFKTDHFVSDKGDVVYYQTDSEINGSSKSE

SEQ ID NO: 3730 - protein, 375 aa, Glycine max
  Clone ID: PAT_MRT3847_16889C.1.pep
MGSKGKRKEQESIITRVMAHGGRYVQYNVYGNLFEVSSKYVPPIRPVGRGAYGIVCAAVNCDTHEEVAIKKIGNAFDNIIDAKRTLREIKLLRHMDHENIIAIRDIIRPPRKDAFNDVYIVYELMDTDLHQIIRSDQPLNDDHCQYFLYQLLRGLKYVHSANILHRDLKPSNLLLNSNCDLKIADFGLARTTSETDFMTEYVVTRWYRAPELLLNCSEYTSAIDVWSVGCIFGEIMTREPLFPGKDYVHQLRLITELLGSPDDASLGFLRSGNAKRYVRQLPQYRKQNFSARFPNMSPEALDLLEKMLIFDPNKRITVDEALCHPYLSSLHDINDEPVGPGQFNFDFEQPTCTEEHIKELIWRESVKYNPDPPSQ

SEQ ID NO: 3731 - protein, 89 aa, Glycine max
  Clone ID: PAT_MRT3847_16934C.1.pep
TRPPTRPRTRGRTRGRAGWGVMASHRSGETEDTFIADLSVGLSTGQIKTGAPCRSERLAKYNQLLRIEEELGDAAVYAGAKFRAPVEPY

SEQ ID NO: 3732 - protein, 392 aa, Glycine max
  Clone ID: PAT_MRT3847_17090C.1.pep
MEGGGAAPPADTVMSDAAPPPQQPPVAMGIENIPATLSHGGRFIQYNIFGNIFEVTAKYKPPIMPIGKGAYGIVCSVLNSETNEHVAIKKIANAFDNKIDAKRTLREIKLLRHMDHENVVAIRDIVPPPQREIFNDVYIAYELMDTDLHQIIRSNQALSEEHCQYFLYQILRGLKYIHSANVLHRDLKPSNLLLNANCDLKICDFGLARVTSETDFMTEYVVTRWYRAPELLLNSSDYTAAIDVWSVGCIFMELMDRKPLFPGRDHVHQLRLLMELIGTPSEADLGFLNENAKRYIRQLPLYRRQSFQEKFPHVHPEAIDLVEKMLTFDPRKRITVEDALAHPYLTSLHDISDEPVCLTPFSFDFEQHALTEEQMKELIYREALAFNLEYQQ

SEQ ID NO: 3733 - protein, 485 aa, Glycine max
  Clone ID: PAT_MRT3847_17186C.1.pep
MALLVEKTSSGREYKVKDMTQADFGRLEIELAEVEMPGLMSSRTEFGPSQPFKGARITGSLHMTIQTAVLIETLTALGAEVRWCSCNIFSTQDHAAAAIARDSASVFAWKGETLQEYWWCTERALDWGPGGGPDLIVDDGGDTTLLIHEGVKAEEIFEKTGQFPDPASSDNAEFQIVLSIIRDGLKTDPKRYHKMKDRIVGVSEETTTGVKRLYQMQANGSLLFPAINVNDSVTKSKFDNLYGCRHSLPDGLMRATDVMIAGKVAVVCGYGDVGKGCASAMKQAGARVIVTEIDPICALQALMEGLQVLTLEDVVSEADIFVTTTGNKDIIMLDHMKKMKNNAIVCNIGHFDNEIDMLGLETCPGVKRINIKPQTDRWVFPDTKRGIIVLAEGRLMNLGCATGHPSFVMSCSFTNQVIAQLELWKEKGSGKYEKKVYVLPKHLDEKVASLHLGQLGARLTKLSKDQADYISVPVEGPYKPAHYRY

SEQ ID NO: 3734 - protein, 457 aa, Glycine max
  Clone ID: PAT_MRT3847_17304C.1.pep
MVSSVSWVRGKCVGKGAFGVVNVAVSKRDNRVFAVKSVDCGRGLSGQVEALENEIGILKRVTSPHVVAYIGDDVTCEGTASFRNLHLEYMPGGTVADLDRADVDERLVRRYAWCLATALRDVHAQGFVHCDVKGRNVLLSGDGEMAKLADFGAAVEIESSPAMLLFPRGSPMWMAPEVVRRERQGPESDVWSLGCTVIEIAIGKPAWEDRGVDTLSRIGYSDELPEFPIQLSELGKDFLEKCLRREPSERWSCDQLLQHPYLLPYYALVESSPRCVLDRVDSELNSESDYNDRDHQEDVFIKFTNSEEKSVIKNRISKFATESRVNWETQGWIVVREIESNGKPTTTGTETEIEEGACTCECDGVGSSKEGVNWEFHNVAGTGMEYSDSVGVNRGIGKLGGSNTAGGGGGWSCRYGCGWEKLGRNRGIFSIYSLYCKNFMLCNLIFLMYINIYYAFG

SEQ ID NO: 3735 - protein, 164 aa, Glycine max
  Clone ID: PAT_MRT3847_17306C.1.pep
MVSWVRGKCVGNGAFGVVNVAISKRDNRVFAVKSVDCGRGLSGHQVEALENEIGILKRVASPHVVAYLGDDVTCEGTASFRNLHLEYMPGGTVADLDRADVDERLVRRFAWCLVSALRDVHAQGFVHCDVKGRNVLLSGDGEIVKLADFGTAVEIESSPAEMLL

SEQ ID NO: 3736 - protein, 465 aa, Glycine max
  Clone ID: PAT_MRT3847_17614C.1.pep
MVGSIMGVVHNAYTNGSVGVQNCNGVEEKLDCLRRLIGKGDGDPLRIVSVGAGAWGSVFAALLQDTYGQFRDKIQIRIWRRAGRAVDRATAEHLFEVINSREDVLRRLIRRCAYLKYVEARLGDRTLFADEILKDGFCLNMIDTPLCPLKVVTNLQEAVWDADIVVNGLPSTETREIFEEISKYWKERITVPIIISLSKGIEAALEPVPHIITPTKMINQATRVPMENILYLGGPNIASEIYNKEYANARICGAEKWRKALAKFLRQPHFIVWDNSDLVTHEIMGGLKNVYAIGAGMVAALTNESATSKSVYFAHCTSEMIFITHLLAEEPEKLAGPLLADTYVTLLKGRNAWYGQMLAKGELSPDMGDSISGKGMIQGVSAVEAFFELLSHSSLNVLHPEENKPVAPVELCPILKTLYKILISREQSSEAILQALRDENLNDPRERIEIAQSHAFYMPSLLGQP

SEQ ID NO: 3737 - protein, 160 aa, Glycine max
  unsure (1)..(160): unsure at all Xaa locations
  Clone ID: PAT_MRT3847_17878C.1.pep
TMWFGESEANVREIFDKARQSAPCVLFFDELDSIATQRGSSVGDAGGAADRVLNQLLTEMDGMTAKKTVFIIGATNRPDIIDPALLRPGRLDQLIYIPLPDESSRLQIFKACLRKSPISKDVDLSALARFTHGFSGADITEICQRACKYAIXEDIEKGIE

SEQ ID NO: 3738 - protein, 53 aa, Glycine max
  unsure (1)..(53): unsure at all Xaa locations
  Clone ID: PAT_MRT3847_18209C.1.pep
YAVVVVLIICIYISPFAXSWGRQGWLVPHEIVHLAIRTAAQSIDVSVNMVFTF

SEQ ID NO: 3739 - protein, 209 aa, Glycine max
  Clone ID: PAT_MRT3847_1894C.1.pep
LEARQVAAATIFYLSSVKEFRKLIGENPDVIPALVELVKEGTTCGRKNAVVAIFGLLLLPRNHQRVIAAGAVPALLDIIASSNKDELVTESLAVLAALAENVDGAREILQGSALRLIVGMLRSATSREGKEHSASILLSLCVNVGAEVVAVLAKEPSLMPLLYSLLTDGTCHAAKKARFLIKVIQDFHETRSAGLKGSSLPQERSLHVW

SEQ ID NO: 3740 - protein, 411 aa, Glycine max
  Clone ID: PAT_MRT3847_19228C.1.pep
EDRSAPRQVNSRSSTIENSSPCRPNPTSSFSLQYLYPNPPFLNKNKKIKKNPSISWTSMTSLSTHHTYSRKQKSLGLLCTNFLSLYNKEGVRLVGLDDAASRLGVERRRIYDIVNVLESVGVLTRKAKNQYTWKGFCAIPAALQELKDEGLKENPGSFDDSNDNAKVSDDEEEEEETFPNINIGSQSEKENPDYTATVKSSKNENRREKSLALLTQNFVKLFVCSNFEMISLDEAAKLLLGNANNRTKVRRLYDIANVLSSMNLIEKTHTTNTRKPAFRWLGVRGKTWGGSVDLAQNSNVKESRKRMFGTDIGNISFKRNKVDLSMDGQNSKMQNQHENISPRAQLEKIIIKKDAKQTSESYQFGPLAPAYVPKVGTHENNSLKQVHDFENLSYHHSPQYQNQGSNVEKSI

SEQ ID NO: 3741 - protein, 429 aa, Glycine max
  Clone ID: PAT_MRT3847_19229C.1.pep
RSSTIENSSPCRPNPTSSFSLQYLYPNPPFLNKNKKIKKNPSISWTSMTSLSTHHTYSRKQKSLGLLCTNFLSLYNKEGVRLVGLDDAASRLGVERRRIYDIVNVLESVGVLTRKAKNQYTWKGFCAIPAALQELKDEGLKENPGSFDDSNDNAKVSDDEEEEEETFPNINIGSQSEKENPDYTATVKSSKNENRREKSLALLTQNFVKLFVCSNFEMISLDEAAKLLLGNANNRTKVRRLYDIANVLSSMNLIEKTHTTNTRKPAFRWLGVRGKTWGGSVDLAQNSNVKESRKRMFGTDIGNISFKRNKVDFLFMNPIQKINYRIYKINTKNISPRAQLEKIIIKKDAKQTSESYQFGPFAPAYVPKVGTSENNSVKKVHDWDSLAQEHRPQYQNQGVTPLKDLFSHYMEAWKSWYSEAAGKKSTKTL

SEQ ID NO: 3742 - protein, 580 aa, Glycine max
  Clone ID: PAT_MRT3847_19587C.1.pep
MEGGGVEVDASAFRECLSLSWKNPYVLRLAFSAGIGGLLFGYDTGVISGAILYIRDDFKAVDRKTWLQEAIVSMALAGAIVGAAVGGWINDRFGRRKAILLADTLFFIGSAVMAAATNPSILIVGRVFVGLGVGMASMASPLYISEASPTRVRGALVSLNGFLITGGQFLSYLINLAFTKAPGTWRWMLGAAVVPALIQIVLMMMLPESPRWLFRKGREEEGKEILRKIYPPQEVEAEINTLRESVEIEIKEAEATDNISIVKMLKTKTVRRGLYAGMGLQIFQQFVGINTVMYYSPTIVQLAGFASNRTALLLSLVTSGLNAFGSILSIYFIDRTGRKKLVLFSLCGVVFSLVVLTVVFHQSTTHSPMVSALETSHFNNTCPDYHSAANPGGWDCMKCLKASPNCGFCASGANKLLPGACLISNDTTKDQCHEEDRLWYTVGCPSKFGWLAIVGLALYIIFFSPGMGTVPWVVNSEIYPLRYRGICGGMASTSNWVSNLIVAQSFLSLTQAIGTSWTFMIFIFITIAAIIFVIIFVPETKGLPMEEVEKMLEGRDLNFKFWQRSSHCGEEVPPQKTQSN

SEQ ID NO: 3743 - protein, 416 aa, Glycine max
  Clone ID: PAT_MRT3847_19765C.1.pep
LCRIRPTRPPFHFNSFSRDRLLFLLCSSLSHSSFPSPLRSPNFPQTFSLRRFAAAPLARPPPPPPPLDAMAQKIGKSTRRPGASSKARVYADVNVVRPKEYWDYESLNVQWGEQDDYEVVRKVGRGKYSEVFEGVHCTDGEKCVIKILKPVKKKKIKREIKILQNLCGGPNIVQLLDIVRDQQSKTPSLIFEYVNNTDFKVLYPTLSDYEIRYYIYELLKALDYCHSQGIMHRDVKPHNVMIDHEQRKLRLIDWGLAEFYHPGKEYNVRVASRYFKGPELLVDLQDYDYSLDLWSLGCMFAGMIFRKEPFFYGHDNYDQLVKIAKVLGTDGLSAYLDKYRIELDPHLAALIGRHSRKPWAKFINVENHHMAVPEAVDFVDKLLRYDHQERPTAKEAMAHPYFNPVRNAESSRTRAH

SEQ ID NO: 3744 - protein, 103 aa, Glycine max
  Clone ID: PAT_MRT3847_20044C.1.pep
MSGGGCSSIVWFRRDLRIEDNPALTAGVRAGAVVAVFIWAPEEEGQYYPGRVSRWWLKNSLAHLDSSLRNLGTPLITKRSTDTLSSLFEVVKSTGATQLFFNH

SEQ ID NO: 3745 - protein, 307 aa, Glycine max
  unsure (1)..(307): unsure at all Xaa locations
  Clone ID: PAT_MRT3847_20045C.1.pep
MSGGGCSSIVWFRRDLRIEDNPALTAGVRAGAVVAVFIWAPEEEGQYYPGRVSRWWLKNSLAHLDSSLRNLGTPLITKRSTDTLSSLFEVVKSTGATQLFFNHLYDPLSLVRDHRAKEVLTAQGITVRSFNADLLYEPWDVNDAHGRPFTTFAAFWERCLSMPYDPESPLLPPKRIIPGDASRCPSDTLLFEDELEKASNALLARAWSPGWSNANKALTTFINGPLIEYSKNRRKADSATTSLLSPHLHFGELSVKKVFHLVRIKQVLWANEGNKAXGEESVNLFLKSIGLREYSRYISFNPPYTHE

SEQ ID NO: 3746 - protein, 136 aa, Glycine max
  unsure (1)..(136): unsure at all Xaa locations
  Clone ID: PAT_MRT3847_20986C.1.pep
MAASDVEYRCFVGGLAWATDDHSLHNAFSTYGEVLESKIILDRETQRSRGFGFVTFSTEEAMRNAIEGMNGKELDGRNITVNEAQSRGGRGGGGGGYGGGRGGGGYGGGGRRDGGGGYGGRSGGYXGGGGYCGGGG

SEQ ID NO: 3747 - protein, 362 aa, Glycine max
  Clone ID: PAT_MRT3847_21549C.1.pep
MEVMCGAKVGNMVHKAKPYVLTVGLQFGMAGTYLFTMASLNHGMSRLVFIVYRNAIAALALAPFALIFERKVRPKMTWTVFIQILVLGFLEPVVDQGFTFLGMQYTSASFASAVMNAVPSVTFVLAVIFRLEHIKIRELRSQAKVIGTLVTFAGALLMTLYKGPQFDLFHHSNTTHQQGGSHTQNHSHWVAGTLFICLGCLAWSSFYILQSITVKRYPAELSLSSLICLAGALQSAVVALIADHNPRAWAIGFDYSLYGPLYTGIMSSGIAYYIQGLVMQSRGPVFVTSFNPLCMIIVTALGSFLLGEHLYLGSIIGGIIIAVGLYSVVWGKGKDYKDDTSSPATTKETETMQLPITLPNNK

SEQ ID NO: 3748 - protein, 59 aa, Glycine max
  unsure (1)..(59): unsure at all Xaa locations
  Clone ID: PAT_MRT3847_21599C.1.pep
NSSDLRGGEITTMTNQKRXEKAKSKYWRGDTLNNWDSSQEQRKYMYIYAIGLLVLESXA

SEQ ID NO: 3749 - protein, 484 aa, Glycine max
  Clone ID: PAT_MRT3847_22087C.1.pep
MSTQNRRSSFSSSTTSSLAKRHASASTTSSSAAAPTNMAKKRPPLSNLTNTVAHRNSSSSVPCAAKFAKTKKEVVPACSGNKRPTLANVKPASAVIFPKANSFPVRDEAPPTPPPPVATVTVPAPVVDVSPSKSDTMSVSMDESMSSCDSFKSPDIEYVDNIDVAAVDSIERKTFSNLNISDSTEGNICSRDILVELEKGDKFVNVDNNYADPQLCATFACDIYKHLRASEAKKRPSTDFMEKIQKEINSSMRAILIDWLVEVAEEYRLVPDTLYLTVNYIDRYLSGNVMNRQRLQLLGVASMMIASKYEEICAPQVEEFCYITDNTYFKEEVLQMESAVLNFLKFEMTAPTVKCFLRRFVRAAQGVDEVPSLQLECLTNYIAELSLMEYSMLGYAPSLVAASAIFLAKFILFPSKKPWNSTLQHYTLYQPSDLCVCVKDLHRLCCNSPNSNLPAIREKYSQHKYKYVAKKYCPPSIPPEFFQN

SEQ ID NO: 3750 - protein, 483 aa, Glycine max
  Clone ID: PAT_MRT3847_22149C.1.pep
MVVDALNEDLRINGAVEPLPEDFDATAVIIDPVPLAVVDNGIVKEEAQIIKGKEKREIVLGRNIHTSCLEVTEPEADDEVTGDREAHMASVLARYKRALTERTKHHLGYPYNLDFDYGALTQLQHFSINNLGDPFIESNYGVHSRQFEVGVLDWFARLWELEKNEYWGYITNCGTEGNLHGILVGREVFPDGILYASRESHYSVFKAARMYRMECEKVDTLWSGEIDCDDFKAKLLSHQDKPAIINVNIGTTVKGAVDDLDLVIKKLEEAGFSHDRFYIHCDGALFGLMMPFVKRAPKVTFKKPVGSVSVSGHKFVGCPMPCGVQITRLEYVNALARDVEYLASRDATIMGSRNGHAPIFLWYTLNRKGYRGFQKEVQKCLRNAHYFKGRLVEAGIGAMLNELSSTVVFERPHDEEFIRKWQLACKGNIAHVVVMPNITIEKLDDFLNELLEKRATWFQDGKDQPYCISSDVGEKNCLCALHK

SEQ ID NO: 3751 - protein, 333 aa, Glycine max
  Clone ID: PAT_MRT3847_2249C.1.pep
MVVLSQPALNQFFLLKTCKPTPLFAGIPVVDLTDPDAKTHIVNACRDFGFFKLVNHGVPLQFMANLENETLGFFKKPQSEKDRAGPPDPFGYGSKRIGPNGDVGWVEYLLLNTNPDVISPKSQFIFREGPQNFRAVVEEYIRAVKNMCYEVLELMAEGLGITQRNVLSRLLKDEKSDSCFRLNHYPPCPEVQALNGRNLVGFGEHTDPQIISVLRSNSTSGLQICLTDGTWVSVPPDQTSFFINVGDTLQVMTNGRFKSVKHRVLADPTKSRLSMIYFGGPPLCEKIAPLPSLMLKGEESFYKEFTWWEYKKAAYASRLADNRLGPFEKSAAD

SEQ ID NO: 3752 - protein, 317 aa, Glycine max
  Clone ID: PAT_MRT3847_22514C.1.pep
HDLFQWATKRARREEMSVEQKAAGKEEEGKLQKGIAEFYDESSGIWENIWGDHMHHGFYDPDSTVSVSDHRAAQIRMIQESLRFASLLSENPSKWPKSIVDVGCGIGGSSRYLAKKFGATSVGITLSPVQAQRANSLAAAQGLADKVSFEVADALKQPFPDGQFDLVWSMESGEHMPDKAKFVGELARVAAPGATIIIVTWCHRDLGPDEQSLHPWEQDLLKKICDAYYLPAWCSTSDYVKLLQSLSLQDIKSEDWSRFVAPFWPAVIRSAFTWKGLTSLLSSGQKTIKGALAMPLMIEGYKKDLIKFAIITCRKPE

SEQ ID NO: 3753 - protein, 350 aa, Glycine max
  Clone ID: PAT_MRT3847_22518C.1.pep
MATVVRIPTISCIHIHTFRSQSPRTFARIRVGPRSWAPIRASAASSERGEIVLEQKPKKDDKKKLQKGIAEFYDESSGLWENIWGDHMHHGFYDSDSTVSLSDHRPAQIRMIQESLRFASVSEERSKWPKSIVDVGCGIGGSSRYLAKKFGATSVGITLSPVQAQRANALAAAQGLADKVSFQVADALQQPFSDGQFDLVWSMESGEHMPDKAKFVGELARVAAPGATIIIVTWCHRDLGPDEQSLHPWEQDLLKKICDAYYLPAWCSTSDYVKLLQSLSLQDIKSEDWSRFVAPFWPAVIRSAFTWKGLTSLLSSGQKTIKGALAMPLMIEGYKKDLIKFAIITCRKPE

SEQ ID NO: 3754 - protein, 56 aa, Glycine max
  Clone ID: PAT_MRT3847_22786C.1.pep
VSHREARVRQAEGRVGTGLSWRERPGLGDKRGVGFAQKRGPARPEHAIGVGGRWVD

SEQ ID NO: 3755 - protein, 209 aa, Glycine max
  Clone ID: PAT_MRT3847_23153C.1.pep
MTQRDRRTLSFPAVHPCEAISPPTLVTSLITLSQSICNFQPQSFPTQRRNARETIRQISIVLMFLQEIRLIPNSTILSLAELHFTLQKIHFLLQDCTLQGSRLLLLAKSQHVASLFPALLRSVATSLDVLPLHQLHLCPEVRELADLVTKQASKAKFQLDPSDARATKTLHTLLRQFSMGTEPDLTSMQGILHYLQIRTWTDCNTEIKF

SEQ ID NO: 3756 - protein, 589 aa, Glycine max
  Clone ID: PAT_MRT3847_23468C.1.pep
MESATQVGAAAQPSSASASVIPSAFDGTLGRHLARRLAETGVRDVFSVPGDFNLTLLDHLIAEPSLNLVGCCNELNAGYAADGYARAKGVGACVVTFTVGGLSVLNAIAGAYSENLPVICIVGGPNSNDYGTNRILHHTIGLPDFTQELRCFQAITCFQAVVNNLDDAHELIDTAISTALKESKPVYISISCNLPGIPHPTFARDPVPFFLAPKVSNQEGLEAAVEATAALLNNAVKPVIVGGPKLRVAKAQKAFLEFAEASGYPIAVMPSGKGLVPEHHPHFIGTYWGAVSSSFCGEIVESADAYVFVGPIFNDYSSVGYSLLIKKEKAIIVQPNRVTIGNGPSLGWVFMADFLTALAKKVKTNTAAVENYRRIYVPPGIPLRREKDEPLRVNVLFKHIQELLSGDTAVIAETGDSWFNCQKLHLPENCGYEFQMQYGSIGWSVGATLGYAQAATDKRVIACIGDGSFQVTAQDISTMIRCGQKTIIFLINNGGYTIEVEIHDGPYNVIKNWDYTRFVDAIHNGQGKCWTAKVRTEDDLTEAIAKATGPQKDSLCFIEVFVHKDDTSKELLEWGSRVAAANSRPPNPQ

SEQ ID NO: 3757 - protein, 80 aa, Glycine max
  Clone ID: PAT_MRT3847_23929C.1.pep
VKQLNDLLTEKNKDTGWDVPIHVDAAIGGFIAPFLYPELEWDFRLPLVKSINVSGHKYGLVYPGVGWVIWRSKDDLPEEL

SEQ ID NO: 3758 - protein, 64 aa, Glycine max
  Clone ID: PAT_MRT3847_24039C.1.pep
APPIYNPALNPLMARPLIWPAAPAQAWYPQQAAYPQQSAVSVPPIVAGLHHNSHYSQFRMCLLL

SEQ ID NO: 3759 - protein, 251 aa, Glycine max
  Clone ID: PAT_MRT3847_24409C.1.pep
MYGRSDSYESDLALLDSIRRHLLGESELIFGAPNFGSGRSSSFSSLDSCLSDDWGELPFKEDDSEDMVLYGVLRDAVNVGWVPSLDAGSPESVSSGFPAVKLEPDVMPALINPCPPPAPAVEEKKVVPPKGKHYRGVRQRPWGKFAAEIRDPAKNGARVWLGTFETAEDAALAYDRAAYRMRGSRALLNFPLRVNSGEPDPVRVKSKRSSSPESTAALPAKRKKVVVVGTVQEQVGSQVAECTRGEQLLVS

SEQ ID NO: 3760 - protein, 197 aa, Glycine max
  Clone ID: PAT_MRT3847_247C.1.pep
AIYTFISMWFVGGLTAFHLYLISTNQTTYENFRYRYDRRANPYNTGVFNNFLEIFCTSIPQSKNNFRAKVPMEPVLPARSVGGGFMSPSMGKAVDDIEMGRKTVWADMGTALDPSEGQLNDRVAVKDGEFGELSPEIRTTVDETSHRAGMHPRRSSWGRKSGSWEMSPEVLALAAKVGESNRMGGGSSSLTTENRHT

SEQ ID NO: 3761 - protein, 401 aa, Glycine max
  Clone ID: PAT_MRT3847_25106C.1.pep
EPPSRFFPLLCFFTGQSVLHSHSLIAKSRRKEKKDEVERRWEWQREDYKEMGRWVNCRGNIFPFLGMVMAMLAQSGSMVVIKVAMTDGINKYVMVVYSLALSTILLLPFALFLHRSERPPLTFSALCSFFLLAFFGSSGQIMAYVGIDLSSPTLASAMLNLIPAFTFILALIFRMEEVHWRHSSSQAKFLGTIVSIAGAFVVILYKGPPIFKTHSSNSSNKFLFSQQLNWILGGMFCAGDSIVCSLWYIYQASVAYKYPAVTTIVFFQLLFSTIQCGVFALIVVQDQTEWELKLDIGLIGIVYQAIAATLIRYILCTWCVLKAGPLFCSMFKPVAIIFSVFMGAIFLGDDLSLGSLIGAVIIVIGFYAVLWGKSIEDNKIEKGVENLESSCHNVPLLQNRT

SEQ ID NO: 3762 - protein, 92 aa, Glycine max
  Clone ID: PAT_MRT3847_25202C.1.pep
KMLEKFHLVGIPPAPRGLPQIEVTFDIHANGIVTVSPKDKSTGKEQQITIRSSGGLSDDEIEKMVKEAELHAQKDQERKALIDIINSADTTI

SEQ ID NO: 3763 - protein, 175 aa, Glycine max
  Clone ID: PAT_MRT3847_25688C.1.pep
MLTVLLLFSLLLTTSTSHNIISYPHFQQLNVKQILTETKLNPTNTYKHLQHQKLNIATEASSPAKYKLKLVHRDKVPTFNTSHDHRTRFNARMQRDTKRVAALRRHLAAGKPTYAAEAFGSDVVSGMEQGSGEYFVRIGVGSPPRNQYVVMDSGSDIIWVQCEPCTQCFHQSDPV

SEQ ID NO: 3764 - protein, 194 aa, Glycine max
  unsure (1)..(194): unsure at all Xaa locations
  Clone ID: PAT_MRT3847_25700C.1.pep
MATWVNGWGKLLPFLGMLMAMLTQSGSMVVIKFAMTDGMNKYVMVVYSMALSSSILLPFVLFLHRSELPLLTVPALGSFFLLALFASSAHIMAYVGIELSSPTLASAILNVIPAFTFVLALIFRMEEVHWRYFSSQAKVLGTIVSIGGAFVVILYKGPPIFRTHSSYTSNKLXFSGHPNWILGGIFLVADSFLS

SEQ ID NO: 3765 - protein, 461 aa, Glycine max
  Clone ID: PAT_MRT3847_25891C.1.pep
MGEEEIDDSPLIQGFPSGDVPFRRTGNVERAVAHIITGVIGAGVLSLAWSVAQLGWIAGPFIIIVFAGTTFLSANLLSDCYRFPHPLYGNIRCPSYIDAVKVYLGDSRQKVCGVLVHASLYGATTAYVITSATSIRAILKSNCYHKEGHQAPCKYGDAVYMMLFGLVQIIMSFIPDLHNMAWVSIVAAIMSFTYSSIGLGLGITTVIENGRIMGSLTGVPASNIADKLWLVFQGIGDIAFAYPYTVILLEIQDTLESPPPENKTMKKASMIAILITTFFYLCCGCFGYAAFGNQTPGNLLTGFGFYEPYWLIDFANACIVLHLVGGYQIYSQPIYGAVDRWCSKRYPNSGFVNNFYQLKLPRLPAFQLNMFRICFRTAYVVSTTGLAILFPYFNQVIGVLGALGFWPLAIYFPVEMYFVQRKVEAWSRKWIVLRTFSFICFLVSLLGLIGSLEGIISEKLS

SEQ ID NO: 3766 - protein, 461 aa, Glycine max
  Clone ID: PAT_MRT3847_26125C.1.pep
MDGKNSLQITRSGIGAYDDDGHAKRTGNLQSAVAHIITAVIGSGVLSLAWSTSQLGWIGGPFSLLCCAIVTYISSFLLSDCYRTPDPVTGKRNYSYMDAVRVYLGYKRTCVAGFLQFLTLYGTSIAYVLTTATSLSAILRSNCYHKKGHEAPCKYGGNLYMALFGLVQIVMSFIPDLHNMAWVSVVAALMSFTYSFIGLGLGIATVIKNGRIMGSLTGIPTDKIADKFWLVFQALGDIAFAYPYSILLLEIQDTLESPPPENQTMKKASMIAIFITTFFYLCCGCFGYAAFGNDTPGNLLTGFGFFEPFWLIDLANACIILHLVGGYQIYSQPIYSTVDRWASRKFPNSGFVNNFYRVKLPLLPGFQLNLFRFCFRTTYVISTIGLAIFFPYFNQILGVLGAINFWPLAIYFPVEMYFVQQKIAAWSSKWIVLRTFSFACFLVTVMGLVGSLEGIVSAKLK

SEQ ID NO: 3767 - protein, 461 aa, Glycine max
  Clone ID: PAT_MRT3847_26127C.1.pep
MDGKKSLQITRSGTGAYDDDGHAKRTGNLQSAVAHIITAVIGSGVLSLAWSTSQLGWIGGPVALLCCAIVTYISSFLLSDCYRTPDPVTGKRNYSYMDAVRVYLGYKRTCVAGFLQFLTLYGTSIAYVLTTATSLSAILRSNCYHKKGHEAPCKYGGNLYMALFGLVQIVMSFIPDLHNMAWVSVVAALMSFTYSFIGLGLGIATVIKNGRIMGSLTGIPTDKIADKFWLVFQALGDIAFAYPYSILLLEIQDTLESPPPENQTMKKASMVAIFITTFFYLCCGCFGYAAFGNDTPGNLLTGFGFFEPFWLIDLANACIILHLVGGYQIYSQPIYSTVDRWASRKFPNSGFVNNFYKVKLPLLPGFQLNLFRFCFRTTYVISTTGLAIFFPYFNQILGVLGAINFWPLAIYFPVEMYFVQNKIAAWSSKWIVLRTFSFACFLVTGMGLVGSLEGIVSAKLK

SEQ ID NO: 3768 - protein, 215 aa, Glycine max
  Clone ID: PAT_MRT3847_26404C.1.pep
MPGKIPIELGNLISLALLNMAYNYFEGKIPIEIGSLQKLQYFYVAKNNLTGEVPPSIGNLSSLIELSVGLNNLEGKIPQEVCSLKNLSLMSVPVNKLSGTIPSEVFSLSSLTNLLDLSQNSLSGSLPNVVSKLKNLEKMDVSENHLSGDIPGSIGDCTSLEYLYLQGNSFHGIIPTTMASLKGLRRLDMSRNHLSGSIPKGLQNISFLAYFNASF

SEQ ID NO: 3769 - protein, 326 aa, Glycine max
  Clone ID: PAT_MRT3847_26633C.1.pep
MERSGGMVTGSHERNELVRVRHGSDSGSKPLKNLNGQICQICGDTIGLTATGDLFVACHECGFPLCHSCYEYELKNVSQSCPQCKTTFTSRQEGAEVEGDDDDEDDADDLDNGINYGQGNNSKSGMLWEEDADLSSSSGHDSHIPNPHLVNGQPMSGEFPCATSDAQSMQTTSDPMGQSEKVHSLPYADPKQPGPESDEEIRRVPEIGGESAGTSASRPDAGSNAGTERAQGTGDSQKKRGRSPADKESKRLKRLLRNRVSAQQARERKKAYLIDLETRVKDLEKKNSELKERLSTLQNENQMLRQILKNTTASRRGSNSGTNNAV

SEQ ID NO: 3770 - protein, 321 aa, Glycine max
  Clone ID: PAT_MRT3847_26634C.1.pep
MERSGGMVTGSHERNELVRVRHGSDSRSKPLKNLNGQSCQICGDTIGLTATGDVFVACHECGFPLCHSCYEYELKHMSQSCPQCKTAFTSHQEGAEVEGDDDDEDDADDLDNEINYGQGNSSKAGMLWEEDADLSSSSGHDSQIPNPHLANGQPMSGEFPCATSDAQSMQTTSIGQSEKVHSLSYADPKQPGPESDEEIRRVPEIGGESAGTSASQPDAGSNAGTERVQGTGEGQKKRGRSPADKESKRLKRLLRNRVSAQQARERKKAYLIDLETRVKDLEKKNSELKERLSTLQNENQMLRQVHSCYHCHHHNVIYTCL

SEQ ID NO: 3771 - protein, 127 aa, Glycine max
  unsure (1)..(127): unsure at all Xaa locations
  Clone ID: PAT_MRT3847_26863C.1.pep
PLHHAAAPLARIAGAAVAGRVQAEGGPPXRASSGRLRSHHRTALPDPPPPRALHAGEHPGHEDHPRSTPPVVVLSRPLLCHTGPPRASKAAIDDAPGGGACAYVSDEPAGPTGAPNYRGRVSVPRIQ

SEQ ID NO: 3772 - protein, 67 aa, Glycine max
  Clone ID: PAT_MRT3847_27175C.1.pep
KSEAVLSYVCDGILKLLDTRLVPSAASGDSKVFYLKMKGDYHRYLAELKTGADRKEGVVITLSDLQS

SEQ ID NO: 3773 - protein, 115 aa, Glycine max
  Clone ID: PAT_MRT3847_27189C.1.pep
IFYSLGMALSKDISDVKGDKAYGIDTLAIRLGQKWVFWICIILFEMAFGVALLAGATSSYLWIKIVTGLGHAILASILLYQAKSIYLSNKVSTISFYMLIWKLLYAAYFLMALIR

SEQ ID NO: 3774 - protein, 62 aa, Glycine max
  Clone ID: PAT_MRT3847_27885C.1.pep
APPAPPPHEPSLPPRVNKESSCLLRGQTPLGVKIGGQNFLGFFYLGPQPQNMVFQMPRSSPP

SEQ ID NO: 3775 - protein, 371 aa, Glycine max
  Clone ID: PAT_MRT3847_28411C.1.pep
MATPVEPPNGIRTEGKHYYSMWQTLFEIDSKYVPIKPIGRGAYGIVCSSVNREINEKVAIKKIQNAFENRVDALRTLRELKLLRHLHHENVIALKDIMMPVHRNSFKDVYLVYELMDTDLHQIIKSSQALSNDHCQYFLFQLLRGLKYLHSANILHRDLKPGNLLINANCDLKICDFGLARTNCSKNQFMTEYVVTRWYRAPELLLCCDNYGTSIDVWSVGCIFAELLGRKPIFPGSECLNQLKLIINILGSQREEDIEFIDNPKAKKYIKSLPYSPGTPLSQLYPNAHPLAIDLLAKMLVFDPTKRISVTQALQHPYMAPLYDPNCDPPAVIPIDLDIDEDLGEEMIRDMMWKEMLHYHPESAMESAGLC

SEQ ID NO: 3776 - protein, 122 aa, Glycine max
  unsure (1)..(122): unsure at all Xaa locations
  Clone ID: PAT_MRT3847_28504C.1.pep
NMKLAEDVDLEKIAKDTHGYVGADLAALCTEAALQCIREKMDVIDLEDETIDAEILNSMAVTNEHFQTALGSSNPSALRETVVEVPNVSWEDIGGXENVKRELQETVQYPVEHPEKFENLEC

SEQ ID NO: 3777 - protein, 702 aa, Glycine max
  Clone ID: PAT_MRT3847_29389C.1.pep
MAETETFAFQAEINQLLSLIINTFYSNKEIFLRELISNASDALDKIRFESLTDKSKLDAQPELFIHIIPDKTNNSLTIVDSGIGMTKADLVNNLGTIARSGTKEFMEALAAGADVSMIGQFGVGFYSAYLVAEKVIVTSKHNDDEQYVWESQAGGSFTVTRDTSGEVLGRGTKITLFLKEDQLEYLEERRLKDLIKKHSEFISYPISLWVEKTTEKEISDDEDEEEKKDEEGKVEDVDEEKEKEEKKKKKIKEVSHEWSLVNKQKPIWMRKPEEITKEEYSAFYKSLTNDWEEHLAVKHFSVEGQLEFKAILFVPKRAPFDLFDTRKKPNNIKLYVRRVFIMDNCEELIPEYLGFVKGIVDSEDLPLNISREMLQQNKILKVIRKNLVKKCLELFFEIAENKEDYNKFYEAFSKNLKLGIHEDSQNKGKIAELLRYHSTKSGDELTSLKDYVTRMKEGQSDIYYITGESKKAVENSPFLEKLKKKGYEVLFMVDAIDEYAVGQLKEFEGKKLVSATKEGLKLDESEDEKKKQEELKEKFDNLCKVIKDVLGDKVEKVVVSDRVVDSPCCLVTGEYGWTANMERIMKAQALRDNSMAGYMSSKKTMEINPENPIMEELRKRADADKNDKSVKDLVLLLFETALLTSGFSLDEPNTFGNRIHRMLKLGLSIDEDAAEADADADMPPLEEEAEADAEGSKMEEVD

SEQ ID NO: 3778 - protein, 699 aa, Glycine max
  Clone ID: PAT_MRT3847_29390C.1.pep
MAETETFAFQAEINQLLSLIINTFYSNKEIFLRELISNASDALDKIRFESLTDKSKLDAQPELFIHIIPDKTNNTLTIVDSGIGMTKADLVNNLGTIARSGTKEFMEALAAGADVSMIGQFGVGFYSAYLVAEKVIVTTKHNDDEQYVWESQAGGSFTVTRDNTGEVLGRGTKITLYLKEDQLEYLEERRLKDLIKKHSEFISYPISLWIEKTTEKEISDDEDEEEKKDEEGKVEDVDEEKEKEEKKKKKIKEVSHEWSLVNKQKPIWMRKPEEITKEEYSAFYKSLTNDWEEHLAVKHFSVEGQLEFKAILFVPKRAPFDLFDTRKKPNNIKLYVRRVFIMDNCEELIPEYLGFVKGIVDSEDLPLNISREMLQQNKILKVIRKNLVKKCLELFFEIAENKEDYNKFYEAFSKNLKLGIHEDSQNKGKIAELLRYHSTKSGDEMTSLKDYVTRMKEGQSDIYYITGESKKAVENSPFLEKLKKKGYEVLYMVDAIDEYAVGQLKEFEGKKLVSATKEGLKLDESEDEKKKQEELKEKFDNLCKVIKDVLGDKVEKVVVSDRVVDSPCCLVTGEYGWTANMERIMKAQALRDNSMAGYMSSKKTMEINPENPIMEELRKRADADKNDKSVKDLVLLLFETALLTSGFSLDEPNTFGNRIHRMLKLGLSIDEDAGEADAEMPPLEEAEADAEGSKMEEVD

SEQ ID NO: 3779 - protein, 107 aa, Glycine max
  Clone ID: PAT_MRT3847_29691C.1.pep
ASYKNQYYYHGLIVNDYGNLEKKTDKYGNPVHAARVTYVSTITADGGYNDDINKQHDSTTAYGVYTGRQHSSVGSDGDTDKYYGTTGGYNDDSNLRHETTGVYSLHT

SEQ ID NO: 3780 - protein, 555 aa, Glycine max
  Clone ID: PAT_MRT3847_30033C.1.pep
LSTRPPTRPPTRPVHWFEKFNWFISSENYLVISGRDAQQNEMIVKRYMSKGDLYIHADLHGASSTVIKNHKPAQPVPPLTLNQAGCFTVCHSQAWDSKIVTSAWWVYPHQVSKTAPTGEYLTVGSFMIRGKKNFLPPHPLIMGFGLLFRLDESSLGSHLNERRVRGEEEAADDYEETGPLEDKSDSESEKDVTDIEPATDLERNGNLSADSHKPLPEDFPADPSQTSLATTDAETAISQDFPAKETSTLNMVDREILSGAGGNGLASVTPQLEELLDQVLELGPIAKSNKKYGIEKSQIDLDTEQYLEQSKTAVRDKPYISKAERRKLKKEQKHGEEDLNVEHGKYESKLKDISANLQAKEDQNLKKGGGQKISRGQKGKLKKIKEKYADQDEEERSIRMALLASSGKSIKKEETSSENDTLDQGKKPGSGPSDAPKVPSDAPKICYKCKKAGRTYLGIVRSNQMVFCIGMQLVKLKKIPNRLLLTLPKQIGWQWKKMILMTTWVDASSTTLVLFCASDLERNNNGEVYKLSPASVSTSLCSKLFFNNPSFDLCK

SEQ ID NO: 3781 - protein, 205 aa, Glycine max
  Clone ID: PAT_MRT3847_30133C.1.pep
MTRKRIQIKKIDNISSRQVTFSKRRKGLFKKAQELSTLCDADIALIVFSATSKLFEYASSSMHQVIERRDSHSAMNRLDRPSIELQIENDSNEILRKKVEDKNRELRQMNGEDLQGLTLQELHKLEEHLKRGLINVSKVKDEKLMQEISTLKRKGVELMEENQRLKQVVPSLIHVHRQSSESILSNSSNLPEDGGSDTSLKLGLP

SEQ ID NO: 3782 - protein, 206 aa, Glycine max
  Clone ID: PAT_MRT3847_30135C.1.pep
MTRKRIQIKKIDNISSRQVTFSKRRKGLFKKAQELSTLCDADIALIVFSATSKLFEYASSSMHQVIERHDRYSAIHRLDRPSIELQIESDSNNILRKKVEDKTRELRQMNGEDLQGLTLQELQKLEEHLKRSLTNVSKVKDAKFMQEISTFKRKGVELMEENQRLKQVPSLIHAHSYRQSSESILSNSSNLPEDGGSNTSLKLGLP

SEQ ID NO: 3783 - protein, 84 aa, Glycine max
  unsure (1)..(84): unsure at all Xaa locations
  Clone ID: PAT_MRT3847_30144C.1.pep
TGPTRGPTGGLGYAGTGGPVYVPKGGPGYLTGTGYGVNTGGAHTAAGYSKELRQHDPSHGDQNEKKGXIMANIKDKLPVGPSYK

SEQ ID NO: 3784 - protein, 135 aa, Glycine max
  unsure (1)..(135): unsure at all Xaa locations
  Clone ID: PAT_MRT3847_30158C.1.pep
MAGRGKAIGAGAAKKATSRSSKAGLQFPVGRIARFLKAGKYAERVGAGAPVYLAAVLEYLAAEVLELAGNAARDNKKTRIVPRHIQLAVRNDEELTKLLGGATIASGGVMPNXHQHXLPKKAGSSKASHADDDDN

SEQ ID NO: 3785 - protein, 78 aa, Glycine max
  unsure (1)..(78): unsure at all Xaa locations
  Clone ID: PAT_MRT3847_3026C.1.pep
NDEELTVEERNLLSVAYKNVIGARRASWRIISSIEQKEESRGGXDHVFVIRDYRSKIEYELFYLCYGVLKLLGTGVIA

SEQ ID NO: 3786 - protein, 339 aa, Glycine max
  Clone ID: PAT_MRT3847_30912C.1.pep
PFCKKFSIEPRAPEFYFSQKIDYLKDKVQPSFVKERRAMKREYEEFKVRVNALVAKAQKTPDEGWTMQDGTSWPGNNSRDHPGMIQVFLGHSGAHDIEGNELPRLVYVSREKRPGYQHHKKAGAENALVRVSAVLTNAPFILNLDCDHYVNNSKAVREAMCFLMDPVVGRDLCYVQFPQRFDGIDRSDRYANRNTVFFDVNMKGLDGIQGPMYVGTGCVFNRQALYGYSPPSMPKLPKSSSCCCCPSKKQTKDVSELYRDAKREELDAAIFNLREIDNYDEYERSMLISQMSFEKTFGLSTVFIESTLMENGGLPESADPSMLIKEAIHVSSPIYDMPR

SEQ ID NO: 3787 - protein, 86 aa, Glycine max
  Clone ID: PAT_MRT3847_3128C.1.pep
LSNLKSLFFFPYYLKCLFASKLKHFINYTRGLKSIILRQHRKTNQNQRWGLGCLPLLSRSSYLLKKQMYVPSFKFIITNQQSRVFT

SEQ ID NO: 3788 - protein, 56 aa, Glycine max
  Clone ID: PAT_MRT3847_31418C.1.pep
FNTVHTSTPQVSGAAKLEKNIQFQGPPWGGKKNDMQKPKGALMKLHIQNPKGKAPL

SEQ ID NO: 3789 - protein, 88 aa, Glycine max
  Clone ID: PAT_MRT3847_3144C.1.pep
FPGRPTRPSCSSGACLRLPPRWQPDCLLLVDVVINSIITEPCYVNITSSSAHKSYNPISLFFSSHVKLPNCSMVQNSVLQYIINYRLY

SEQ ID NO: 3790 - protein, 100 aa, Glycine max
  Clone ID: PAT_MRT3847_32234C.1.pep
DDQGPKVDEYGNDDNQTDEYSNRARADSVTYVATTTAAGGYRDDINKQHDTTNAYSEHTGRQHSSGGSDSDTNKHEGTTDGCNDDTNKHNRTGSVYGIDA

SEQ ID NO: 3791 - protein, 225 aa, Glycine max
  unsure (1)..(225): unsure at all Xaa locations
  Clone ID: PAT_MRT3847_32783C.1.pep
EAYDVXXIKFRXXXAVTNFDISXYXXXXIXXSSNLLXGELARRKKDNDPRNKDIDYNKSVVTSVNNEETVQVQAGNNNNENDSEWKMVLFNHPSQQQQAKGNGSDQKIMNCGNYRNSAFSMALQDLIGIDSVGSGQHNMLDESSKIGTHFSNTSSLVTSLSSSREASPEKRGPSLLFPMPPMETKIVNPIGTSVTSWLPSPTVQMRPSPAISLSHLPVFASWTDT

SEQ ID NO: 3792 - protein, 134 aa, Glycine max
  Clone ID: PAT_MRT3847_33044C.1.pep
MSGKGAKGLITGKTSAANKDKDKKKPISRSSRAGLQFPVGRIHRLLKSRTTANGRVGATAAVYSAAILEYLTAEVLELAGNASKDLKVKRITPRHLQLAIRGDEELDTLIKGTIAGGGVIPHIHKSLINKSSKE

SEQ ID NO: 3793 - protein, 135 aa, Glycine max
  Clone ID: PAT_MRT3847_33047C.1.pep
MSGKGAKGLITGKTSAANNKDKDKKKPISRSSRAGLQFPVGRIHRLLKSRTTANGRVGATAAVYSAAILEYLTAEVLELAGNASKDLKVKRITPRHLQLAIRGDEELDTLIKGTIAGGGVIPHIHKSLINKSSKE

SEQ ID NO: 3794 - protein, 619 aa, Glycine max
  Clone ID: PAT_MRT3847_33935C.1.pep
FLFSFWVLHFPSSSASAFRRFSSRRKMDVRRRPIPPSGDRRQTQKLKNTATTDSQTLLPLYLTNALFFAVFFSVAYFLLHRWREKIRTATPLHAVTPAETAAIVSLVASAVYLLGFFGVASRASLDELSDDEIILKEDSRAPGPCAAALSDSCSLPNNKIQDQFPLPPRAVHSLAKEKQHIPSPPQVDSPVSVSVSVSSSSDDEDEEIVQAVVSGSIPSYSLESRLGDTRRAATIRHEVVQRLTSRSLSGLPLEGFNYDSILGQCCEMPIGFVQIPVGVAGPLLLDGKEFTVPMATTEGCLVASTNRGCKAIYVSGGASSVLLRDGMTRAPVVRFPSAQRAAQLKFFLEDPLNFDSLAVVFNKSSRFARLQNIQCAIAGKNLYMRFRCSTGDAMGMNMVSKGVQNVLDFLQSDFPDMDVIGISGNFCSDKKAAAVNWIEGRGKSVVCEAIIKEDVVKKVLKTSVEAMVKLNMLKNLTGSAMAGALGGFNAHASNIVSAIYIATGQDPAQNVESSHCITMMEAINDGKDLHVSVTMPSIEVGTVGGGTQLASQSACLNLLGVKGANKESPGANSRLLATIVAGSVLAGELSLMSAIAAGQLVKSHMKYNRSSRDISTIVQ

SEQ ID NO: 3795 - protein, 177 aa, Glycine max
  unsure (1)..(177): unsure at all Xaa locations
  Clone ID: PAT_MRT3847_33965C.1.pep
MNSIAFLVMGVAVNENEDDDEVGADQPAQQLKRKKLWGLLVCHHESPRYVPLPLLYACFFLAHVLAVHVNKEFELQRQVREKSILRMQTMLSDMLVRESSPLSIVXGTTNIMDLEKCDGAALLYGGKVWRLQNAPTESHIRDIAFWLSDVHRDSTGLSTDSLHDAGYTGAAALGDMI

SEQ ID NO: 3796 - protein, 410 aa, Glycine max
  Clone ID: PAT_MRT3847_34828C.1.pep
MVAMAAATASTQLIFSKPRSPSRLCPFQLCVFDTKQVLSSSSGRRRHVGGSGVRCMAVGEAATTGTKKRSGYELQTLTNWLLKQEQAGVIDAELTIVLSSISMACKQIASLVQRANISNLTGVQGAVNVQGEDQKKLDVVSNEVFSNCLRSSGRTGIIASEEEDVPVAVEESYSGNYIVVFDPLDGSSNIDAAVSTGSIFGIYSPNDECLADIGDDPTLDTTEQRCVVNVCQPGSNLLAAGYCMYSSSIIFVLTLGNGVFVFTLDPMYGEFVLTQENLQIPRAGKIYAFNEGNYQLWDDKLKKYIDDLKDPGPSGKPYSARYIGSLVGDFHRTLLYGGIYGYPRDKKSKNGKLRLLYECAPMSFIVEQAGGKGSDGHQRILDIQPTEIHQRVPLYIGSVEEVEKVEKYLA

SEQ ID NO: 3797 - protein, 46 aa, Glycine max
  unsure (1)..(46): unsure at all Xaa locations
  Clone ID: PAT_MRT3847_34899C.1.pep
MADSFREENVWILEFSEHAVRYXEMVVFMENVAKTVDVEELTVVER

SEQ ID NO: 3798 - protein, 766 aa, Glycine max
  Clone ID: PAT_MRT3847_35003C.1.pep
MGAVILPDLGTEILIPVCAIIGIAFALFQWVLVSKVKLSAARDASSNAGGGKNGYNDYLIEEEEGLNDHNVVLKCAEIQNAISEGATSFLFTEYKYVGIFMVAFAILIFLFLGSVEGFSTSYQPCTYDQTKMCKPALATAVFSTISFLLGGVTSLISGFLGMKIATYANARTTLEARKGVGKAFITAFRSGAVMGFLLAANGLLVLYIAINLFKIYYGDDWGGLFEAITGYGLGGSSMALFGRVGGGIYTKAADVGADLVGKVERNIPEDDPRNPAVIADNVGDNVGDIAGMGSDLFGSYAESSCAALVVASISSFGVNHELTAMLYPLIISSVGILVCLLTTLFATDFFEIKAVKEIEPALKKQLIISTALMTIGIAIVSWIALPTSFTIFNFGVQKDVKNWQLFLCVAVGLWAGLIIGFVTEYYTSNAYSPVQDVADSCRTGAATNVIFGLALGYKSVIIPIFAIAISIFVSFTFAAMYGIAVAALGMLSTIATGLAIDAYGPISDNAGGIAEMAGMSHRIRERTDALDAAGNTTAAIGKGFAIGSAALVSLALFGAFVSRAAITTVDVLTPKVFIGLIVGAMLPYWFSAMTMKSVGSAALKMVEEVRRQFNTIPGLMEGTAKPDYATCVKISTDASIKEMIPPGALVMLTPLVVGILFGVETLSGVLAGSLVSGVQIAISASNTGGAWDNAKKSIEAGASEHARSLGPKGSDCHKAAVIGDTIGDPLKDTSGPSLNILIKLMAVESLVFAPFFATHGGLLFKI

SEQ ID NO: 3799 - protein, 432 aa, Glycine max
  Clone ID: PAT_MRT3847_35116C.1.pep
APFFSTDAFIGVNIGSDISDMPGPTEIVALLKAQSIQHVRLYDADQALLLALANTGIRVTVSVPNDQLLGIGQSNATAANWVTRNVIAHVPATNITAICVGSEVLTTLPNAAPILVSAINFIHSALVAANLDRQIKVSSPHSSSIILDSFPPSQAFFNRTWNPVMVPMFKFLQSTGSCLMLNVYPYYDYQQSNGVIPLDYALFRPLPPNKEAVDSNTLLHYTNVFDAVVDAAYFAMSDLNFTNIPIMVTESGWPSKGDSSESDATVDNANTYNSNLIRHVLNNTGTPKHPGIAVSTYIYELYNEDLRSGPVSEKNWGLFYANGEPVYTLHLTGAGIIFANDTTNQTFCVTKSNADPKMLQAALDWACGPGKVDCSPLLQGQPCYEPDNVVAHSTYAFNAYYQKMDKSPGSCDFKGVATVTTTDPSMAIHTPT

SEQ ID NO: 3800 - protein, 96 aa, Glycine max
  Clone ID: PAT_MRT3847_3536C.1.pep
MPRKRFQEPQPKTGLQHTQDFLRKIGLGKENYYFWKQIGKALLCTYAVIGAVWVYNETSPLGWWTLKPKPKEELELAHLYERRQFPYPGDEEAMQE

SEQ ID NO: 3801 - protein, 287 aa, Glycine max
  Clone ID: PAT_MRT3847_35389C.1.pep
MAIQDQNGFFRSQGGPPEGAGVSLSSGHSVTHIQLNDQFSCGNDYALKVRKPYTITKQRERWTDEEHKKFLEALKLYGRAWRRIEEHVGTKTAVQIRSHAQKFFSKVLHDPTGNNTNTVESIEIPPPRPKRKPMHPYPRKLVETPNKEISIPEQPMKSNSLKSSDFDQENQSPKSVLSGVGSDSIGSSDSDKPNGSLSPMSSISGFHTSSFTRAKPKTTTSEEEAGMDTDSTHDEKPLMKFKLPPNGCVSIKEDNTAEESSGRTFKLFGMTLFVTDTCKPSPTIEEC

SEQ ID NO: 3802 - protein, 89 aa, Glycine max
  unsure (1)..(89): unsure at all Xaa locations
  Clone ID: PAT_MRT3847_35541C.1.pep
YSQQQQFLPFNXLANIDSAAYLQQQLPFRQLAVVYPQQFLPFKQLASLNSAAYLQQQQLSPFNQLADVSPADFXHNNSCWSFYLHAAPN

SEQ ID NO: 3803 - protein, 125 aa, Glycine max
  unsure (1)..(125): unsure at all Xaa locations
  Clone ID: PAT_MRT3847_36480C.1.pep
MPPKTQKQKEQKEEEEHGAVFSVSGPVIVAENMIGVAMYELVRVGHENLVGEVIRIDADKATIQVYEETAGVTVGDPVFRSGQPLSVELGPGLMETIYDGIQRPSKGIADDSNSIYIXRGIDLPA

SEQ ID NO: 3804 - protein, 99 aa, Glycine max
  unsure (1)..(99): unsure at all Xaa locations
  Clone ID: PAT_MRT3847_36525C.1.pep
MAHYQKHXDDHGHNVDXYGNVEKQTDEYGKSVHAATSSYVPTRTAAGGYSEDINRQHESTNAYXVDTGRQHSSGGYDGGTNKHQGTTGGYAADTNRHHG

SEQ ID NO: 3805 - protein, 213 aa, Glycine max
  unsure (1)..(213): unsure at all Xaa locations
  Clone ID: PAT_MRT3847_36598C.1.pep
MAVLMIFHMFAAISLPAYGDAFIGVNIGTDATNMPSPTEVVALLKAQGIQHVRLYDADRAMLRTLANTGIRVIVSVPNDQILGIGQSNATAANWVARNVIAHVPATNITAIAVGSEVLTSLPNAAPVLVSALKFIQAALVAANLDQQIKVSTPHSSSVILDSFPPSQAFFNKTWDPVMVPLLNFLQSTGSYLMLNVYPYYDYMQTNGVXPLDY

SEQ ID NO: 3806 - protein, 234 aa, Glycine max
  Clone ID: PAT_MRT3847_36609C.1.pep
MDTRIGSLDAAKPACNDVVSCNHTTSAAIQPCVPATVINGAGGDSTLGGHLARRLVEIGVTDVFSVPGDFNLTLLDHLIAEPALNLVGCCNELNAGYAADGYARARGVGACVVTFTVGGLSVLNAIAGAYSENLPLICIVGGPNSNDYGTSRILHHTIGLPDFSQELRCFQTITCFQAVVNNLEDAHELIDTAISTALKESKPVYISISCNLPGIPHPTFSRDPVRFPCLKMSN

SEQ ID NO: 3807 - protein, 608 aa, Glycine max
  Clone ID: PAT_MRT3847_36610C.1.pep
MDTKIGSLDAPKPNSNDVVSCNLTSSAAIQPCLPATVINGAGCSDSTLGGHLARRLVEIGVTDVFSVPGDFNLTLLDHLIAEPALHLVGCCNELNAGYAADGYARARGVGACVVTFTVGGLSVLNAIAGAYSENLPLICIVGGPNSNDYGTSRILHHTIGLPDFSQELRCFQTITCFQAVVNNLEDAHELIDTAISTALKESKPVYISISCNLPGIPHPTFSRDPVRFSLSPRLSNKMGLEAAVEAAAEFLNKAVKPVLVGGPKLRVATASDAFVELADACGYALAVMPSAKGQVPEHHPHFIGTYWGAVSTAFCAEIVESADAYLFAGPIFNDYSSVGYSLLLKKEKAIIVQPDRVVIANGPAFGCVLMKDFLKALAKRLKHNNTAYENYHRIFVPDGHPLKAAPREPLRVNVLFQHIQNMLSGETAVIAETGDSWFNCQKLKLPKACGYEFQMQYGSIGWSVGATLGYAQAVPEKRVIACIGDGSFQLTAQDVSTMLRCGQKTIIFLINNGGYTIEVEIHDGPYNVIKNWNYTGLIDAIHNGEGKCWTAKVFCEEELVEAIATATGPKKDSLCFIEVIVHKDDTSKELLEWGSRVSAANSRPPNPQ

SEQ ID NO: 3808 - protein, 99 aa, Glycine max
  Clone ID: PAT_MRT3847_3683C.1.pep
MSGRGKGGKGLGKGGAKRHRKVLRDNIHGITKPAIRRLARRGGVKRINGLIYEETRGVLKIFLENVIRDAVTYTEHARRKTVTAMDVVYALKRQGRTLY

SEQ ID NO: 3809 - protein, 103 aa, Glycine max; identical to SEQ ID NO: 3555
  Clone ID: PAT_MRT3847_3684C.1.pep

SEQ ID NO: 3810 - protein, 103 aa, Glycine max; identical to SEQ ID NO: 3555
  Clone ID: PAT_MRT3847_3685C.1.pep

SEQ ID NO: 3811 - protein, 430 aa, Glycine max
  Clone ID: PAT_MRT3847_37654C.1.pep
VGTATTHYYASEEFKIKQHKTKSFTCSPQEVISGGDYKQSTYCHLLLGLYFSDQVEFITSAFIYSMVQAFTTFEELWREICNDIRDGTLSSRIKSSKMRKAALDIISPSPNLASKLEDSCKELEGVDWFGLIPKLWPNAKYVYSIMTGSMQPYLKKLMHYANGLPLVSAEYGSTESWIGVNVDPSLPPEDVTFAVVPTFSYFEFIPLHRNEKNFSSGGDDFIEDKPIPLSQIKVGQEYEVVLTTFTGLYRCRLGDVVEVAGFHNGTPKLNFVCRRKLILTINIDKNTEKDLQLVVERGSHILNMTSRGELVDFTSYADVSKQPGHYVIYWEIKGEVEDKILGACCNEMDKSFADHGYVVSRKTNSIGPLELCVLESGTFKKILDSFIANGAALSQFKTPRCTNNHVLLKILNTCTTKKFRSTAYNSSMEQ

SEQ ID NO: 3812 - protein, 102 aa, Glycine max
  Clone ID: PAT_MRT3847_38272C.1.pep
MDLGQMQRQWIDYTKSLFHEGIMDGQFLQLQQHQDENNPDIVVDIVSHFLADSDRLLKDLTFAINDNRVDFIQVDDHVHQLTGNTSCTSAHRVNTARIAFRN

SEQ ID NO: 3813 - protein, 73 aa, Glycine max
  Clone ID: PAT_MRT3847_38797C.1.pep
DGLVRTLKDLANSPYSPEYDIAGITDPFLHIRLLKLLRVLGEGNADASDTMNDILAQVATKTESNKVAGNAIL

SEQ ID NO: 3814 - protein, 244 aa, Glycine max
  Clone ID: PAT_MRT3847_38946C.1.pep
MGRGRVQLKRIENKINRQVTFSKRRSGLLKKAHEISVLCDAEVALIVFSTKGKLFEYSSDPCMEKILERYERYSYAERQLVASDQPLTENWTLEHAKLKARLEVLQKNQRNFMGQDLEGLSIKELQNLEHQLDSALKHIRSRKNQIMHESISELHKKDKVLQEQNNTLAKKIKEKEKALAQHAQMEQRGDEMDLTSSALVPHPLETSNIRESSQIRGEGDNEGTPTPTRANAILPSWMLRPSNE

SEQ ID NO: 3815 - protein, 244 aa, Glycine max
  Clone ID: PAT_MRT3847_38947C.1.pep
MGRGRVQLKRIENKINRQVTFSKRRSGLLKKAHEISVHCDAEVALIVFSTKGKLFEYSSDPCMEKILERYERYSYAERQLVASDQPLTENWTLEHAKLKARLEVLQKNQRNFMGQDLEGLSIKELQNLEHQLESALKHIRSRKNQLMYESISELHKKDKALQEQNNTLAKKIKEKEKALAQQAQLERLGDEVDLTSSALVPQPLVTSNIRTSSQIRGEGDNEGTPTPTQANAILPPWMLRPTNE

SEQ ID NO: 3816 - protein, 463 aa, Glycine max
  Clone ID: PAT_MRT3847_39240C.1.pep
PRVRESQANGVHSSKHDDDGRLKRRGTWLTATSHIVTAVIGSGVLSLAWAVAQLGWIAGPAILTIFSVITVFTSSLLSDCYRYPDSVHGTRNHNYREMVKNILGGRKYLFCGLAQFANLIGTGIGYTVTASISMVAVIRSNCFHKYGHEAKCHTSNYPYMTIFAVIQILLSQIPDFQELSGLSIIAAVMSFGYSSIGIGLSIAKIAGGNDAKTSLTGLIVGEDVTSQEKLWNTFQAIGNIAFAYAFSQVLVEIQDTLKSSPPENQAMKKATLAGCSITSLFYMLCGLLGYAAFGNKAPGNFLTGFGFYEPYWLVDIGNVFVFVHLVGAYQVFTQPVFQLVETWVAKRWPESNFMGKEYRVGKFRFNGFRMIWRTVYVIFTAVVAMILPFFNSIVGLLGAISFFPLTVYFPTEMYLVQAKVPKFSLVWIGVKILSGFCLIVTLVAAAGSIQGIIADLRIYEPFK

SEQ ID NO: 3817 - protein, 36 aa, Glycine max
  Clone ID: PAT_MRT3847_39392C.1.pep
QFVQENPNKVGPVGGKPGEKSMKPDPKLSKNYFAGG

SEQ ID NO: 3818 - protein, 767 aa, Glycine max
  unsure (1)..(767): unsure at all Xaa locations
  Clone ID: PAT_MRT3847_40132C.1.pep
MSEMASPDPEGLDGVRMTWNVWPRTKVESSKCVIPLAATVALIRPHPDIPRLQYAPLRCKTCSSALNPFSRVDFTAKIWICPFCYQRNHFPPHYHAISETNFPGELYPQYTTVEYLLPLSNSLNPSPVFLFLLDTCLIDEEIHFLKSALRRAIGLLPDNALVGFVSFGTQVQVYELGFSDMSKVXVFRGSKEIPXNKILDQLGLSAAGRRPQKGAAPGVAGAGGFPNSGITRFLLPASECEYTLNALLDELQTDQWPVPPGRRPARCTGVALSVAAGLLSACNPGTGARIIALVGGPCTEGPGAIVSKDLSDPVRSHKDLDKDAAPFFKKAVKFYEGLAKQLVGQGHVLDIFASALDQVGVAEMKVAVERTGGLVVLSESFGHSVFKDSFKRVFEDGEQSLGLCFNGTLEINCSKEIKIQGIIGPCTSLEKKGPSVADTVIGEGNTTAWKMCGLDKSTCLTVMFDLSSSDRSNTPGAVNPQLYLQFLTSYQDPSGQSVLRVTTVTRRWVDSSVSSEELVQGFDQETAAVVMARFASLKMESEETFDATRWLDRFLIRLCSKFGDYRKDDPSSFTLNPSFSLFPQFMFNLRRSQFVQVFNNSPDETAYFRMLLDRENISNAAVMIQPSLISYSFNALPAPALLDVASIAADKILLLDSYFSVVIFHGMTIAQWRNLGYQNQQEHQAFAQLLRAPHDDAQMIIRERFPVPRLVVCDQHGSQARFLLAKLNPSATYNNAHEMAAGSDVIFTDDVSLQVFFEHLQRLAVQS

SEQ ID NO: 3819 - protein, 93 aa, Glycine max
  Clone ID: PAT_MRT3847_40249C.1.pep
SVSFDELIALYAVSDVCLVSSTRDGMNLVSYEYIATQQKRHGVMILSEFAGAAQSLNGSIIVNPWNTEELADAIHDAVTMGAEQRALNYQKLA

SEQ ID NO: 3820 - protein, 197 aa, Glycine max
  unsure (1)..(197): unsure at all Xaa locations
  Clone ID: PAT_MRT3847_40255C.1.pep
ARDAILYECVQTIMSVEDNGGLRVLAINILGRFLSHKDNNIRYVGLNMLMKAVTVDAQAVQRHRATILEWLKDSDASIQKRALELVCILVNETNVNALTKELVEYLEVSDPDFRADLTAKICSIVSKFSPEKIWYIDQMLNVLSEAGNFVKDEVWHAXIVVISNASELHGYTVRALYKAFKMAGEQETLVRLTVWGI

SEQ ID NO: 3821 - protein, 261 aa, Glycine max
  Clone ID: PAT_MRT3847_40335C.1.pep
LPLRYLYELDQHLDRFLRSASMSKIDPPFDRGSIRRILIQTVSASKSRKGSLRYWLSAGPGDFQLSPSCCHRSSLYAIVIQDLSPSSPNFRGVKVVTSSIPIKHPKFAITKSVNYLPNVLSKVEAEEAGAFVGIWLDGEGFVAEGPNMNVAFVTKDKELIMPHFDKILSGCTAKRVLTLAESLLREGKLKGIRVKTVTVEEGKQADEMMLLGSGVLVCPVVQWDEQVIGDGKEGPITQALLNLIVEDMKSGPSTVRIPVPY

SEQ ID NO: 3822 - protein, 100 aa, Glycine max
  Clone ID: PAT_MRT3847_40690C.1.pep
ESNALALPLVVKKLLRVSPLASSFAVSILRKICDKREEGVLVEALQVGVFQKLLVMLQVGCDESTKENATRLLKLLNGYRNKAECTDSSSLDFKHLKKPF

SEQ ID NO: 3823 - protein, 431 aa, Glycine max
  unsure (1)..(431): unsure at all Xaa locations
  Clone ID: PAT_MRT3847_40691C.1.pep
MVLSWTRRNVFRRAKKEKEQSQLEVEVVIPNHFRCPVSLELMTDPVTLSTGITYDRVSIEKWIEGGNRTCPVTNQVLTTFDLIPNHAIRMMIQDWCVXNSSYGIERIPTPRIPISAYEVSDTCTRILSACQRGDDKRCQELVGKIKVWSRESERNKRCIVGAGAGAVLAYAFDCFSSNSIEKHVVVLEEVLEVMTWMIPFGEEGVSKLSSGASLNSLVWFLEGKDLASRQSAALLLKEVCVQELAKVGEVVEALVKMVREPIGSTSTKACLATIFNLVSLAANREGIDQRFVELGLVSLLLEAIVDGEKGVCEKALGVLDCICDCEKGKEVVKSNALALPLVVRKLLRVSPLASGFAVSILRKICDKREEGILIEALQVGLFQKLLVLLQVGCDESTKENATGLLKLLNGYRNKAECTDSSLNFEHLKKPF

SEQ ID NO: 3824 - protein, 491 aa, Glycine max
  Clone ID: PAT_MRT3847_40848C.1.pep
MAGIAGTCPLGALLRNSVSENNGKISVVHYEGLRLQQRMQMPSPSQYISASSSAPRCRTIKAMASPTVGAPKREKDPKKRVVITGMGLVSVFGSDVDAFYNKLLEGESGISLIDRFDASNFSVRFGGQIRDFSSEGYIDGKNDRRLDNCWRYCIVAGKRALDDANLGKQVLDTMDKTRIGVLVGSGMGGITAFSNGVEALVQKGYKKITPFFIPYSITNMGSALLAIDTGLMGPNYSISTACATANYCFCAAANHIRKGEADIMVVGGTEAAIMPSGLGGFIACRALSHRNEDPKKASRPWDKDRDGFVMGEGSGVLVMESLESATKRGAKIIAEYLGGAITCDAHHMTDPRADGLGVSSCISKSLEDAGVSPEEVNYVNAHATSTLAGDLAEVNAIKKVFKDTSELKMNATKSMIGHGLGAAGGLEAIATIKAITTGWLHPSINLDNLEASVTIDTVPNVKKKHEVNVGISNSFGFGGHNSVVVFAPFRP

SEQ ID NO: 3825 - protein, 279 aa, Glycine max
  Clone ID: PAT_MRT3847_40928C.1.pep
LSLGVAKVAENKSFKGSLMGISIGTVTQAGTVTSTQKIWRSLQALGAMAFAYSFSIILIEIQDTIKSPPAEHKTMRKATTLSIAVTTVFYLLCGCMGYAAFGDNAPGNLLTGFGFYNPYWLLDIANLAIVIHLVGAYQVFSQPLFAFVEKWSARKWPKSNFVTAEYDIPIPCFGVYQLNFFRLVWRTIFVLLTTLIAMLMPFFNDVVGILGAFGFWPLTVYFPIDMYISQKKIGRWTSRWLGLQLLSASCLIISLLAAVGSMAGVVLDLKTYKPFKTSY

SEQ ID NO: 3826 - protein, 513 aa, Glycine max
  Clone ID: PAT_MRT3847_40929C.1.pep
MLPRSRTLPSRIHQGIIEERHDVRPYVQVEVRPNNIQTETQAMNIQSNYSKCFDDDGRLKRTGTFWTATAHIITAVIGSGVLSLAWAVAQLGWVAGPVVMFLFAVVNLYTSNLLTQCYRTGDSVNGHRNYTYMEAVKSILGGKKVKLCGLIQYINLFGVAIGYTIAASVSMMAIKRSNCYHSSHGKDPCHMSSNGYMITFGIAEVIFSQIPDFDQVWWLSIVAAIMSFTYSSVGLSLGVAKVAENKTFKGSLMGISIGTVTQAGTVTSTQKIWRSLQALGAMAFAYSFSIILIEIQDTIKSPPAEHKTMRKATTLSIAVTTVFYLLCGCMGYAAFGDNAPGNLLTGFGFYNPYWLLDIANLAIVIHLVGAYQVFSQPLFAFVEKWSVRKWPKSNFVTAEYDIPIPCFGVYQLNFFRLVWRTIFVLLTTLIAMLMPFFNDVVGILGAFGFWPLTVYFPIDMYISQKKIGRWTSRWIGLQLLSVSCLIISLLAAVGSMAGVVLDLKTYKPFKTSY

SEQ ID NO: 3827 - protein, 58 aa, Glycine max
  Clone ID: PAT_MRT3847_41138C.1.pep
MQRLWIDYTKSLFLEGFLDGQLLQLHHLQYDNNLDFGDEVVFLLFEDSERLLIDLTFA

SEQ ID NO: 3828 - protein, 80 aa, Glycine max
  unsure (1)..(80): unsure at all Xaa locations
  Clone ID: PAT_MRT3847_41731C.1.pep
DSTFHTTTTSTALRSIPTATIPSYQKHYHDQGRKVDXYFYVEKQTDXYCNPVHAASVTYLTTITSSXVYSDYIYNQHYTT

SEQ ID NO: 3829 - protein, 161 aa, Glycine max
  Clone ID: PAT_MRT3847_42207C.1.pep
MTSSSAAARKNLSKIACNRLQKELVEWQVNPPTGFKHKVTDNLQRWVVEVTGAPGTLYANETYQLQVDFPENYPMEAPQVIFLHPAPLHPHIYSNGHICLDILYDSWSPAMTVSSICISILSMLSSSTTKQRPEDNDRYVKNCRNGRSPKETRWWFHDDKV

SEQ ID NO: 3830 - protein, 306 aa, Glycine max
  Clone ID: PAT_MRT3847_4236C.1.pep
MKSSRRLLRIGLVSAWYSSNIGVLLLNKYLLSNYGFKYPIFLTMCHMTACSLFSYVAIAWLKMVPMQTIRSRLQFLKIAALSLIFCFSVVFGNVSLRYLPVSFNQAVGATTPFFTAVFAYVMTFKREAWLTYLTLVPVVTGVVIASGGEPSFHLFGFIVCIAATAARALKSVLQGILLSSEGEKLNSMNLLLYMAPIAVVFLLPATLIMEENVVGITLALARDDVKIIWYLLFNSALAYFVNLTNFLVTKHTSALTLQVLGNAKGAVAVVVSILIFRNPVSVTGMMGYSLTVLGVVLYSQAKKRSK

SEQ ID NO: 3831 - protein, 176 aa, Glycine max
  Clone ID: PAT_MRT3847_42797C.1.pep
MKGRVRWDEANIGEIEANKPVRQKITEPKTPYHPMIDDDSSLSPVRGSFDACIDNENRAEAIWSALNDVASSSRRGTGQSGGWTSSEDEPEAMEQDDDDSETDRNLSFKEHRKAHYDEFLKVKELQETGSLEDESDEDHNSQPSKAEKCESSSLSHSVKEMVIEGKKSSTPPANGS

SEQ ID NO: 3832 - protein, 469 aa, Glycine max
  Clone ID: PAT_MRT3847_43305C.1.pep
MQALHSPTLRASPLDPLRGPNNAAANRRSSSAKRVFFVSATVAPKVSAPQRQKDPKKRVVITGMGLASVFGNDVEGYYEKLLAGESGITAIDRFDASKFPTRFGGQIRGFSAEGYIDGKNDRRLDDCLRYCIVAGKKALENADLAPDNHSKIDKERAGVLVGSGMGGLTVFSDGVQALIEKGHRKITPFFIPYAITNMGSALLGIDLGFMGPNYSISTACATSNYCFYAAANHIRRGEADLMIAGGTEAAIIPIGLGGFVACRALSQRNDDPKTASRPWDKERDGFVMGEGAGVLVMESLEHAMKRGAPIIAEYLGGAVNCDAYHMTDPRSDGLGVSTCIQSSLEDAGVSPEEVNYINAHATSTLAGDLAEINAIKKVFKDTSGIKINATKSMIGHCLGAAGGLEAIATVKAITTGWLHPTINQFNPEPAVDFDTVANVKQQHEINVAISNSFGFGGHNSVVAFSAFKP

SEQ ID NO: 3833 - protein, 32 aa, Glycine max
  Clone ID: PAT_MRT3847_43345C.1.pep
KKKKNLKKFKKKKKKKKKKKKKKKKKKKGRPF

SEQ ID NO: 3834 - protein, 470 aa, Glycine max
  Clone ID: PAT_MRT3847_43486C.1.pep
MGSMHIETPETFADGSKNFDDDGRAKRTGTWITASAHIITAVIGSGVLSLAWAIAQMGWVAGPAVLFVFSLITYFTSTLLADCYRSPDPVHGKRNYTYSEVVKANLGGRKFQLCGLAQYINLVGVTIGYTITASLSMGAVKKSNCLHKHGHQDECKVKDNAFMIAFACIQILLSQIPNFHKLSWLSIVAAVMSFAYSSIGLGLSIAKIIGGGHVRTTLTGVEVSGTEKVWKMFQAIGDIAFAYAFSNVLIEIQDTLKSSPPENKVMKRASLIGIMTTTLFYVLCGCLGYAAFGNDAPSNFLTGFGFYEPFWLIDFANVCIAVHLVGAYQVFVQPIFGFVEKWSKENWTESQFINGEHTLNIPLCGSYNVNFFRVVWRTAYVIITAVVAMLLPFFNDFLALIGALSFWPLTVYFPIEMYIKKSNMQRFSFTWTWLKILSWVCLIISIISLVGSIQGLSVSIKKYKPFQAEQ

SEQ ID NO: 3835 - protein, 395 aa, Glycine max
  unsure (1)..(395): unsure at all Xaa locations
  Clone ID: PAT_MRT3847_43512C.1.pep
MVKETEYYDVLGVSPTASEAEIKKAYYIKARQVHPDKNPNDPLAAQNFQVLGEAYQVLSDPAQRQAYDAHGKSGISTEAIIDPAAIFAMLFGSELFEEYIGQLAMASMASMDIFTEGEQFDSKKLQEKMRVVQKEREEKLAEILKNRLNQYVQGNKEGFVNDAEAEVARLSNAAYGVDMLNTIGYIYARQAAKELGKKAIYLGVPFIAEWFRNKGHSIKSQVTAATGAIALIQLQEDMKKQLSSEGDYTEEELEEYMQNHKKLMIDSLWKLNVADIEATLSRVCQMVLQDNGAKKEELRARAKGLKTLGKIFQRVKSANGNENESVXNKAVHKLNGSETGNDTSPSTSPKSSSPDFSSQSPYVEAPRFAGMQFDYNFPRPTAPPGAQRPTSTSKD

SEQ ID NO: 3836 - protein, 138 aa, Glycine max
  Clone ID: PAT_MRT3847_43712C.1.pep
MEEESKEKKKDTKEEPRYRGVRRRPWGKFAAEIRDPARHGARVWLGTFLTAEEAARAYDRAAYEMRGALAVLNFPNEYPSCSSMNSSSTLAPSSSSSNSMLKSDHGKQVIEFECLDDKLLEDLLDCDDYAYEKDLPKN

SEQ ID NO: 3837 - protein, 137 aa, Glycine max
  unsure (1)..(137): unsure at all Xaa locations
  Clone ID: PAT_MRT3847_44678C.1.pep
MAGKGGKGLLAAKTTAANKDKDKDKKRPISRSSRAGIQFPVGRIHRQLKQRVQANGRVGATAAVYLASILEYLTAEVLELAGNASKDLKVKRITPRHLQLAIRGDEELDTLIKGTIAXVRGVIPHIHKSLINKTAKD

SEQ ID NO: 3838 - protein, 262 aa, Glycine max
  Clone ID: PAT_MRT3847_44731C.1.pep
MAASAPTPREEFVYMAKLAEQAERYEEMVEFMEKVSASAESEELTVEERNLLSVAYKNVIGARRASWRIISSIEQKEESRGNEDHVAVIRDYRSKIEAELSNICDGILKLLDTRLVPSAASGDSKVFYLKMKGDYHRYLAEFKTGADRKEAAESTLSAYKAAQDIANTELPPTHPIRLGLALNFSVFYYEILNSPDRACSLAKQAFDEAIAELDTLGEESYKDSTLIMQLLRDNLTLWTSDMQDDGADEIKEAAPKGDGEQN

SEQ ID NO: 3839 - protein, 261 aa, Glycine max
  Clone ID: PAT_MRT3847_44732C.1.pep
MASAPTPREEFVYMAKLAEQAERYEEMVEFMEKVSASAESEELTVEERNLLSVAYKNVIGARRASWRIISSIEQKEESRGNEDHVAVIRDYRSKIEAELSNICDGILKLLDTRLVPSAASGDSKVFYLKMKGDYHRYLAEFKTGADRKEAAESTLSAYKAAQDIANTELPPTHPIRLGLALNFSVFYYEILNSPDRACSLAKQAFDEAIAELDTLGEESYKDSTLIMQLLRDNLTLWTSDMQDDGADEIKEAAPKGDGEQN

SEQ ID NO: 3840 - protein, 258 aa, Glycine max
  Clone ID: PAT_MRT3847_44887C.1.pep
MACSATSASLFSANPTPLFSPKSSLSLPNNSLHLNPLPTRPSLSLTRPSHTRRSFVVKASSSELPLVGNTAPDFEAEAVFDQEFINVKLSDYIGKKYVVLFFYPLDFTFVCPTEITAFSDRHAEFEALNTEILGVSVDSVFSHLAWIQTDRKSGGLGDLNYPLISDVTKSISKSYGVLIPDQGIALRGLFIIDKEGVIQHSTINNLAIGRSVDETKRTLQALQYVQENPDEVCPAGWKPGEKSMKPDPKLSKDYFAAV

SEQ ID NO: 3841 - protein, 48 aa, Glycine max
  Clone ID: PAT_MRT3847_45016C.1.pep
LTRGRTRWKKKKKKKGKNKKKKKKKKKKKKKKKKKKKKKKKKKRGRPF

SEQ ID NO: 3842 - protein, 244 aa, Glycine max
  Clone ID: PAT_MRT3847_45510C.1.pep
MWKLKIAEGGDGLISVNNFIGRQHWEFDPNAGTPQERAQVERVREEYKKNRFCIKQSGDLLMRMQLTKENTCGPILARVNVKDTENVTEEALITTMRKAINFYSSIQAHDGHWPAESAGPLFFLQPLVMALYITGSLNDVLGPEHQKEIIRYLYNHQNEDGGWGLHIESHSTMFGSALSYIALRILGEGPEDGEDRAMARGRKWILDHGGLEAIPSWGKFWVTVLGVYEWSGCNPLPPELLFGY

SEQ ID NO: 3843 - protein, 37 aa, Glycine max
  unsure (1)..(37): unsure at all Xaa locations
  Clone ID: PAT_MRT3847_45570C.1.pep
LPVSPLYLHQSSVLLQQLPLAHXLAQSIRAQQLHELV

SEQ ID NO: 3844 - protein, 498 aa, Glycine max
  Clone ID: PAT_MRT3847_45795C.1.pep
MALHFLLLLLFAVSVVAADEEPFIGVNIGTDLSDMPHPTQVVALLKAQQIRHVRLYDADQAMLLALAKTGIQVAVTVPNEEILAIGQSNSTAANWVSRNVVAHYPATNITAICVGSEVLTTLPNAAKVLVSAIKYIHSALVASNLDRQVKVSTPLSSSIILDSFPPSQAFFNRSLNPVLVPLLDFLQSTGSYLMLNIYPYYDYMQSNGVIPLDYALFKSLPPNKEAVDSNTLLHYTNVFDAMVDAAYFAMAFLNYTNIPVVVTESGWPSKGGSNEPDATVDNANTYNSNLIKHVFNKTGTPKHPGIDVSTYIYELYNEDMKSGPLSEKNWGLFDANGTPIYILHLTESGAVLANDTSNNTFCIAKDGADPKMLQAALDWACGPGKVECSPLLQGQPCYEPDNVIAHANYAFDTYYHKMGKTPDACDFNGVATISTSDPSHGSCLFPGSVGKNGTLGNFTAPSMNSTNSDSSAYKFSCDLRIRSLLMVTGFLLWGVVLL

SEQ ID NO: 3845 - protein, 81 aa, Glycine max
  unsure (1)..(81): unsure at all Xaa locations
  Clone ID: PAT_MRT3847_46662C.1.pep
NVVTSVGIRLVNKALMATYGFNFATXLTALHHSTTTLLTLTLKSISYIHTSHLPLSDIIKFVSFAYFFIVVINVILMLNSY

SEQ ID NO: 3846 - protein, 478 aa, Glycine max
  Clone ID: PAT_MRT3847_46694C.1.pep
MENYQYPASYPDSGESSPRSREIDFENPPPWDEQQNQNYKAKFMCSYGGKIQPRTHDNQLSYVGGDTKILAVDRSVKFSAFLSKLSALCDSPPQDLTFKYQLPGEDLDALISVTNDDDLEHMMHEYDRLYRPNLKPVRMRLFLFTLSNSNPNSSFSSERDRFVEALNSGPVPSQPDPIKTPPVTPSNVDYLFGLDKAVAPPNLPPNFAAVKFHDPVPEPVAPTPVEYQSRVSDRVVGSDPNVNSMEIQRQMQQEMQRLQIAENEYRRRSEDGFATGYAAAAGGDYYMQKVQEKVPPQNAAVPPPAAYWSEKQFSGEGYQTTVTTAAPGGGDQPMYVMAAPGTFYHHSPVMRPPAAAQGYYAVQRMGSDGYREQQAVYGGVAAPKAAFSSAGMVKGPAYSEGYSGGVVRPAGLPDNAAYAQVAYDSASGRQVYYTAQGGMVHAPPPPQYQGVPPQELRPGGVSVGQDGKVVNKVNQGSV

SEQ ID NO: 3847 - protein, 42 aa, Glycine max
  unsure (1)..(42): unsure at all Xaa locations
  Clone ID: PAT_MRT3847_46867C.1.pep
LNPXKPPXXXPIANCXKSTLEKRXLMXGLLLLPARVEGXSSS

SEQ ID NO: 3848 - protein, 368 aa, Glycine max
  Clone ID: PAT_MRT3847_47972C.1.pep
MGEAKGKEEEVLASVHSTVFKESESLDGKCVKIEGYDFNRGVNYPLLLSSMVTTGFQASNLGDAIQVVNQMLDWRLVDEPVAEDCSDQERDLEYRKSVTCKVFLGFTSNLISSGVRDTVRFLLQHRMVDVVVTTTGGIEEDLIKCLAPTYKGDFSLPGAYLRSKGLNRIGNLLVPNDNYCKFEDWIIPIFDQMLGEQNNENALWLREDDISGLGKEIKNESSYLYWAYKNNIPVFCPGLTDGSLGDMLYFHSFRNPGLIVDIVQDIRAMNGEAVHASPRKTGMIILGGGLPKHHICNANMMRNGADYAVFINTAQEYDGSDSGARPDEAVSWGKIRDSAQTVKVHCDATIAFPLLVAETFASRVKPPH

SEQ ID NO: 3849 - protein, 132 aa, Glycine max
  Clone ID: PAT_MRT3847_48100C.1.pep
MVRTLAMIKPDGLSGKYTEAIKEVILDSGFHIVKETEVQLDAERASVFYAEHSQRSFFDSLVKYITSGPVLAMVLERPDAVAQWRTVIGPTDAKKANTSHPNSIRAMCGLDSEKNCVHGSDSPESADREISF

SEQ ID NO: 3850 - protein, 36 aa, Glycine max
  Clone ID: PAT_MRT3847_4964C.1.pep
QETSFVTIGQRILANPLRVRFHYGHPDIFDRLFHTT

SEQ ID NO: 3851 - protein, 41 aa, Glycine max
  Clone ID: PAT_MRT3847_504C.1.pep
LLRTKSRFQNNKFGSPYPCRNLIRSHLGSLNEICLEVVHSR

SEQ ID NO: 3852 - protein, 240 aa, Glycine max
  Clone ID: PAT_MRT3847_50784C.1.pep
MAEDLVLDTAIRDWVLIPLSVVMVLIGVLRYFVSKLMHSSQTPDAKIVKEGQVIVRARNLRAGANFIPSKAFRARKIYFWNEENGLLFLKQGEGLIPQAQMFMDMMKKNHTMIIHHSLTFAWVNFFFSGFVAAKIPFPLTQRFRSMLQNGIDLSTVDVSYVSSRSWYFLNLFGLRGLFSLILGEENAVDDTQRMMQMGGFGFDPSKGLSAEKDNLDITQHDWALPNFEQRAEAVLRKVAS

SEQ ID NO: 3853 - protein, 136 aa, Glycine max
  Clone ID: PAT_MRT3847_50935C.1.pep
MSGKGAKGLITGKTSASAKDKDKDKKKPVSRSSRAGLQFPVGRIHRLLKSRVSANGRVGATAAVYSAAILEYLTAEVLELAGNASKDLKVKRITPRHLQLAIRGDEELDTLIKGTIAGGGVIPHIHKSLINKSSKE

SEQ ID NO: 3854 - protein, 199 aa, Glycine max
  unsure (1)..(199): unsure at all Xaa locations
  Clone ID: PAT_MRT3847_51233C.1.pep
MPAVGGINTGGGKEYPGSLTLFVTVTCIVAAMGGLIFGYDIGISGGVTSMDPFLLKFFPSVFRKKNSDKTVNQYCQYDSQTLTMFTSSLYLAALLSSLVAATVTRKFGRKLSMLFGGLLFLVGALINGFAQHVWMLIVGRILLGFGIGFANQSVPLYLSEMAPYKYRGALNIGFQLSITVGILVANVLNYFFAKXKGGW

SEQ ID NO: 3855 - protein, 519 aa, Glycine max
  Clone ID: PAT_MRT3847_51235C.1.pep
MPAVGGISNGGGKEYPGSLTPFVTVTCIVAAMGGLIFGYDIGISGGVTSMDPFLLKFFPSVFRKKNSDKTVNQYCQYDSQTLTMFTSSLYLAALLSSLVASTVTRRFGRKLSMLFGGLLFLVGALINGFAQHVWMLIVGRILLGFGIGFANQSVPLYLSEMAPYKYRGALNIGFQLSITVGILVANVLNYFFAKIHGGWGWRLSLGGAMVPALIITIGSLVLPDTPNSMIERGDREKAKAQLRRVRGIDDVEEEFNDLVAASESSRKVEHPWRNLLQRKYRPHLTMAVLIPFFQQLTGINVIMFYAPVLFSSIGFKDDSALMSAVITGVVNVVATCVSIYGVDKWGRRALFLEGGVQMVICQAVVAAAIGAKFGIDGNPGDLPKWYAVVVVLFICIYVSAFAWSWGPLGWLVPSEIFPLEIRSAAQSINVSVNMFFTFLIAQVFLTMLCHMKFGLFIFFAFFVLIMTFFIYFFLPETKGIPIEEMNQVWKAHPFWSRFVENDDYGNGVEMGRGTAIKEV

SEQ ID NO: 3856 - protein, 300 aa, Glycine max
  Clone ID: PAT_MRT3847_5172C.1.pep
MELETLYTPCYMPNSNWFVQESLSTEWTREDNKKFESALAIYDKDTPDRWFKVAAMIPGKTVFDVIKQYRELEEDVSEIEAGHVPIPGYLASSFTFELVDNHNYDGCRRRLAPVRGSDQERKKGVPWTEEEHRRFLMGLLKYGKGDWRNISRNFVVTKTPTQVASHAQKYYIRQKVSGGKDKRRPSIHDITTVNLTETSASDKNKPPVIAPQQKLNSMSKVQLDWTSSHYNDGSLMVFNPNSDDLFVSSSSDVTSMALKMQGQDLYECALREAYAKVKVPGFSMAPRDFNNEAVFGIHAL

SEQ ID NO: 3857 - protein, 307 aa, Glycine max
  Clone ID: PAT_MRT3847_5173C.1.pep
DMELETIYPPCFMPNSNWFVQESHSTEWTREDNKKFESALAIYDNDTPDRWFKVAAMIPGKTVFDVIKQYRELEEDVSEIEAGRVPIPGYLASSFTFELVDNHNYDGCRRRLAPVRGSDQERKKGVPWTEDEHRRFLMGLLKYGKGDWRNISRNFVVTKTPTQVASHAQKYYIRQKVSGGKDKRRPSIHDITTVNLTETSASDKNKPQLFNASPVLAPQQKLNSISKVQLGWTSSHYNDGSFMVFNPNSDALFVSSSPDVTSMALKMQGQDLYDCALHEAYAKVKVPGFSMAPRDFNNEAVFGIHAL

SEQ ID NO: 3858 - protein, 36 aa, Glycine max
  Clone ID: PAT_MRT3847_51785C.1.pep
MSTGGQVVKCKAAVAWEAGKPLSIGTIEVAPPQKSG

SEQ ID NO: 3859 - protein, 136 aa, Glycine max
  Clone ID: PAT_MRT3847_51981C.1.pep
MAGKGGKGLVAGKTTAANKDKDKDKKRPVSRSSRAGIQFPVGRIHRQLKQRVQANGRVGATAAVYLASILEYLTAEVLELAGNASKDLKVKRITPRHLQLAIRGDEELDTLIKGTIAGGGVIPHIHKSLINKAAKE

SEQ ID NO: 3860 - protein, 65 aa, Glycine max
  Clone ID: PAT_MRT3847_51C.1.pep
KKKKKKNKKKKKKKKKKNKKKKKKKKKKKKKKRGGPFKGSNFTSPCLQRNTFFLGPPKLNSRAGV

SEQ ID NO: 3861 - protein, 63 aa, Glycine max
  unsure (1)..(63): unsure at all Xaa locations
  Clone ID: PAT_MRT3847_52241C.1.pep
LLQKRQTPPITREGGAEGEREVLLEGRRKMTQLRYNXTLCHVHSSYIQRRAPAGRFTRCPDRR

SEQ ID NO: 3862 - protein, 233 aa, Glycine max
  unsure (1)..(233): unsure at all Xaa locations
  Clone ID: PAT_MRT3847_52622C.1.pep
GIDHASFLLALQMAAEAXNPYFRLGYNSLGAFATINHLHFQAYYLALPFPIEKAPTKKIAKLSGGVKISKLLNYPVRGLVFEGGHSLEGLANVVSEACICLQHNNIPYNILISDCGRQIFLLPQCYAEKQALGEVSAELLETQVNPAVWEISGHLVLKRKKDYEEASEANACRLLAEVSLSEERFQEVTALVFQAIASVEMNVKPQLLEEVDAVSPSTQRAMVAGSHECLVLQ

SEQ ID NO: 3863 - protein, 435 aa, Glycine max
  Clone ID: PAT_MRT3847_52624C.1.pep
MLSIKRVPTVVSNYQKEETGEAAAGGCGRNCLKSCCIQGARLPLYAFKKVDKVCGNELPLLGCKEQHPVAFLDSLVLGEWEDRMQRGLFRYDVTACETKVIPGEYGFIAQLNEGRHLKKRPTEFRVDKVLQPFDENKFNFTKVGQEEVLFQLEASNDGEAQFFPNAPIDVENSPSFVAINVSPIEYGHVLLIPRIFKCLPQRIDHASFLLALQMAVEARNPYFRLGYNSLGAFATINHLHFQAYYLALPFPIEKAPTKKIAKLSGGVIISKLLNYPVRGLVFEGGHTLEDLANAVSEACICLQHNNIPYNVLISDCGRQIFLLPQCYAEKQALGEVSPELLETQVNPAVWEISGHMVLKRKKDYEEASEANAWRLLAEVSLSEERLLEVTALVFQAITSSVEMNVKPQRLEEVDAVSPNAQHAMVAGSHECLVLQ

SEQ ID NO: 3864 - protein, 412 aa, Glycine max
  Clone ID: PAT_MRT3847_52745C.1.pep
MASWWCSSPSATLTVSTTTTRHFSLLSHTSQFRIQTLTFPPSSFTRFTTAPPSLRFRVPCSNKTAFETELPEDGVDCVGTGQDVECLVNTEEKQSEPSSSSSSSSSSSSMLCLAEALWEGAVLVSPFFFWGTAMVAMKEVLPKCGPFFVSAFRLIPAGFLLVAFAASRGRTLPSGFNAWLSITLFALVDAACFQGFLAEGLQRTSAGLGSVIIDSQPLTVAVLAALLFGESIGVVGAAGLVLGVIGLVLLELPALSFDESNFSLWGSGEWWMLLAAQSMAIGTVMVRWVSKYSDPVMATGWHMVIGGLPLVLFAVLNNDPAVSLSLKEYSSTDILALLYTSIFGSAVSYGVFFYSATKGSLTKLSSLTFLTPMFASIFGFLYLGETFSPVQLVGALVTVAGIYMVNFRSTSE

SEQ ID NO: 3865 - protein, 58 aa, Glycine max
  Clone ID: PAT_MRT3847_53506C.1.pep
AADNQTQVGIKVLQGEREMAADNKMLGEFDLVGIPPAPRGLPQIDVTFDIDANGIVTC

SEQ ID NO: 3866 - protein, 135 aa, Glycine max
  Clone ID: PAT_MRT3847_5356C.1.pep
MAGRGKTLGSSAAKKATSRSSKAGLQFPVGRIARFLKAGKYAERVGAGAPVYLAAVLEYLAAEVLELAGNAARDNKKTRIVPRHIQLAVRNDEELSKLLGDVTIANGGVMPNIHNLLLPKKAGGSSKGAAADDDS

SEQ ID NO: 3867 - protein, 135 aa, Glycine max; identical to SEQ ID NO: 3866
  Clone ID: PAT_MRT3847_5357C.1.pep

SEQ ID NO: 3868 - protein, 135 aa, Glycine max
  Clone ID: PAT_MRT3847_5358C.1.pep
MAGRGKTLGSSAAKKATSRSSKAGLQFPVGRIARFLKAGKYAERVGAGAPVYLAAVLEYLAAEVLELAGNAARDNKKTRIVPRHIQLAVRNDEELSKLLGDVTIANGGVMPNIHNLLLPKKAGGSSKAAAADDDS

SEQ ID NO: 3869 - protein, 65 aa, Glycine max
  unsure (1)..(65): unsure at all Xaa locations
  Clone ID: PAT_MRT3847_53649C.1.pep
REENVYMAKLAEHAERYEEMVEFMENVSAAADNEELTVEEMNLLSCAYKNVIXARRASWLIISSI

SEQ ID NO: 3870 - protein, 38 aa, Glycine max
  unsure (1)..(38): unsure at all Xaa locations
  Clone ID: PAT_MRT3847_5387C.1.pep
ITKPHXSHPXNTLDNPLKHCKXQAQRXXEIXKXINTII

SEQ ID NO: 3871 - protein, 195 aa, Glycine max
  unsure (1)..(195): unsure at all Xaa locations
  Clone ID: PAT_MRT3847_54011C.1.pep
MSLKIAAEIYPKSPSETVKEPLVVVKEYDEDRHKVAVERLERLCEVGQSGKPSLVTDLMGDPICRIRHFQLHVMLVAEYGEEGEVVGVIRGCVKTVTRGNSVYIKLAYILGLRVSPRHRRFGIGTKLVEHLXEWCKQKGSKYAYMATDCTNEPSVNLFTRKCGYSKFRTLTILVQPVHAHYKPISSNVAVLRLPP

SEQ ID NO: 3872 - protein, 50 aa, Glycine max
  Clone ID: PAT_MRT3847_54023C.1.pep
VKPPQAPPKLILQCRLKANLNKSVFGPNSFYNSAPDWCILKFDPLLLFLA

SEQ ID NO: 3873 - protein, 496 aa, Glycine max
  Clone ID: PAT_MRT3847_54836C.1.pep
MATSDSNMLLNYVPVYVMLPLGVVNVDNVFEDPDGLKEQLLQLRAAGVDGVMVDVWWGIIELKGPKQYDWRAYRSLFQLVQECGLTLQAIMSFHQCGGNVGDIVNIPIPQWVLDIGESNHDIFYTNRSGTRNKEYLTVGVDNEPIFHGRTAIEIYSDYMKSFRENMSDFLESGLIIDIEVGLGPAGELRYPSYPQSQGWEFPGIGEFQCYDKYLKADFKAAVARAGHPEWELPDDAGKYNDVPESTGFFKSNGTYVTEKGKFFLTWYSNKLLNHGDQILDEANKAFLGCKVKLAIKVSGIHWWYKVENHAAELTAGYYNLNDRDGYRPIARMLSRHHAILNFTCLEMRDSEQPSDAKSGPQELVQQVLSGGWREDIRVAGENALPRYDATAYNQIILNARPQGVNNNGPPKLSMFGVTYLRLSDDLLQKSNFNIFKKFVLKMHADQDYCANPQKYNHAITPLKPSAPKIPIEVLLEATKPTLPFPWLPETDMKVDG

SEQ ID NO: 3874 - protein, 109 aa, Glycine max
  unsure (1)..(109): unsure at all Xaa locations
  Clone ID: PAT_MRT3847_54862C.1.pep
MSKARVYTVVNVLRPKEYWVYXCLTAQWGDQDDYEVVRKEGRGKYREVFEGINVHSNERCIINILKPVKRKTIXREIEILQNLCGGPNIVKLLDIGRDQHCKTPSLISE

SEQ ID NO: 3875 - protein, 476 aa, Glycine max
  Clone ID: PAT_MRT3847_55132C.1.pep
MGGGFRVLHLVRPFLSFLPEVQTADRKVPFREKVIYTVISLFIFLVCSQLPLYGIHSTTGADPFYWMRVILASNRGTVMELGITPIVTSGLVMQLLAGSKIIEVDNNVREDRALLNGAQKLLGILIAVGEAVAYVLSGMYGSVGQLGVGNAILIILQLCFAGIIVICLDELLQKGYGLGSGISLFIATNICENIIWKAFSPTTINSGRGAEFEGAVIALFHLLITRTDKVRALREAFYRQNLPNVTNLLATVLIFLIVIYFQGFRVVLPVRSKNARGQQGSYPIKLFYTSNMPIILQSALVSNLYFISQLLHRKYSGNFFVDLLGKWKESEYGGGQSVPVGGIAYYITAPSSLADMAANPFHALFYLVFMLSACALFSKTWIEVSGSSARDVAKQLKEQQMVMPGHRESNLQKELNRYIPTAAAFGGICIGALTVLADFMGAIGSGTGILLAVTIIYQYFETFEKERASELGFFGF

SEQ ID NO: 3876 - protein, 463 aa, Glycine max
  Clone ID: PAT_MRT3847_5638C.1.pep
MDKKEHIAIFTTASLPWLTGTAVNPLFRAAYLAKSGERDVTLVIPWLSLKDQRLVYPNNITFASPSEHEKYICQWLEERVGFTSGFSIQFYPGKFSRDKRSILAVGDISEIIPDKVADIAVLEEPEHLTWYHHGKRWKTKFRLVIGIIHTNYLEYVKREKNGVMQAFLLKYLNNWVVSIYCHKVIRLSAATQDYTGSIICNVHGVNPKFLEIGNTAARRRQKGEHAFTKGAYFIGKMIWSKGYKELLQLLKDHEKELSALEVDLFGSGEDSDEVQKAAEKLELAVRVHPARDHADALFHDYKLFLNPSTTDVVCTTTAEALAMGKIVVCANHPSNDFFKQFPNCWTYDDDDGFVKLTLKALAEQPAQPTDAQRHDLSWEAATKRFLKAADLDKPLERKLSRTTSNFLAASLNLQEKVDEASAYVHHVASGFEVSRRIFGAIPDSLQPDEELRKELGLTDASTK

SEQ ID NO: 3877 - protein, 116 aa, Glycine max
  unsure (1)..(116): unsure at all Xaa locations
  Clone ID: PAT_MRT3847_56602C.1.pep
GSQKAKAATHVSKAKPGEYIHYASQKAKETKDKTMEDAGEYTDXASQKANETKDNTMVNASEYTDYASHXTRTEAKDMTMGKGREYKDYTASKANXGKDATANKMGESKDYTADKA

SEQ ID NO: 3878 - protein, 536 aa, Glycine max
  Clone ID: PAT_MRT3847_5686C.1.pep
MRGACQTEVGFGRQGLVLSQSKREVMANIDIEGILKQQQPYDGRVPKTKIVCTLGPASRSVEMTEKLLRAGMNVARFNFSHGTHDYHQETLNNLKTAMHNTGILCAVMLDTKGPEIRTGFLKDGKPIQLKEGQEVTITTDYDIKGDPEMISMSYKKLPVHLKPGNTILCSDGTITLTVLSCDPDAGTVRCRCENTATLGERKNVNLPGVVVDLPTLTEKDKEDILGWGVPNKIDMIALSFVRKGSDLVNVRKVLGPHAKNIQLMSKVENQEGVLNFDEILRETDAFMVARGDLGMEIPVEKIFLAQKMMIYKCNLVGKPVVTATQMLESMIKSPRPTRAEATDVANAVLDGTDCVMLSGESAAGAYPELAVKIMARICIEAESSLDYGAIFKEMIRSTPLPMSPLESLASSAVRTANKAKAKLIVVLTRGGSTAKLVAKYRPAVPILSVVVPVLSTDSFDWTCSDETPARHSLIYRGLIPILGEGSAKATDAESTEVILEAALKSATERALCKPGDAVVALHRIGAASVIKICIVK

SEQ ID NO: 3879 - protein, 73 aa, Glycine max
  Clone ID: PAT_MRT3847_56902C.1.pep
FVRCLIIPCSFCLLVLVKVLKEASVCRKGRKITFLLHKLFVRLCDIQQRCKAKNLCKWARRDISKWATLKWKM

SEQ ID NO: 3880 - protein, 160 aa, Glycine max
  Clone ID: PAT_MRT3847_57413C.1.pep
MSDEEHHFDSQADAGASKTYPQQAGTIRKNGYIVIKSRPCKVVEVSTSKTGKHGHAKCHFVAIDIFNGKKLEDIVPSSHNCDVPHVNRTDYQLIDISEDGFVSLLTDNGNTKDDLKLPTDEALLAQIKDGFSEGKDLVVSVMSAMGEEQICSLKDIGPKN

SEQ ID NO: 3881 - protein, 259 aa, Glycine max
  Clone ID: PAT_MRT3847_57838C.1.pep
MSAEKERETQVYLAKLAEQAGRYEEMVECMKKVAKLDLDLTVEERNLLSVGYKNVIGARRASWRIMSSIEQKEESKGNEHNVKLIKSYCQKVEEELSKICGDILTIIDQHLIPSSASAEASVFYYKMKGDYFRYLAEFKTDQERKEAAEQSLKGYEAASATANTDLPSTHPIRLGLALNFSVFYYEIMNSPERACHLAKQAFDEAIAELDTLSEESYKDSTLIMQLLRDNLTLWTSDLPEDGGEDSIKAEETKPSEPEH

SEQ ID NO: 3882 - protein, 239 aa, Glycine max
  Clone ID: PAT_MRT3847_58025C.1.pep
AIREPRVVVQTTSEVDILDDGYRWRKYGQKVVKGNPNPRSYYKCTNAGCTVRKHVERASHDLKSVITTYEGKHNHDVPAARASSHVNANASNAVPGQASLQTHVHRPEPSEVHNGIGRLERPSLGSFNLPGRQQLGPSHGFSFGMNQSMLSNLVMSGLGHAQAKLPVMPVHSFLAAHQQQQQHQQQQNQQQRAANDLGFMLPKGEPNVEAIPERGGLNLSNGSSVYQEIMSRMPLGPHM

SEQ ID NO: 3883 - protein, 151 aa, Glycine max
  Clone ID: PAT_MRT3847_58098C.1.pep
WSPGWSNADKALTAFVNGALIEYSKNRRKADSATTSFLSPHLHFGEVSVKKVFHLVRIKQVFWANEGNKAGEESVNLFLKSIGLREYSRYISFNHPYSHERPLLAHLKFFPWVVNEGYFKAWRQGRTGYPLVDAGMRELWATGWLHDRIRV

SEQ ID NO: 3884 - protein, 308 aa, Glycine max
  Clone ID: PAT_MRT3847_58517C.1.pep
MDGMYGVPAEYADKALMTPENLIFPPDYHHDFLAAGRIPLFGSDEFFSSSAGIHRQQEDDVAATTVMKAKIASHPHYPRLLQAYIECQKVGAPPEIARLLEEIRRENDPCKSDAVSSSTCFGADPELDEFMEAYCDMLVKYKSDLARPFDEATTFLNKIEMQLSHLCTGASVSNVSDDGGVSSDEDLSTGDGDAQDGQLKGEDRELKDRLLRKFGSHIGTLKLEFSKKKKKGKLPKEARQALLQWWNVHYKWPYPTEADKIELAKSTGLDQKQINNWFINQRKRHWKPSENMQFSMMENFNGRILADE

SEQ ID NO: 3885 - protein, 109 aa, Glycine max
  unsure (1)..(109): unsure at all Xaa locations
  Clone ID: PAT_MRT3847_5870C.1.pep
RCASYLQQQQVPFIQLFAAYPQQFFPFNQLTAVNSRVYLQQHXILPFSQLDGVSPXTILTHPQLWPLYQHIAPNAVSLXQLQQGLPFTHLALSNPPALYQQPIIGGAIF

SEQ ID NO: 3886 - protein, 540 aa, Glycine max
  Clone ID: PAT_MRT3847_58755C.1.pep
MALTLRSSTSFINQKETKVLKTSDNAPAIVSFSKFKPSSSLFRLRAKNSMQEAHHTREKWEKVLAPSVAHSHNDSKRVPVYVMLPLDTVTMGGSLNKPRAMNASLMALKSAGVEGVMVDAWWGLVEKEGPLKYNWEPYAELVQMLQMHGLKLQVVMSFHQCGGNVGDNCSIPLPPWVLEEISKNPELVYTDRSGRRNPEYISLGCDSVPVLNGRTPLQVYSDYMRSFRDKFRDYFGSVIVEIQLGMGPCGELRYPSYPETNGTWRFPGIGEFQCYDKYMKASLAAAAEDIGKKEWGGGGPHDSGQYNQFPEDTGFFKREGTWNTEYGQFFLEWYSGKLLEHGERILVSAKGIFETTGVKLSGKVAGIHWHYRARSHAAELTAGYYNTRNNDGYLPIARMLAKHGVVFNFTCMEMKDREQPDFANCSPEGLVHQVKMATTTARAELAGENALERYDADAYAQVLSTSKSESGSGLAAFTYLRMNKRLFEADNWRHLVDFVRSMSEGGRRERLPAADSHGSDLYVGHIKATQEKHTQEAALV

SEQ ID NO: 3887 - protein, 246 aa, Glycine max
  unsure (1)..(246): unsure at all Xaa locations
  Clone ID: PAT_MRT3847_58757C.1.pep
MALTLRSSTSFINQKETKVLKTSDDIPATVSFSKFKPLVRLRAKNSMQEAHHTRENSFNEASRSEKWEKVLAPSVAHNHNDSKRVPVYVMLPLDTVTMEGRLNKPRAMNASLMALKSAGVEGVMVDAWWGLVEKDGPLKYNWEPYAELVQMVQMHGLKLQVVMSFHQCGGNVGDNCSIPLPPWVLEEISKNPELVYTDRSGRRNPEYISLGCDSVPVLRGRTPLQVYSDYMRKLRDRFXRYLGSVI

SEQ ID NO: 3888 - protein, 96 aa, Glycine max
  Clone ID: PAT_MRT3847_58C.1.pep
LLGRMLYMAPSDGKWGEHELDYLLFMVRDVKLNPNPEQVADVKYVNRDQLMELLRKADAGEDGVKMSPWFRLVVDNFLMGWWDHVEQGTLQGAADM

SEQ ID NO: 3889 - protein, 73 aa, Glycine max
  Clone ID: PAT_MRT3847_59173C.1.pep
QMMTPNMMSPLTMPSILSPMVLPSMMSQMMMTQCHCDAVSQIMLQQQLPFMFNPMAMTIPPMFLQQPFVGAAF

SEQ ID NO: 3890 - protein, 139 aa, Glycine max
  Clone ID: PAT_MRT3847_59634C.1.pep
KLGVRPPKGVLLYGPPGTGKTLMARACAAQTNATFLKLAGPQLVQMFIGDGAKLVRDAFQLAREKSPCIIFIDEIDAIGTKRFDSEVSGDREVQRTMLELLNQLDGFSSDDQIKVIAATNRADILDPALMRSSRLDRKI

SEQ ID NO: 3891 - protein, 121 aa, Glycine max
  Clone ID: PAT_MRT3847_59716C.1.pep
KVPYGFAPCIMGQVLYFVPRLVIGVFIQVLCSPSPLPRYAFVTQMGAPYKRAIFNERFHQTIFGWAQKAKNRKGLKAYGNFGQGSFQESAKTGIQVGSIFKKAFAPGGSFFPPKADGSNSV

SEQ ID NO: 3892 - protein, 71 aa, Glycine max
  unsure (1)..(71): unsure at all Xaa locations
  Clone ID: PAT_MRT3847_60017C.1.pep
MAASAPTPREDFVXMANLAEXAERYEEMVEFMEKVSASAESEELTVEERNLLSVAYKNVIGARRASWRIIS

SEQ ID NO: 3893 - protein, 110 aa, Glycine max
  Clone ID: PAT_MRT3847_60180C.1.pep
MAAAKLQALWNHPAGPKTIHFWAPTFKWGISIANIADFSKPPEKLSYPQQIAVTATGIIWSRYSTVITPKNWNLFSVNIAMAGTGLYQLSRKLRHDYSSEAEAEVAVTKE

SEQ ID NO: 3894 - protein, 477 aa, Glycine max
  Clone ID: PAT_MRT3847_60398C.1.pep
MWSSTSSTAAIPSDEEPSESSSSSSFSTSLFNFSSGNPRIEETRGLMHLFPDDTPSTLPVGRKPLVCVVGVPNHMTYADFCQFCGSFIQHMLEMRIVRMDGMEDQYSVLVRFDDQDSTDSFYKHYNGRRFSSLEVEVCRVLFTLDVQYTGSIEHAQPSNATSTELPTCPVCLERLDQDTGGILTTICNHSFHCSCISKWADSSCPVCRYCQQQAEKSICFVCQTTENLWICVICGYVGCGRYKGGHAIIHWKETQHCYSLEVETKRVWDYVGDNYVHRLIQSKTDGKLIELNTQCAHADNGCGSCSCEDNAMNEAILNSKVEAIVNEYNELLATQLENQKLYFESLLQEVKEESERKISKAVQKAISLKQQKIQSKIDRCKKEKKFLDDLNENLVKNEDIWKTKILAIEEREKKTTRLMGDRVADLEMQLGDLMVCLEGGRTVEQLAASDEIKEGIILDKSIESSTTSGSDLVGRDA

SEQ ID NO: 3895 - protein, 297 aa, Glycine max
  Clone ID: PAT_MRT3847_60645C.1.pep
MVSGNIFHCRKNSWPPQEYISKSTLQLFDYDSSAPPEQAWRRRLNSHANLLKEFRVTFTEAIKMVRLGIRIWSYVREEASHGRKAPIDPFTRESCKPSASQGVPLGGMGSGSISRGFRGEFRQWQIIPSLCEASPVMSNQFSIFISGEGGNKNFASVLAPGQHEGLGSSRKPDDQGISSWGWNLSGQHSTYHALFPRAWTVYDGEPDPELKISCRQISPFVPHNYRESSLPAAVFVYTLVNTGKERAKVSLLFTWANSIGGSSHLSGDHVNEPFKAEDGVSGDFYSQDSKGTLCTFA

SEQ ID NO: 3896 - protein, 544 aa, Glycine max
  Clone ID: PAT_MRT3847_60792C.1.pep
MSSSESQDPAAAAASSEAQVSKKAAKKEAAKLEKLRRRQEIAAASAATANLSVDEEDPLGGNYGDVPLVELQSKTSADVGEWTRVEALGGALENRSVLIRGRAQAIRPVGKKMAFLVIRENGFTVQCLVQAQPDTVSAQMVKFAAALSRESIVDVEGVVSVPTAPIKGATQQVEIQVRKLYCVSRAVPTLPINLEDAARSEVEIEKALQAGEQLVRVNQDTRLNFRVLDVRTPANQGIFRIQSQVGNAFRQFLVSQGFCEIHTPKLIAGSSEGGAAVLSLDYKGQPACLTQSPQLHKQMSICGDFGRVFEIGPVFRAEDSYTHRHLCEFTGLDVEMEIKKHYFEVMDLVDRLFVAMFDSLNQNCKKDLEAVGSQYPFEPLKYLRKTLRLTYEEGIQMLKDVGVEIEPYGDLNTEAERKLGQLVLEKYGTEFYILHRYPLAIRPFYTMPCYDNPAYSNSFDVFIRGEEIISGAQRVHVPEFLEQRAAACGIDVKTISSYIDSFRYGAPPHGGFGVGLERVVMLFCGLNNIRKTSLFPRDPLRIAP

SEQ ID NO: 3897 - protein, 307 aa, Glycine max
  Clone ID: PAT_MRT3847_60871C.1.pep
MKWESITLSSPTSCTPNSNTNWLVENNSRSTKWTPEENKLFENALAVHDKDTPDRWHKVAEMIPGKTVVDVIRQYKELEVDVSNIEAGLIPVPGYSSTAISPFTLDWVNTPGYDGFKGCGKRPSSVRPIEHERKKGVPWTEEEHKLFLLGLKKYGKGDWRNISRNFVITRTPTQVASHAQKYFIRQLSGGKDKRRASIHDITTVNLTETITTSCSEDTNRSTSPHVLSQPQQQNSTPTTPRTHFQWTNQSNTGVAMTLNPAHERVFMSPYGANSFGVKIEGQNLHESSYLGPQTQNMVFQMQQSSQH

SEQ ID NO: 3898 - protein, 72 aa, Glycine max
  Clone ID: PAT_MRT3847_60948C.1.pep
MASYQKHYDDQGRKVDEYGHVENQSDEYGNPVHADSDSYVDTRTAAGRYCDDIYKQHDTTSAYGVHTGRQHS

SEQ ID NO: 3899 - protein, 321 aa, Glycine max
  Clone ID: PAT_MRT3847_6094C.1.pep
MKWEMEILPPASPYMYNSNWLLDDNRTNNTKWTPAENKLFENALAVYDRDTPDRWHKVAEMIPGKTVMDVVKQYKELEADVCDIEAGLIPIPGYSSGTTTTSPFTLDWVNTSPAYDDGFKGITAKRSSSGRPLEQERKKGVPWTEEEHKLFLLGLKKYGKGDWRNISRNYVITRTPTQVASHAQKYFIRQLSGGKDKRRASIHDITTVNLTETTRTSSDESKRSASPQNSAMLSRHQQLNSNAASSGLNFQWSDQPNAGVAMALNPAHEQVFMSPYGLNSYGFKMQGQNLHRSSLHESSYLGPQTPNMVFQMQPSQHYSHA

SEQ ID NO: 3900 - protein, 50 aa, Glycine max
  unsure (1)..(50): unsure at all Xaa locations
  Clone ID: PAT_MRT3847_6220C.1.pep
TWLGVNPGGCARXAGYRKEHRQHAQFHGVQNEKKGFMDKIKGKLPGGPRD

SEQ ID NO: 3901 - protein, 350 aa, Glycine max
  Clone ID: PAT_MRT3847_62243C.1.pep
MREFDSSVLVVLSSFLDVSVNTLSKAAMKKGMNDFVFIMYSNAFAACLLLLLALFFYRKRTLPPLSCNTLGLFLVVGMLSCINQSIKFFGIGYSSPTLASALSDLVPAFTFILAVIFRMEKLDWKANSTLAKSIGTVVSIAGALLLSLYKGQVIINNNPPFKLFPQKLVSSMQFDWVFGALLLAAHSCFLSINYILLTRIVREYPAELVVVLSRIALTSILSVPAALISVKDLKALRLGFNMELIAIGCSAIFVLSFRGVIHIWIMGKRGPVYVAMFKPLEIVFAVILGVTFLGDSLYIGSVIGAAIIVVGFYAVIWGKSQEKVEEDCTVCSSESYDNEVPLLQNKRTGE

SEQ ID NO: 3902 - protein, 68 aa, Glycine max
  unsure (1)..(68): unsure at all Xaa locations
  Clone ID: PAT_MRT3847_62711C.1.pep
MAAXXXXPXXXFVYMXKXAEQAERYEEXVXFMXKVSXSAESXEXTVEEXNLLSXAXKXVIXARRASWX

SEQ ID NO: 3903 - protein, 149 aa, Glycine max
  unsure (1)..(149): unsure at all Xaa locations
  Clone ID: PAT_MRT3847_63030C.1.pep
MDAGGKIKKGAGGRKGGGPKKKPVSRSVKAGLQFPVGRIGRYLKKGRYAQRVGTGAPVYLAAVLEYLAAEVLELAGNAARDNKKNRIIPRHVLLAVRNDEELGKLLAGVTIAHGGVLPNINPVLLPKKTERAXKEPKSPSKATKSPKKA

SEQ ID NO: 3904 - protein, 149 aa, Glycine max
  Clone ID: PAT_MRT3847_63031C.1.pep
MDAGGKIKKGAGGRKGGGPKKKPVSRSVKAGLQFPVGRIGRYLKKGRYAQRVGTGAPVYLAAVLEYLAAEVLELAGNAARDNKKNRIIPRHVLLAVRNDEELGKLLAGVTIAHGGVLPNINPVLLPKKSERASKEPKSPSKATKSPKKA

SEQ ID NO: 3905 - protein, 149 aa, Glycine max
  Clone ID: PAT_MRT3847_63035C.1.pep
MDAGGKIKKGAGGRKGGGPKKKPVSRSVKAGLQFPVGRIGRYLKKGRYAQRVGTGAPVYLAAVLEYLAAEVLELAGNAARDNKKNRIIPRHVLLAVRNDEELGKLLAGVTIAHGGVLPNINPVLLPKKTERASKEPKSPSKATKSPKKA

SEQ ID NO: 3906 - protein, 149 aa, Glycine max
  Clone ID: PAT_MRT3847_63039C.1.pep
MDAGGKIKKGAGGRKGGGPKKKPVSRSVKAGLQFPVGRIGRYLKKGRYAQRVGTGAPVYLAAVLEYLAAEVLELAGNAARDNKKNRIIPRHVLLAVRNDEELGKLLAGVTIAHGGVLPNINPVLLPKKTERAAKEPKSPSKATKSPKKA

SEQ ID NO: 3907 - protein, 146 aa, Glycine max
  unsure (1)..(146): unsure at all Xaa locations
  Clone ID: PAT_MRT3847_63148C.1.pep
SAPCVLFFDELDSIATQRGSSGGDAGGAADRVLNQLLTEMDGMNAKKTVFIIGATNRPDIIDSALLRPGRLDQLIYIPLPDQESRYQIFKACMKKSPVSKDVNLGALAEYTKGXSGADITEICQRACKYAIRENIEKDIEHERKRR

SEQ ID NO: 3908 - protein, 479 aa, Glycine max
  unsure (1)..(479): unsure at all Xaa locations
  Clone ID: PAT_MRT3847_63328C.1.pep
MMENGGKQTFEVSNDTLQRVGSKSFDDDGRLKRTGTIWTASAHIITAVIGSGVLSLAWAIAQLGWIAGPVVMILFSIVTYYTSTLLATCYRSGDQLSGKRNYTYTQAVRSYLGGFSFKFCGXVQYANLFGVAIGYTIAASISMMAVKRSNCYHSSGGKNPCKMNSNWYMISYGVAEIIFSQIPDFHELWWLSIVAAVMSFTYSFIGLGLGIGKVIGNGRIKGSLTGVTIGTVTESQKIWRTFQALGNIAFAYSYSMILIEIQDTIKSPPAESETMSKATLISVLVTTVFYMLCGCFGYASFGDASPGNLLTGFGFYNPFWLIDIANAGIVIHLVGAYQVYCQPLFSFVESNAAERFPNSDFMSREFEVPIPGCKPYKLNLFRLVWRTLFVILSTVIAMLLPFFNDIVGLIGAIGFWPLTVYLPVEMYITQTKIPKWGIKWIGLQMLSVACFVITILAAAGSIAGVIDDLKVYKPFVTSY

SEQ ID NO: 3909 - protein, 84 aa, Glycine max
  Clone ID: PAT_MRT3847_63488C.1.pep
MKVKILQWHAIASWTWDAQDETCGICRMAFDGCCPDCKLPGDDCPLIWGVCNHAFHLHCILKWVHSQTSQAHCPMCRREWQFKG

SEQ ID NO: 3910 - protein, 61 aa, Glycine max
  Clone ID: PAT_MRT3847_63655C.1.pep
LPRRVRKVGRVSIAIPIMSHPIPTSDDTHSVQIIIPHIQMGLKSNMYLFCCSYTHIAATKG

SEQ ID NO: 3911 - protein, 53 aa, Glycine max
  Clone ID: PAT_MRT3847_63797C.1.pep
LCCLLKNPTPVRVWLLKSFSMIKRKKFIAVTEKEDSLNENQPSVGMCSRAYGK

SEQ ID NO: 3912 - protein, 188 aa, Glycine max
  Clone ID: PAT_MRT3847_6427C.1.pep
MEATSAATVPTTFYMSPSQSHLSNFGMCYGVGENGNFHSPLTVMPLKSDGSLCILEALKRSQTQVMVPTSSPKLEDFLGGATMGTHEYGSHERGLSLDSIYYNSQNAEAQPNRDLLSQPFRQQGHMSVQTHPYYSGLACHGLYQAPLEEETTKETHVSDCSSLMPMTEGLKNWVAPTREFFTHQQVLE

SEQ ID NO: 3913 - protein, 48 aa, Glycine max
  unsure (1)..(48): unsure at all Xaa locations
  Clone ID: PAT_MRT3847_64305C.1.pep
TTSLSKTTXASYXKHYDDQGRKXDEXGNXEKQTDEYGNPVXAASXTXX

SEQ ID NO: 3914 - protein, 148 aa, Glycine max
  Clone ID: PAT_MRT3847_65269C.1.pep
NEALRINVLFRHIQNMLSSHTTVIAEAGDTWFTCQKLKLPQGCGYEFQMQYGSIGWSVGATLGYAQAAPHKRVIACIGDGSFQMTVQEVSTMLRCEQNGIIFLINNGGYTTEVEIHDGPYNVIKNWDYAGLVERLDNGESKCWTAKVL

SEQ ID NO: 3915 - protein, 244 aa, Glycine max
  Clone ID: PAT_MRT3847_65615C.1.pep
MDSFNSFFDSTNRWNYDTLKNFRQISPVVQNHLKQVYFTLCFAVVAAAVGAYLHVLLNIGGFLTTVACVGSSVWLLSTPPFEERKRVTLLMAASLFQGASIGPLIDLAIQIDPSLIFSAFVGTSLAFACFSGAALVARRREYLYLGGLVSSGLSILLWLHFASSIFGGSTALFKFELYFGLLVFVGYIVVDTQEIVERAHLGDLDYVKHALTLFTDLVAVFVRILVIMLKNSTERNEKKKKRRD

SEQ ID NO: 3916 - protein, 104 aa, Glycine max
  Clone ID: PAT_MRT3847_65785C.1.pep
PRVLFNEDLVVVHDALEFGHCRLSLAVPKEGIFENIHTMEDLLKMSEWTEERPLRVVTGFGYLGDKFLREKGFKHVSFLSADGALESYPPVSLLPLHLFSFLFP

SEQ ID NO: 3917 - protein, 376 aa, Glycine max
  Clone ID: PAT_MRT3847_65831C.1.pep
MSLLSDLINLNLSDTTEKVIAEYIWIGGSGMDLRSKARTLPGPVSDPSELPKWNYDGSSTGQAPGEDSEVILYPQAIFRDPFRRGNNILVICDAYTPAGEPIPTNKRHAAAKVFSHPDVVAEVPWYGIEQEYTLLQKDIQWPLGWPVGGFPGPQGPYYCGVGADKAFGRDIVDAHYKACIYAGINISGINGEVMPGQWEFQVGPSVGISAGDEIWAARYILERIIEIAGVVVSFDPKPIKGDWNGAGAHTNYSTKSMREDGGYEVIKAAIDKLGKKHKEHIAAYGEGNERRLTGRHETADINTFLWGVANPLSPSTLTLSPRALLPPSRALLSPSRALLTLAAPSLSKPPPASFRWLVTPHRISKQRLCLTRSLST

SEQ ID NO: 3918 - protein, 757 aa, Glycine max
  Clone ID: PAT_MRT3847_66342C.1.pep
MWKLKFAEGGNPWLRTLNNHVGRQVWEFDPKLGSPQDLLEIEKARQNFHDNRFTHKHSADLLMRMQFARENPTREVLPKVGVKDIEDVTQEIVTKTLRRAVSFHSTLQCHDGHWPGDYGGPMFLMPGLVITLSITGALNTVLTEEHRKEICRYLYNHQNKDGGWGLHIEGPSTMFGSVLSYITLRLLGEGPNDGQGEMEKARDWILGHGGATYITSWGKMWLSVLGVYEWSGNNPLPPEIWLLPYMLPFHPGRMWCHCRMVYLPMSYLYGKRFVGPISPTVLSLRKELYTVPYHDIDWDQARNLCAKEDLYYPHPLVQDILWASLHKFLEPILMHWPGKRLREKAIISALEHIHYEDENTRYICIGPVNKVLNMLCCWVEDPNSEAFKLHLPRIYDYLWIAEDGMKMQGYNGSQLWDTAFAVQAIIASNLIEEFGPTIRKAHTYIKNSQVLEDCPGDLNKWYRHISKGAWPFSTGDHGWPISDCTAEGLKAVLLLSKIAPEIVGEPIDVKRLYDSVNVILSLQNEDGGFATYELKRSYNWLEIINPAETFGDIVIDYPYVECTSAAIQALASFRKLYPGHRREEIQHCIDKATTFIEKIQASDGSWYGSWGVCFTYGAWFGVKGLIAAGRSFSNCSSIRKACEFLLSKQLPSGGWGESYLSCQNKVYSNLEGNRSHVVNTGWAMLALIDAGQAKRDSQPLHRAAAYLINSQLEDGDFPQQEIMGVFNKNCMITYAAYRNIFPIWALGEYQSQVLQSR

SEQ ID NO: 3919 - protein, 158 aa, Glycine max
  Clone ID: PAT_MRT3847_6668C.1.pep
FGSSGSVSSLAWFMSNQETSFVTIGQRVLARPLKVRFHYGHPDVFDRIFHITRGGISKASCGINLSEDIFAGFNSTLRRGNITHHEYIQCGKGRDVGLNQISLFEAKVACGNGEQTLSRDIYRLGHRFDFFRMLSCYFTTIGFYISSMIVGLTCYAFL

SEQ ID NO: 3920 - protein, 59 aa, Glycine max
  Clone ID: PAT_MRT3847_66759C.1.pep
TSVHKWSCCRGMTFREVVTEPMRSGNRDSTCCDFASRTRLEPWRVQSCTAKWILGKVKW

SEQ ID NO: 3921 - protein, 260 aa, Glycine max
  unsure (1)..(260): unsure at all Xaa locations
  Clone ID: PAT_MRT3847_66975C.1.pep
MAAAPSPREENVYMAKLAEQAXERYEEMVEFMEKVSAAADNEELTVEERNLLSVAYKNVIGARRASWRIISSIEQKEESRGNEDHVSVIRDYRSKIESELSNICDGILKLLDSRLIPSASSGDSKVFYLKMKGDYHRYLAEFKTGAERKEAAESTLSAYKAAQDIANAELPPTHPIRLGLALNFSVFYYEILNSPDRACNLAKQAFDEAIAELDTLGEESYKDSTLIMQLLRDNLTLWTSDMQDDGADEIKEAAPKQDDQ

SEQ ID NO: 3922 - protein, 192 aa, Glycine max
  Clone ID: PAT_MRT3847_67765C.1.pep
WRIVCPSPIIETRNNNLEMQSVNNKSLIEELDKLLERLRVPSEYATNLTGGSFDEARMLQNVEACEWLTSALRGLGVPNLDPSYANMRTVKEKRAELEKLKSTFVRRASEFLRNYFASLVDLMISDKSYFSQRGQLKRPDHADLRYKCRTYARLLQHLKSLDKNCLGPLIKAYCSSLNLLLRRELFSLCFLF

SEQ ID NO: 3923 - protein, 59 aa, Glycine max
  Clone ID: PAT_MRT3847_68206C.1.pep
LKASIPTTINSGRGAEFEWAVIALFHLLITSTARVRALREAFYRQNLPYVTNLLATVLV

SEQ ID NO: 3924 - protein, 103 aa, Glycine max; identical to SEQ ID NO: 3555
  Clone ID: PAT_MRT3847_68258C.1.pep

SEQ ID NO: 3925 - protein, 244 aa, Glycine max
  Clone ID: PAT_MRT3847_68261C.1.pep
QNLSKEEFVHILRRQSTGFSRGSSKYRGVTLHKCGRWEARMGQFLGKKAYDKAAIKCNGREAVTNFEPSTYEGELKSAAINEGGSQNLDLNLGIATPGPPKENWGQLQFPSFPYNTHGGRSSMMETNVSSGIGNPSLKRMVATEDRPSLWNGMSPNFFPNGQERAERIGVDPSNGLPNWAWQTHGQVNATPVPTFSAAASSGFSISATFPSAAIFPTSSMNSIPQSLCFTSSSMPTRNASEYYY

SEQ ID NO: 3926 - protein, 44 aa, Glycine max
  Clone ID: PAT_MRT3847_69342C.1.pep
NIISLIKGWCYHENSYYMCEIAIRSHIPHNILSGNIKFKSWGSL

SEQ ID NO: 3927 - protein, 584 aa, Glycine max
  Clone ID: PAT_MRT3847_69622C.1.pep
GGGHLVYLEIGDGILQEVKHAQLEYEISCLDINPIGENPNHSNLAAVGMWTDISVRIFSLPDLSLITKEQLGGEIIPRSVLLCAFEGISYLLCALGDGHLLNFMLNTSTGELTDRKKVSLGTQPITLRTFSSKNTTHVFAASDRPTVIYSSNKKLLYSNVNLKEVSHMCPFNSAAFPDSLAIAKEGELTIGTIDDIQKLHIRSIPLGEHARRICHQEQSRTFAICSLKYNPASGEDSEMHFVRLLDDQTFEFISTYSLDTYEYGCFIISCSFSDDNNVYYCVGTAYVLPEENEPTKGRIIVFAVEDGKLQLIAEKETKGAVYCLNAFNGKLLAAINQKIQLYKWVLRDDGTHELQSECGHHGHILALYVQTRGDFIVVGDLMKSISLLIYKHEEGAIEERARDYNANWMSAVEIVDDDIYLGAENSFNLFTVRKNSEGATDEERGRLEVVGEYHLGEFVNRFRHGSLVMRLPDSDVGQIPTVIFGTINGVIGVIASLPHEQYVFLEKLQSNLRKVIKGVGGLSHEQWRSFNNEKKTVEARNFLDGDLIESFLDLNRSKMDEISKAVDVSVEELCKRVEELTRLH

SEQ ID NO: 3928 - protein, 82 aa, Glycine max
  Clone ID: PAT_MRT3847_69723C.1.pep
PGSTHAVRKKKKKKKKKKKKKKKKKKKKKKKKKKKKKKKKKKKKKKKKKRGGRLKEPNLNTPGFQRKIFLLGPPKLNSWPGF

SEQ ID NO: 3929 - protein, 367 aa, Glycine max
  Clone ID: PAT_MRT3847_69851C.1.pep
MGAGLVAFLLMVLVQLVYAVMNITSKLAIESGMSPLVLVAYRQLFATVSIAPFAYWLEWNTLPRITQRLMIQILFSSLTGVTGNQMLYFVGLKYSSATIACALTNLLPAFTFILAVLFRQENLGIKKRAGLAKVFGTILCVSGALLLSFYHGKTIGLGQSSIHWRYAEKMEGTSSSGKGNMFLGPLVVILSTLVWAAWFIIQKDISKTFPAPYTSTGLMCFMASFQCVIIAVCVDHRASAWSLHNAMRLSSALYAGIFCTGLAYCLMSWTIERKGPLYVSVFTPLQLVLTAILSWALLREKLYVGTAVGSLLIVLGLYSVLWGKSEEVNKGDGIEEDAVKEAVKDSKNDMELQSYVPSNGNNGRVIA

SEQ ID NO: 3930 - protein, 352 aa, Glycine max
  Clone ID: PAT_MRT3847_71429C.1.pep
QFLSVSFFTASMELDGVLLGMCNPLLDISAVVDDAFLQKYGIKLNDAILAEDKHKPMYEELANNPNVEYIAGGATQNSIRVAQWMLQAPGATSYIGCIGKDKFGEEMKKKCTLDGVKVNYYEIDNTPTGTCAVCVVGGERSLVANLSAANCYKSEHLTRPENWALVEKAKYFYISGFFLTVSPDSIQLVAEHAAANNKFFMMNLSAPFICEFFKDALNKVLPYMDYVFGNETEARTFSKAQGWETDNVEEIALKISQLPKASETHKRITVITQGADPVCVAEDGKVKIYPVIPLPKEKLVDTNGAGDAFVGGFLSQLVKHKPIEECIRAGCYAANVIIQRPGCTYPPTPDFH

SEQ ID NO: 3931 - protein, 37 aa, Glycine max
  Clone ID: PAT_MRT3847_71501C.1.pep
IFCLIMLLGASASAATASIFPQCSQAPIASLLPHTSH

SEQ ID NO: 3932 - protein, 44 aa, Glycine max
  Clone ID: PAT_MRT3847_72097C.1.pep
NFFPSKSFVGGSQTLPFAVGLVWESRVIFKLLKVKWTFFQPFPP

SEQ ID NO: 3933 - protein, 49 aa, Glycine max
  unsure (1)..(49): unsure at all Xaa locations
  Clone ID: PAT_MRT3847_72935C.1.pep
LQSTHTIGIGHALNFSVIYYEIXNSPERACHLAKQAFDEAIAELNTLSE

SEQ ID NO: 3934 - protein, 283 aa, Glycine max
  Clone ID: PAT_MRT3847_73198C.1.pep
MEDPSAATTLLLNSEYSRLFVEDTDLYNRIVLGTLLPHFVWGPLPHFLQTWLRNYLGGVLLYLLSGLLWCFYIYYWKRNVYVPKDAIPSRRAMLLQISVAMKAMPWYTLLPTVSEYLVETGWTKCYPRLYNVGWLAYLVYLAIYLSIVEFGIYWMHRELHDIKPLYKYLHATHHIYNKQNTLSPFAGLAFHPLDGILQALPHSLCLFFMPIHFTTHLVLIFIEGIWTANIHDCIHGKLWPVMGAGYHTIHHTTYRHNYGHYTIWMDWLFGTLHNPEEDEGKAM

SEQ ID NO: 3935 - protein, 266 aa, Glycine max
  Clone ID: PAT_MRT3847_7340C.1.pep
VRNSRGRPTRPGFSYLFAAKSNEELTSIKRAAYLTTSVMKNFVVTKLENVIDEEKKISHSTLMEETEKVILEPSKVNCKLKADNVDICYPPIFQSGGEFDLKPSAVSNDELLHYDSASVIICAVGARYKSYCSNIARTFLIDADPLQSRAYEVLLKAHEAVIGSMKPGNKLSVAYQAAVSVVERDAPDLISYLTKSAGTGIGIEFRESGLNLNAKNEQIIREGMVFNVSLGVQKLQCENSKSKNKQFSLLLADTVIITKDKTEIVT

SEQ ID NO: 3936 - protein, 56 aa, Glycine max
  Clone ID: PAT_MRT3847_73437C.1.pep
FVKVRAFAYKDFIDLALLKNGLVVALVPAMVRVRAKTKPESLTIFQCFWWWDHLIF

SEQ ID NO: 3937 - protein, 389 aa, Glycine max
  Clone ID: PAT_MRT3847_73498C.1.pep
MADLGSASSKRMWCSVPERMQLHLAMLALQFGYAGFHVVSRAALNMGVSKLVFPVYRNIIALLLLLPFAYFLEKKDRPAMTLNFVCQFFLLALVGITANQGFYLLGLENTSPTFASAIQNSVPAITFLMAAILRIEQVRLNRKDGLGKVAGTVLCVVGATVITLYKGPTIYSPTTGVNINNTRVTQVFELGSVSLGDAKGKNWTLGCLYLIGHCLSWSGWLVLQAPVLKKYPARLSVTSYTCFFGLLQFLVIALLLERDAQAWLFHSGGEAFTILYAGVVASGIAFAVQIWCIDRGGPVFVAVYQPVQTFVVAIMASIALGEEFYLGGIIGAVLIVAGLYLVLWGKSEERKFAREQLAIASTEHSIIRPASHAKASLAQPLLSSSTENV

SEQ ID NO: 3938 - protein, 133 aa, Glycine max
  Clone ID: PAT_MRT3847_73499C.1.pep
MADLGSAPSKRMWCSVPERMQLHLAMLALQFGYAGFHVISRAALNMGVSKLVFPVYRNIIALLLLLPFAYFLEKKERPAMTLNFVGQFFLLALVGITANQGFYLLGLDNTSPTFASAIQNSVPAITFLMAVIL

SEQ ID NO: 3939 - protein, 47 aa, Glycine max
  Clone ID: PAT_MRT3847_73971C.1.pep
LRNCSQNKKKAGLKIKIVISNLCVYKPFSFYPIPFHWCPSPQYSVVN

SEQ ID NO: 3940 - protein, 475 aa, Glycine max
  Clone ID: PAT_MRT3847_74475C.1.pep
MMALNISSPAEVKSIFFADSFKSNCLTAKFSGGFAFKRKERRAASGGRVYCSVQATPPPPAWPGRAVPEQGRKTWDGPKPISIVGSTGSIGTQTLDIVAENPDKFKVVALAAGSNVTLLADQVKRFKPQLVAVRNESLIAELEEALHDVEEKPEIIPGEQGIIEVARHPDAVSVVTGIVGCAGLKPTVAAIEAGKDIALANKETLIAGGPFVLPLAQKHNVKILPADSEHSAIFQCIQGLPEGALRRVILTASGGAFRDWPVDKLKDVKVADALKHPNWNMGKKITVDSATLFNKGLEVIETASGGAFNYDHIEIVIHPQSIIHSMIETQDSSVLAQLGWPDMRLPILYTLSWPDRIYCSEVTWPRLDLCKLGSLTFKTPDNVKYPSMNLAFSAGRAGGTMTGVLSAANEKAVEMFIDEKISYLDIFKVVELTCEKHQNELVSSPSLEEIIHYDLWARKYAASLQDSSSFTPILA

SEQ ID NO: 3941 - protein, 103 aa, Glycine max
  unsure (1)..(103): unsure at all Xaa locations
  Clone ID: PAT_MRT3847_74488C.1.pep
MSGRGKGGKGLGXGGAKRHRKVLRDNIQGITKPAIRRLARMGGVKRISGLIYEETRGVLRIFLDNVIRDAVTYTEHARRKTVTAMDVVYALKRQRGTLYGFGG

SEQ ID NO: 3942 - protein, 83 aa, Glycine max
  unsure (1)..(83): unsure at all Xaa locations
  Clone ID: PAT_MRT3847_74583C.1.pep
MASYQKHYYDXGXAXVXEYGNVEKQTDEYGNPVHAAXVTYVATRTAAGGYSXDXXXQRDXTNAYXVXTXRQHSSXXYDGDTNK

SEQ ID NO: 3943 - protein, 134 aa, Glycine max
  Clone ID: PAT_MRT3847_75107C.1.pep
MSGKGAKGLITAKNPSSSKDKDKKKPISRSSRAGLQFPVGRIHRLLKSRVTAHGRVGATAAVYSAAILEYLTAEVLELAGNASKDLKVKRITPRHLQLAIRGDEELDTLIKGTIAGGGVIPHIHKSLINKSSKE

SEQ ID NO: 3944 - protein, 131 aa, Glycine max
  unsure (1)..(131): unsure at all Xaa locations
  Clone ID: PAT_MRT3847_75209C.1.pep
DSWANTWLNSWAHWLKADPRKYLKMKERLVGVSEETTTVVKRLYQMHETGALLFPAINVNDYVTKSKFDNLYGCRHSLPDGLMMATDVMIAGKDAAVCGYGDVLTGCAAALKQCXARVIETEIDPICAVQA

SEQ ID NO: 3945 - protein, 193 aa, Glycine max
  Clone ID: PAT_MRT3847_7526C.1.pep
ITTGYGAAVITAGRGGVEKGSQVAIFGAGCVGLSVIQGAVKQGASKIIVVDVNDSKKEWAKKFGATDFVNPAKDLKEGENIQSRLIDMTDGGCDYTFDCTGNVHVMRSALEACHKGWGESIIIGVAAAGQEISTRPFQLVTGRVWKGCAFGGVKGRSQMGSLVQDYMDNKLKVDEFITHRQPLSGINDAFHDM

SEQ ID NO: 3946 - protein, 182 aa, Glycine max
  Clone ID: PAT_MRT3847_75496C.1.pep
MFSRRSSGRVASGRVALENGVPLPLLPDPKANLQWDEVKPLSGKPYWHSVLSPTNLQPRYNLMPGMNLRSKLPSNEVPTILIYGGKSWDMVYYGQSKQKAFGVTGWKKFVIDNCLRVGDACIFELMESSDKKVILEVQILRGDIPSEWLGNEMIIGQGNEMIIGQENEMIIGHSRENPIVLN

SEQ ID NO: 3947 - protein, 74 aa, Glycine max
  unsure (1)..(74): unsure at all Xaa locations
  Clone ID: PAT_MRT3847_75960C.1.pep
IQEEIYENCTVYIHAAPGKDEMXYRVDRSGGLVNAXTGIKSDILIQVPNSSTRNDAAQAVKKMRIMEEDEDGMD

SEQ ID NO: 3948 - protein, 469 aa, Glycine max
  Clone ID: PAT_MRT3847_76010C.1.pep
MATAAEKLSALKSAVAGLNEISENEKNGFISLVGRYLSGEAQHVEWSKIQTPTDEVVVPYDTLAPTPEGSSEVKNLLDKLVVLKLNGGLGTTMGCTGPKSVIEVRDGLTFLDLIVIQIENLNSKYGSNVPLLLMNSFNTHDDTQKIVEKYQNSNIEIHTFNQSQYPRLVVEDFLPLPSKGHTDKDGWYPPGHGDVFPSLLNSGKLDALLSQGKEYVFVANSDNLGAIVDLKILNHLIQNKNEYCMEVTPKTLADVKGGTLISYEGRVQLLEIAQVPDEHVNEFKSIEKFKIFNTNNLWVNLNAVKRLVEADALKMEIIPNPKEVDGIKVLQLETAAGAAIRFFDKAIGINVPRSRFLPVKATSDLLLVQSDLYTLEDGFVIRNKARENPENPSIELGPEFKKVSNFLGRFKSIPSIVELDSLKVAGDVWFGAGVILKGKVSIVSKPGVKLEVPDGVAIVDKEINGPEDL

SEQ ID NO: 3949 - protein, 503 aa, Glycine max
  Clone ID: PAT_MRT3847_76330C.1.pep
MNSNNFFHPNKNIFLTLNAVFLFLLFSCFRSLGLFLRCRHPTHNTFTTQHLISLFCHPQNPQSFLLNISDPNKKKQASHGFPDPWLVLVKSTPLPEEDQIEEGLKKMKGSNNRFFTVALVAAWYSSNIGVLLLNKYLLSNYGFKYPIFLTMCHMTACSLLSYVAIAWMKVVPLQSIRSRVQFFKISALSLVFCVSVVFGNISLRYLPVSFNQAIGATTPFFTAVFAYLMTFKREAWLTYLTLVPVVTGVIIASGGEPSFHLFGFIICVAATAARALKSVLQGILLSSEGEKLNSMNLLLYMSPMAVVFLLPATLIMEENVVGITLALARDDSKIIWYLLFNSALAYFVNLTNFLVTKHTSALTLQVLGNAKGAVAVVVSILIFRNPVSVTGMMGYSLTVFGVILYSEAKKRSNERTTFSYTLQLQHLVFVTAQSTSRFLKENLFSMLVIRIQSFLTIIYIFFTHTPDLIERVSRCISNDRCRNSPQNKIAINDVSLLYLCWDN

SEQ ID NO: 3950 - protein, 307 aa, Glycine max
  Clone ID: PAT_MRT3847_76332C.1.pep
MKGSNNRFFTVALVAAWYSSNIGVLLLNKYLLSNYGFKYPIFLTMCHMTACSLLSYVAIAWMKVVPLQSIRSRVQFFKISALSLVFCVSVVFGNISLRYLPVSFNQAIGATTPFFTAVFAYLMTFKREAWLTYLTLVPVVTGVIIASGGEPSFHLFGFIICVAATAARALKSVLQGILLSSEGEKLNSMNLLLYMSPMAVVFLLPATLIMEENVVGITLALARDDSKIIWYLLFNSALAYFVNLTNFLVTKHTSALTLQVLGNAKGAVAVVVSILIFRNPVSVTGMMGYSLTVFGVILYSEAKKRSK

SEQ ID NO: 3951 - protein, 540 aa, Glycine max
  Clone ID: PAT_MRT3847_77498C.1.pep
SSRKFSTDYNRWEEEIEKWQNPILKDETLPEWYKFTLFNELYFLVAGGTIWIDSPVLSSNMRNDQDRVRELESAVVKETEDKMSDRKRTVVESTTDSTYDSAVITGHDRADEKLYEDDDDVGRFLYLEGVEYIMWCTYDVHFYASFALLELFPRIELNIQRDFARAVLCEDGRKVKFLAEGNWGIRKVYGAVPHDLGTHDPWHEMNAYNIHDTSKWKDLNPKFVLQVYRDFATTGDLEFGVDVWPAVRAAMEYMEQFDRDGDGLIENDGFPDQTYDTWTVHGVSTYCGCLWLAALQAAAAMALDLGDREFAEKCKRKFLKAKPAFEEKLWNGTYFNYDSGSSGNSKSIQADQLAGQRWHASSGLPPLFEDSKIKSALRKVYDFNVMKVKGGRMGAVNGMHPNGKVDETCMQSREVWTGVTYGLAATMILAGMEEEAFATAEGIFLAGWSEDGYGYWFQTPEAWTMDGHYRSLMYMRPLAIWGMQYAINRPKAILEAPKINIMDRIHLSPVIGGYSHNETGVRKITTKARCFNNSVFHCAC

SEQ ID NO: 3952 - protein, 445 aa, Glycine max
  Clone ID: PAT_MRT3847_77871C.1.pep
MATIKAVKARQIFDSRGNPTVEVDVILSDGTFHRAAVPSGASTGVYEALELRDGGSDYLGKGVLKAVENVNSIIAPALLGKDPTKQTEIDNFMVQQLDGTVNEWGWCKQKLGANAILAVSLAVCKAGAAVKKIPLYKHIANLAGNKTLVLPVPSFNVINGGSHAGNKLAMQEFMILPVGASSFKEAMKMGVEVYHHLKAVIKKKYGQDATNVGDEGGFAPNIQENKEGLELLKTAIAKAGYTGKVVIGMDVAASEFYDNKDKTYDLNFKEENNDGSQKISGDSLKNVYKSYVTDYTIMSMAIPLFQDDWEHYAKLTAEVGQQVQIVGDDLLVTNPKRVEKAIKEKACNALLLKVNQIGSVTESIEAVRMSKQAGWGVMASHRSGETEDTFIADLSVGLATGQIKTGAPCRFERLAKYNQLLRIEEELGSAAVYAGAKFRAPVEPY

SEQ ID NO: 3953 - protein, 86 aa, Glycine max
  Clone ID: PAT_MRT3847_78078C.1.pep
GFVTSFNPLCMIIVTTLGPSLLEKPLPLGSIIGGIIIPVGLYSGGWGKAKDYKNDGSSPAPPKETETMRLPIPFPNNKYQPLCVAL

SEQ ID NO: 3954 - protein, 97 aa, Glycine max
  unsure (1)..(97): unsure at all Xaa locations
  Clone ID: PAT_MRT3847_7831C.1.pep
EKTTVQNHTPLDQMLVPEYSEAFPAQHAASKTPGAILSYSESGYAEVHTXSTVTDHVTNKTISEHLDSNKSKGRYPVDRSSCGSNTAYNWDVETDAL

SEQ ID NO: 3955 - protein, 344 aa, Glycine max
  Clone ID: PAT_MRT3847_7877C.1.pep
MGASSDPTQDGSDEQQKRSEIYTYEAPWHIYAMNWSVRRDKKYRLAIASLLEQYPNRVEIVQLDDSNGEIRSDPSLSFEHPYPPTKSIFIPDKDCHRPDLLATSSDFLRVWHISESSVELKSLLNGNKNSEYCGPLTSFDWNEAEPRRIGTSSIDTTCTIWDIEKETVDTQLIAHDKEVYDIAWGGVGVFASVSADGSVRVFDLRDKEHSTIIYESSEPDTPLVRLGWNKQDPRYMATIIMDSAKVVVLDIRFPTLPVVELQRHQASVNAVAWAPHSSCHICTAGDDSQALIWDLSSMGQPVEGGLDPILAYTAGAEIEQLQWSSSQPDWVAIAFSTKLQILRV

SEQ ID NO: 3956 - protein, 373 aa, Glycine max
  Clone ID: PAT_MRT3847_78923C.1.pep
MALESAPASADIRGVHTHGGGYVQYNIYGNLFEVSRKYVPPIRPVGRGAYGIVCAAVNAETHEEVAIKKVGNAFDNRIDAKRTLREIKLLRHMEHENVIALKDIIRPPQRYNFNDVYIVYELMDTDLHQIIQSNQQLTDDHCRYFLYQLLRGLKYVHSANVLHRDLKPSNLLLNANCDLKIADFGLARTTSETDFMTEYVVTRWYRAPELLLNCSEYTAAIDIWSVGCILGEIITRQPLFLGKDYVHQLRLITELIGSPDDTSLGFLRSDNARRYVRQLPQYPRQQFAARFPSMSPGAVDLLEKMLVFDPNRRITVEEALCHPYLAPLHDINEEPACVRPFSFDFEQPSFTEEDIKELIWRESVLFNPDPPIY

SEQ ID NO: 3957 - protein, 44 aa, Glycine max
  unsure (1)..(44): unsure at all Xaa locations
  Clone ID: PAT_MRT3847_7958C.1.pep
GIRPEVAECIDKIRVNPGNFADRRAQLXTLEYAEADYQNELEPY

SEQ ID NO: 3958 - protein, 485 aa, Glycine max
  Clone ID: PAT_MRT3847_79740C.1.pep
MALLVEKTTSGREYKVKDLSQADFGRLEIELAEVEMPGLMACRTEFGPSQPFKGARITGSLHMTIQTAVLIETLTALGAEVRWCSCNIFSTQDHAAAAIARDSAAVFAWKGETLQEYWWCTERALDWGPGGGPDLIVDDGGDATLLIHEGVKAEELYEKTGELPDPNSTDNAEFQIVLTIIRDGLKTDPTRYRKMKERLVGVSEETTTGVKRLYQMQANGTLLFPAINVNDSVTKSKFDNLYGCRHSLPDGLMRATDVMIAGKVAVVAGYGDVGKGCAAAMKQAGARVIVTEIDPICALQALMEGLQVLTLEDVVSEADIFVTTTGNKDIIMVDHMRKMKNNAIVCNIGHFDNEIDMLGLENYPGVKRITIKPQTDRWVFPETNTGIIVLAEGRLMNLGCATGHPSFVMSCSFTNQVIAQLELWKEKSTGKYEKKVYVLPKHLDEKVAALHLGKLGAKLTQLSKSQADYISVPVEGPYKPAHYRY

SEQ ID NO: 3959 - protein, 114 aa, Glycine max
  unsure (1)..(114): unsure at all Xaa locations
  Clone ID: PAT_MRT3847_80400C.1.pep
MRSTMKAQHANGRGSRSPFLTSYALTLAFITFVSVLYFKDFSSTLHRPFLHRPRXHAXPDKSQAGRRAAAERLPFAVGAAPAGCDVGRGEWVYDDAARPWYQEEECPYIQPQLT

SEQ ID NO: 3960 - protein, 658 aa, Glycine max
  unsure (1)..(658): unsure at all Xaa locations
  Clone ID: PAT_MRT3847_8046C.1.pep
MDPPPLSAATQKNHPESVESFSPCFRVAETWTDETLPAVPGAKLRLMCSYGGHIMPRPHDKSLSYIGGDTRIVVVDRHSSLKDLCSRLSRTILNGRPFTLKYQLPNEDLESLITVTTDEDLDNMVEEYDRIMAKGSASSRLRVFLFFTKPEATVSMGSLLDDAKSETWFVDALNNSGMISRVVSDSAAGDSFVNLDGVGVGGVSASGSSNNLESLPDANKVKNFPEVVQVQSTPGSPMMENSSSSPSFSPSLVNLPPIRVHVDDNGSRLQQENKVGLVVEEQFAQMTIASGVKPDDGLVNVVSSAVAVPVIPASVTMASAGVITTSDNVMNRVVCEDDRSDPGFQKPPLPLQLVQPRTSGGVGLPSPDSVASDSSIAAANSFSKTVYYQDQVQAALLDNKIVAMPNAKSEISDQMIQVQGQLQDSGYTLPPQLDPNKQHFQQQKPFVHASTHYIHHPAATGPVPVSSYYPVYAPPQPQQLHPPIGQQQYPVYVMPVGPTQVTQPYNMALQPNIADPNVVASSRSLMPQSIVTSAAYKDGTPPIYPTKSVSSTMASNSGYAPIPTNQFQPQYVGLHQFHHPPQSIAVAPSSTTTNNNYGYEYGGHVQDQAYYTQQTTTAPLLPQYQSMTPAAAAAALSDASKXFPADNIQQPTRASQPV

SEQ ID NO: 3961 - protein, 67 aa, Glycine max
  unsure (1)..(67): unsure at all Xaa locations
  Clone ID: PAT_MRT3847_80550C.1.pep
MRKPMEPKXAGGAEXTLARXWXGSRXTTXXYYYASKVXTXPLVXXAKLTLGNSYRANPNHXNLTVPX

SEQ ID NO: 3962 - protein, 50 aa, Glycine max
  Clone ID: PAT_MRT3847_80955C.1.pep
LSAASSESKVLYLKLNGDYHRYLDEFTTGAERKDAAESTLLAYKSAHDIA

SEQ ID NO: 3963 - protein, 463 aa, Glycine max
  Clone ID: PAT_MRT3847_81594C.1.pep
MGVAAESESNDNIPLLLTQSAYPLKRTGTVWTAVAHIVTGVIGSGVLSLPWSTAQLGWLAGPFSILLIASTTLFSSFLLCNTYRHPHPEYGPNRSASYLDVVHLHLGISNGRLSGLLVSISLYGFAIAFVITTAISLRTIQNSFCYHNKGPEAACESVDAYYMLLFGAIQIVLSQIPNFHNIKWLSVVAAIMSFTYSFIGMGLSIAQIIEKGHAEGSIGGISTSNGAEKLWLVSQALGDISFSYPFSTILMEIQDTLKSPPPENQTMKKASVIAVSVTTFLYLSCGGAGYAAFGDNTPGNLLTGFVSSKSYWLVNFANACIVVHLVGSYQVYSQPLFGTVENWFRFRFPDSEFVNHTYILKLPLLPAFELNFLSLSFRTAYVASTPVIAMIFPYFNQILGVLGSIIFWPLTIYFPVEIYLSQSSTVSWTTKWVLLRTFSFFGFLFGLFTLIGCIKGIVTEKIS

SEQ ID NO: 3964 - protein, 333 aa, Glycine max
  Clone ID: PAT_MRT3847_81676C.1.pep
MSSVSKGDRKASIDAASWLFNVVTSVGIILVNKALMATYGFSFATTLTGLHFATTTLLTLILKSLGYIQTSHLPLSDIIKFVLFANFSIVGMNVSLMWNSVGFYQIAKLSMIPVSCFLEVVLDNVRYSRDTKLSIVLVLLGVAVCTVTDVSVNAKGFIAAVIAVWSTALQQYYVHFLQRKYSIGSFNLLGHTAPAQAASLLLVGPFMDYWLTGKRVDAYGYGLTSTLFIILSCTIAVGTNLSQFICIGRFTAVTFQVLGHMKTILVLILGFIFFGKEGLNLHVVLGMIIAIAGMVWYGSASSKPGGKERRSFSLPKTQDYSSLPVSSEPDTKE

SEQ ID NO: 3965 - protein, 384 aa, Glycine max
  Clone ID: PAT_MRT3847_8188C.1.pep
PPIISMATQGQVITCKAAVAWEPNKPLTVQDVQVAPPQAGEVRVQILFTALCHTDAYTWGGKDPEGLFPCILGHEAAGIVESVGEGVTNVQPGDHVIPCYQAECGECKTCKSGKTNLCGKVRSATGVGVMLNDGKSRFSINGKPIYHFMGTSTFSQYTVVHDVSVAKIDPKAPLEKVCLLGCGVSTGLGAVWNTAKVESGSIVAIFGLGTVGLAVAEGAKTAGASRVIGIDIDSKKFDVAKNFGVTEFINPNEHDKPIQQVIIDRTDGGVDYSFECIGNVSVMRAALECCHKGWGTSVIVGVAASGQEISTRPFQLVSGRVWKGTAFGGFKSRSQVPWLVDKYLKKEIKVDEYITHTLTLSEINKAFDLLHEGGCLRCVLSTQE

SEQ ID NO: 3966 - protein, 98 aa, Glycine max
  unsure (1)..(98): unsure at all Xaa locations
  Clone ID: PAT_MRT3847_82083C.1.pep
FTSRDRRTLXFPAVXPXRXISPXXLVTSLITLXQXXCNFQXXSFXTQRRNARETIXXXSIVLMXLXXIRLXXXSXILSLAELXXXLRXIHXXLQDCTL

SEQ ID NO: 3967 - protein, 192 aa, Glycine max
  Clone ID: PAT_MRT3847_82249C.1.pep
MRFMPLSRLIFRLPRHYTHGPLQSRALQTDSVLKDPQAKPIKYKIPQFYDPYGPRPPPSEKIVQLAEQIEALSEEERGQIMPTLSERLKLPKLQPISTDGMDMGTEGGGAAGLKVEEKKAEKTAFDVKLEKFDAAAKIKVIKEVRAFTNLGLKEAKDLVEKVPVVLKQGVTKEEANEIIEKIKAAGGVAVME

SEQ ID NO: 3968 - protein, 339 aa, Glycine max
  Clone ID: PAT_MRT3847_82360C.1.pep
MGRSPCCDENGLKKGPWTPEEDQKLVQHIQKHGHGSWRALPKLAGLNRCGKSCRLRWTNYLRPDIKRGKFSQEEEQTILHLHSILGNKWSAIATHLPGRTDNEIKNFWNTHLKKKLIQMGFDPMTHQPRTDLVSTLPYLLALANMTDLMDHQTLDEHAIRLQAEAVHLAKLQYLHYLIRSSNSLSTNKSYDQSATTNMEPAAFSLLNSISNVKENPVMLQPADDTPAASLSHGIVSSQPLHHPNVLPHHLLEPQVSFSSQSCLNSEIGQGTNFAIISQGDHTLDLDSSWIIPSITPPNAIGTSANNPGDASSSTSSYGGGPSSYWSELLFEDPILHELS

SEQ ID NO: 3969 - protein, 377 aa, Glycine max
  Clone ID: PAT_MRT3847_82686C.1.pep
MVESIAATSLLGHRPICGGNLTRDVSVKRKSLNTVRFPTTEFLGGGRIVVSLALPKSDKQDRFVFSSIKALAVELTREAHAYREEKLPNRDTKIDRGFDQRPDSWPPANRADKPSLRNPLLRHERMGCGWLGAIFEWEGVLIEDNPDLEKQAWLALSQEEGKPSPPAFILKRIEGMKNEQAISEVLCWSRDPAQLRRMANRKEEIYQSLQGGIYRFLSGSKEFVSVLMHYKIPMALVSTRPRKALESAIGEIGIEDTFSVIVAAEDVHRGKPDPEMFVYAAQLLNFIPERCIVFGNSNLTVEAAHEARMKCVAVASKHPVYELGAADLVVRRLDELSVVDLKNLADIEMTEFGSVEPEMELEVEKDYGSSSVDDNFW

SEQ ID NO: 3970 - protein, 527 aa, Glycine max
  Clone ID: PAT_MRT3847_83093C.1.pep
MHSSHLLLEEPIRMVSILEPSKPNFFPAMTKIVGTLGPKSRSVEVISACLKAGMSVARFDFSWDDPEYHQETLENLKNAIKTTKKLCAVMLDTVGAEMQVVNKSEKAISLEADGQVVLTPDRGQEASSQILPINFDGLAKSMKKGDTIFIGQYLFTGSETTSVWLEVSEVKGQDVVCIIKNTATLAGSLFTLHASQIHIDLPTLTEKDQEVISSWGVKNKIDFLSLSYTRHAEDVRQAREFLSKLGDLSQTQIFAKIENVEGLTHFDEILQEADGIILSRGNLGIDLPPEKVFLFQKSALYKCNMAGKPAVLTRVVDSMTDNLRPTRAEATDVANAVLDGSDAILLGAETLRGLYPIETISTVGRICSEAEKVFNQDLYFKRTVKYVGEPMTHLESIASSAVRAAIKVKASIIICFTSSGRAARLIAKYRPTMPVLSVVIPRLKTNQLKWSFSGAFEARQSLIVRGLFPMLADPRHPAESTSATNESILKVALDHGKALGVIKSHDRVVVCQKLGDASVVKIIELED

SEQ ID NO: 3971 - protein, 502 aa, Glycine max
  Clone ID: PAT_MRT3847_83345C.1.pep
MATTRVVAEQKPKTKIVCTLGPASRSVPMIEKLLRAGMNVARFNFSHGSHEYHQETLDNLRAAMENTGILCAVMLDTKGPEIRTGFLKDSKPIQLIQGNEITISTDYDLKGDEKTICMSYKKLPEDVKPGMVILCADGTISFTVLSCDKQAGLVQCRCENSATLGERKNVNLPGVIVDLPTLTDKDKEDILAWGVPNKIDMIALSFVRKGSDLVEVRKVLGKHAKNIMLMSKVENQEGVANFDEILANSDAFMVARGDLGMEIPIEKIFLAQKVMIYKCNIQGKPVVTATQMLESMIKSPRPTRAEATDVANAVLDGTDCVMLSGETAAGAYPDLAVQTMAKICIEAESTLDYGDVFKRIMEHSPVPMSPLESLASSAVRTANSARAALILVLTRGGSTAKLVAKYRPGMPILSVVVPELKTDTFDWACSDEAPARHSLIFRGLVPVLSAASARASHAETTEEAIEFAMQHAKSKGLCHNGDSVVALHRVGTASIIKILTVK

SEQ ID NO: 3972 - protein, 139 aa, Glycine max
  unsure (1)..(139): unsure at all Xaa locations
  Clone ID: PAT_MRT3847_83406C.1.pep
LDSRLIPCFFSGDSEVFYLMRKGDDLRYLAXFKTGAQRLEGAESTVFAYKAAQDIGNAELPPTGPIMLGLALSFSVFYYEILNSPDRACNLAKQACDEAIAELDTLGEESYRDSTVIMQLLRDNLTLWTSDMADDGADE

SEQ ID NO: 3973 - protein, 79 aa, Glycine max
  Clone ID: PAT_MRT3847_83528C.1.pep
KEWHAVASWTWDAQDETCGICRMAFDGCCPDCKLPGDDCPLIWGVCNHAFHLHCILKWVNSQTSQAHCPMCRREWQFKG

SEQ ID NO: 3974 - protein, 84 aa, Glycine max
  Clone ID: PAT_MRT3847_83529C.1.pep
MKVNILQWHAVASWTWDAQDETCGICRMAFDGCCPDCKLPGDDCPLIWGVCNHAFHLHCILKWVNSQTSQAHCPMCRREWQFKG

SEQ ID NO: 3975 - protein, 289 aa, Glycine max
  Clone ID: PAT_MRT3847_83932C.1.pep
MAPPLEHNGVSTSGDSLRSIPTPFLTKTFQLVDDHTIDHVISWNDSGSSFIVWNTTAFAKDLLPKYFKHNNFSSFVRQLNTYGFRKVVPDRWEFSNEYFRRDEKRLLCEIQRRKILPATPPTRATATAAVLSPLPLSTIPPAKLIVSPSNSAEEQVISSNSSPAELLDENDRLRKENILLTKELEEMRSLCNNIFNLMSNYANVQADGGSAGVAARCFGEDAVEEMNPKLFGVVIGTKRAREENDTVLSLHQPFHADVKSEALDFARRGENKKTPWLNQCHRANQRVCN

SEQ ID NO: 3976 - protein, 139 aa, Glycine max
  Clone ID: PAT_MRT3847_84011C.1.pep
MLGEYSDVVRSPRFNGSGSKVSSFRSPLSKLVESVDEGSDGHEDQNESDRVLYAGWNTSSVPSKAMGHSGNASKSAMNRSADEQLPSSMCFVRLSDMSADEWDVFLEKFQELLKEALHESARAAAGQRMKQRLGTLCKF

SEQ ID NO: 3977 - protein, 47 aa, Glycine max
  Clone ID: PAT_MRT3847_84065C.1.pep
FSPPRIGRFELFHHILVHMYFCLHLYFTTHLVHAPLEASVSSISACT

SEQ ID NO: 3978 - protein, 638 aa, Glycine max
  Clone ID: PAT_MRT3847_85713C.1.pep
MNYELLQIVALLTVIAFGGALRKATGACGSDDLEGLMGFKNGIQMDTSGRLAKWVGRSCCEWEGVVCDNATTRVTQINLPGLIEKDLFQTQMVGQLSPSITLLTSLEILDLGGLVGLTGLARETIGLQMPNLQKLYLYGNNLTGPVPESIGDLPRLQELALHENKISGSIPSTIGSLKKLKSLLLYSNQISGTIPFSLGNLTNLVELDVHDNAIMGQVPNSIGQMQALEKLDLSSNMLSGSIPSSLTNLTAISVLYMDTNYLEGTIPFPSRSGEMPSLGFLRLHNNHLSGNIPPSFGYLVSLKRVSLSNNKIEGALPSSLGNLHSLTELYLSDNSFSGQIPKSIGQLSQLIMLNISSNLIEWPLPQEISSLQNLQTLDLSFNPLNLSSIPPWLTSISSLSRISLAGCGIKGQIPDSLQTTQSPIQELDLSGNLLSGSIPSWIGSLSQLYLLNLSSNSLDSHIPESLTNLPDLGVLDLHSNKLTGSIAGVFDTEQGTLTYIDLSDNNFSSGVEAIGVGEQLNIQYLNLSHNLLKGTLPSSLGKLNSIHSLDLSFNELASNLPEMLAKLTLLERLKLQGNHFSGKIPSGFLKLKKLKELDLSDNVLEGEIPEGKPLTDFPGSTYSGNKGLCGKPLNPCKE

SEQ ID NO: 3979 - protein, 373 aa, Glycine max
  Clone ID: PAT_MRT3847_8643C.1.pep
MSAVESAEHNNIRGVPTHGGRYVQYNIYGNLFEVSRKYVPPIRPVGRGAYGIVCAAVNAETGEEVAIKKIGNAFDNRIDAKRTLREIKLLRHMDHANIMSIKDIIRPPQKENFNDVYLVSELMDTDLHQIIRSNQQLTDDHCRYFLYQLLRGLKYVHSANVLHRDLKPSNLLLNANCDLKIADFGLARTTSETDFMTEYVVTRWYRAPELLLNCSEYTAAIDIWSVGCILGEIITRQPLFPGKDYVHQLRLITELIGSPDDASLGFLRSDNARRYVKQLPQYPKQNFSARFPNMSPGAVDLIEKMLIFDPNRRITVDEALSHPYMSPLHDINEEPVCTRPFSFDFEQPSFTEEDIKELIWRESVKFNPATIYV

SEQ ID NO: 3980 - protein, 487 aa, Glycine max
  Clone ID: PAT_MRT3847_86591C.1.pep
MVEMDGVGSKYHQQTLNVSIDIHQQGISKCFDDDGRPKRTGTVWTASAHIITAVIGSGVLSLAWAIAQLGWIAGPIVMVIFSAITYYTSTLLSDCYRTGDPVTGKRNYTYMDAIQSNFGGNGFKVKLCGLVQYINLFGVAIGYTIAASTSMMAIERSNCFHKSGGKDPCHINSNMYMISFGIVEILFSQIPGFDQLWWLSIVAAVMSFTYSTIGLGLGIGKVIENGGVGGSLTGITIGTVTQTDKVWRTMQALGDIAFAYSYSLILIEIQDTVKSPPSESKTMKKASFISVAVTSIFYMLCGCFGYAAFGDASPGNLLTGFGFYNPYWLLDIANAAIVIHLVGSYQVYCQPLFAFVEKHAAQMFPDSDFLNKEIEIPIPGFHPYRLNLFRLVWRTIYVMLSTVISMLLPFFNDIGGLLGAFGFWPLTVYFPVEMYIIQKRIPKWSTKWICLQILSMTCLLMTIGAAAGSIAGIAIDLRTYKPFKTNY

SEQ ID NO: 3981 - protein, 126 aa, Glycine max
  Clone ID: PAT_MRT3847_86809C.1.pep
MRNNKPQLWLSLSLIITCFSFHTSLAALTTISANQSLSGDETLVSQHGNFELGFFNTGNNSNKFYIGMWYKKISQRTYVWVANRDQPVSDKNSAKLTILEGNLVLLDQSQNLVWSTNLSSPSSGSA

SEQ ID NO: 3982 - protein, 307 aa, Glycine max
  unsure (1)..(307): unsure at all Xaa locations
  Clone ID: PAT_MRT3847_87205C.1.pep
RFRDYLGSVIIEIQVGMGPCGELRYPSYPESNGTWRFPGIGEFQCYDKYMRASLEASTEAIGKKEWGKNGPHDSGQYNQFPEDFSKGXGTWNTEYGQFFLDWYSTKLVEHGEKILVSAKGIFNSCGVKLSAKVAGIHWHYKTRSHAAELTAGYYNTRFRDGYLPIAQMVAKHGVVLNFTCMEMRDREQHEHCSPEGLVHQVKMAARTAGAELAGENALERYDAGAFSQVLSTSNSGSGLAAFTYLRMNRRLFEGDNWRHFVEFVKCMSEGGKRQRLPQSDSCGTHLYVGHITGIQKQQEQAQEVALV

SEQ ID NO: 3983 - protein, 393 aa, Glycine max
  unsure (1)..(393): unsure at all Xaa locations
  Clone ID: PAT_MRT3847_87237C.1.pep
MATSPLSQLLLSLILLQNFHHSHSFSLSVENHNEDVIVSSPNATFTAGFYPVGENAFCFAIWYTRPPRTVVWMANRDQPVNGKRSTLSLLGTGNLELTDAGQFIVWSTNTATPSKQNPRLHLYDTGNLVLIAILDNSEDHVLWQSFDFPTDTLLPNQPLSKSTNLVSSRSGTNYSSAHRPLFFDFENVLRLMYQGPRVSSVYWPYAWLQSNNFGNGNGRSTFNDSRVVVLDDFGKLVSSDNFTFTTIDSGTVVLRRRLTLDHDGNARVYSIRDGEDNWKVTGIFRPQPCFIHGICGPNSYCSNKPTTGRTCSCLPGYRWVDSQDWSQGCESSFQLWCNNTEKESHFLRLPEFDXYGYDYGYYPNHTYEQCVNLCLELCECKGFHTASQRKVTL

SEQ ID NO: 3984 - protein, 87 aa, Glycine max
  Clone ID: PAT_MRT3847_87591C.1.pep
DIALADLAPTHPIRLGLALNFSVFYYEILNSTDRACNLAKQAFDEAISELDSLGEESYKDSTLIMQLLRDNLTLWTSDTNEDRGDEI

SEQ ID NO: 3985 - protein, 114 aa, Glycine max
  Clone ID: PAT_MRT3847_8787C.1.pep
FPKIFSEEEATMSGRGKGGKGLGKGGAKRHRKVLRDNIQGITKPAIRRLARRGGVKRISGLIYEETRGVLKIFLENVIRDAVTYTEHARRKTVTAMDVVYALKRQGRTLYGFGG

SEQ ID NO: 3986 - protein, 151 aa, Glycine max
  Clone ID: PAT_MRT3847_88032C.1.pep
RLVIRLQAKYGNKWKKIAAEVPGRTAKRLGKWWEVFKEKQQREKKDVNRISDPINNSKYEHILESFAEKLVKERPSPSFLMAASNGAFLHTDTPAPASSLLPSWLSNSSSPAADGPSSLSVTLSLSSSMVIAPPFSWLPPKRGPDNAPFVL

SEQ ID NO: 3987 - protein, 371 aa, Glycine max
  Clone ID: PAT_MRT3847_88033C.1.pep
VQVSRHGLWDLHLEMKERQRWRAEEDALLRSYVKQYGPREWNLVSQRMNTYLNRDAKSCLERWKNYLKPGIKKGSLTEEEQRLVIHLQAKYGNKWKKIAAEVPGRTAKRLGKWWEVFKEKQQREKKEINRIADPINNSKYEHILESFAEKLVKERPSPSFVMAASDGAFLLTDTPAPASSLRPSWLSNSSSAAAIGPSSLSVKLSLSSSTVATPPFSWLPPERGPDNAPFVLGNVSALHGAIPTLSDSMHMSQMVEHCKELEEGHRALATHKKEAAWRLSRVELQLESEKANRRREKIEEFEAKIKALQEEEKAALGRIEAEYREQLAALRRDAENKEQKLAEQWDAKHLRFTRLLEQLGCRAGLLEPNAR

SEQ ID NO: 3988 - protein, 345 aa, Glycine max
  Clone ID: PAT_MRT3847_8803C.1.pep
MAVSDGVVKKIVLSYTYVAIWIFLSFTVIVYNKYILDRKMYNWPYPISLTMIHMAFCSSLAYILVRVLKLVEPVSMSRDLYLKSVVPIGALYSLSLWFSNSAYIYLSVSFIQMLKALMPVAVYSIGVIFKKEAFKNETMANMVSISLGVAVAAYGEAKFDAWGVTLQLMAVAFEATRLVLIQILLNSKGISLNPITSLYYIAPCCLVFLSVPWIIMEYPSLRDNSSFHLDFAIFGTNSACAFALNLAVFLLVGKTSALTMNVAGVVKDWLLIAFSWSVIKDTVTPINLIGYGLAFLGVAYYNHCKLQALKASEAQKKALQADEEAGRLLEQKDGEGTGRKNDNQN

SEQ ID NO: 3989 - protein, 37 aa, Glycine max
  unsure (1)..(37): unsure at all Xaa locations
  Clone ID: PAT_MRT3847_88136C.1.pep
FYLSPXLXCXSFYSXRXFXISLCNHVRRERERDPGXL

SEQ ID NO: 3990 - protein, 57 aa, Glycine max
  unsure (1)..(57): unsure at all Xaa locations
  Clone ID: PAT_MRT3847_88256C.1.pep
LXLLLGRVCFVXNRVXWFEXKGKGLTFWGLVVGXGECAVWWLXXRWSEGSAXNGFXE

SEQ ID NO: 3991 - protein, 34 aa, Glycine max
  Clone ID: PAT_MRT3847_8838C.1.pep
YIIIRMQQVAARSLIFTPIFSYVLEAEIVFCSLY

SEQ ID NO: 3992 - protein, 40 aa, Glycine max
  Clone ID: PAT_MRT3847_88927C.1.pep
VIGACFTSHHNFLASDYNQGPPTCILILQQKQNKTAPGAP

SEQ ID NO: 3993 - protein, 33 aa, Glycine max
  Clone ID: PAT_MRT3847_89506C.1.pep
YRVQQAIAAGILPLAPLLLQRSSGVFEQLPLVH

SEQ ID NO: 3994 - protein, 86 aa, Glycine max
  Clone ID: PAT_MRT3847_89565C.1.pep
MATPNPTRFSLAMERTGQWVFSPEIPTDVIVAVGESTFSLHKFILAAKSNYIRKVIMESEESDLTRIEISNIPWRTRSFLRKPRNF

SEQ ID NO: 3995 - protein, 103 aa, Glycine max
  Clone ID: PAT_MRT3847_89776C.1.pep
MTGRGKGGKGLGKGGAKRHRKILRDNIQGITKPAIRRLARRGGVKRISAMIYEETRGVLKTFLEGVIRDAVTYTEHAKRKTVTSLDVVYALKRQGRTLYGFGG

SEQ ID NO: 3996 - protein, 293 aa, Glycine max
  Clone ID: PAT_MRT3847_89886C.1.pep
MMRTPISSDESGLKKGPWSPEEDKILVDFIEKHGHGSWRALPRLAGLNRCGKSCRLRWTNYLRPDIKRGKFSDEEEQLIINLHSVLGNKWAAIASHLPGRTDNEIKNLWNTHLKKKLMQMGLDPVTHRPRTHHLNLLSNLQQILALIRLQSDANKLQLLQNIFEASNSDPLPDSSYSLLNDVLGGLNNLHSNDLHNLYDGNSLSVQNFDQNLNGGRNAEPSPSSNSLPNLVSASPDRSPVVKEAQNILVNSKDFSTSAFELTWGDFMDEEETNQTYWKGFMDQHSNQTWSTFP

SEQ ID NO: 3997 - protein, 175 aa, Glycine max
  unsure (1)..(175): unsure at all Xaa locations
  Clone ID: PAT_MRT3847_9026C.1.pep
AVTFVAAGLSSGKIGSIAYACXFTVLGATLMDKSGRRPLITASASGTFLGCFITGVAFFLKDQSXLLDWVPILAVAGVLIYVGAFSIGMGPVPWIIISEIFPIHVKGTAGSLVVLVNWLGSWVVSYTFNFLMSWSSPGTLFLYAGCSLLTILFVAQLVPETKGKTLDEVKHASIH

SEQ ID NO: 3998 - protein, 134 aa, Glycine max
  unsure (1)..(134): unsure at all Xaa locations
  Clone ID: PAT_MRT3847_90691C.1.pep
LEDDDRYLAEFKACNDTNEAADHSIRAYESAALAVHADTPPTHPMRLGVAGNNSERYYEILNSPRRACHLAKQAFHESISELDTLHEESCXDCTLSMHLLRDNLTVWTSGIPEDGEDAPKVNGTGKLGRGEDAP

SEQ ID NO: 3999 - protein, 63 aa, Glycine max
  Clone ID: PAT_MRT3847_91167C.1.pep
PAATKASITANHLKVNTFSSKNPVRYKLQETMYTLLISISSCHIRYASLIWLKPFPTCYRFTL

SEQ ID NO: 4000 - protein, 78 aa, Glycine max
  Clone ID: PAT_MRT3847_91658C.1.pep
YGCEKTTEGDKRRSKVKNTDGMTPRNQMKNCAFYGYVSSFNFIYSICVYISTLIIASLLNDNGGPINRNNVGAEQRIF

SEQ ID NO: 4001 - protein, 314 aa, Glycine max
  Clone ID: PAT_MRT3847_91852C.1.pep
ANALNVNSLRMLLHRSSTPQSSNAIQRIQSSDIEYSHFTRSLVRKVLEESLLKLKEETTRHSKSIRWELGACWVQHLQNQATGKTEPKKEEEAKVEPAVKGLGKQGGLLKELKKKIDIRNSKVEVGKDISPCNGNDINKPEATKQELERQDEEKEIIWKKLLSDAAYTRLKESKTDLHLKSPDELMEMAHKYYVDTALPKLLADFGSLELSPVDGRTLTDFMHTRGLQMSSLGRVVELADKLPHVQSLCIHEMVVRAYKHILQAVVAAVDNVSELASSIASCLNILLGTPSPETNDEVTSCADVETLLRFLGEC

SEQ ID NO: 4002 - protein, 103 aa, Glycine max; identical to SEQ ID NO: 3555
  Clone ID: PAT_MRT3847_92215C.1.pep

SEQ ID NO: 4003 - protein, 103 aa, Glycine max; identical to SEQ ID NO: 3555
  Clone ID: PAT_MRT3847_92216C.1.pep

SEQ ID NO: 4004 - protein, 103 aa, Glycine max
  Clone ID: PAT_MRT3847_92218C.1.pep
MSGRGKGGKGLGKGGAKRHRKGLRDNIQGITKPAIRRLARRGGVKRISGLIYEETRGVLKIFLENVIRDAVTYTEHARRKTVTAMDVVYALKRQGRTLYGFGG

SEQ ID NO: 4005 - protein, 207 aa, Glycine max
  Clone ID: PAT_MRT3847_92219C.1.pep
MVKHNNVIPNGHFRKHWQNYVKTWFNQPARKTRRRLARQKKAVKIFPRPTAGSLRPIVHGQTLKYNMKVRAGRGFSLEELKAAGIPKKLAPTIGISVDHRRKNRSLESLQANVQRLKTYKAKLVVFPRRAHKVKAGDSSLEELANATQVQGPFLPIVREKPTVDLVKVTDEMKAFKAYYKLRLERTNKRHHGARLKKAAEAEKEDKK

SEQ ID NO: 4006 - protein, 686 aa, Glycine max
  unsure (1)..(686): unsure at all Xaa locations
  Clone ID: PAT_MRT3847_92419C.1.pep
TVGVTPSDPRKSLPQWGLHFLSYTHRLNQIKKRSSGVYASLSERERGEYYSQRPPTPLLDTVNYPIHMKNLSTXVSRTGGHLGSSLGVVELTVALHYVFNAPQDKILWDVGHQSYPHKILTGRRDKMHTMRQTNGLSGFTKRSESEFDCFGTGHSSTTISAGLGMAVGRDLKGRKNNVVAVIGDGAMTAGQAYEAMNNAGYLDSDMIVILNDNKQVSLPTATLDGPIPPVGALSSALSRLQSNRPLRELREVAKGVTKRIGGPMHELAAKVDEYARGMISGSGSSLFEELGLYYIGPVDGHNINDLVAILNEVKSTNTTGPVLIHVITEKGRGYPYAEKAADKYHGVTKFDPPTGKQFKSKATTRSYTTYFAEALIAEAEADKDVVAIHAAMGGGTGMNLFHRRFPTRCFDVGIAEQHAVTFAAGLACEGLKPFCAIYSSFMQRAYDQVVHDVDLQKLPVRFAMDRAGLVGADGPTHCGSFDVTFMACLPNMVVMAPSDEAELFHMVATAAAINDRPSCFRYPRGNGIGVQLPTGNKGTPLEIGKGRILIEGERVALLGYGSAVQNCLAAASLVEHHGLRVTVADARFCKPLDRSLIRSLAKSHEVLITVEEGSIGGFGSHVAQFMALDGLIDGKLKWRPIVLPDRYIDHGSPADQLSLAGLTPSHIAATVFNILGQTREALEVMS

SEQ ID NO: 4007 - protein, 673 aa, Glycine max
  unsure (1)..(673): unsure at all Xaa locations
  Clone ID: PAT_MRT3847_92420C.1.pep
IKKRSSGVYASLSERERGEYYSQRPPTPLLDTVNYPIHMKNLSTNELKQLADELRSDVIFSVSRTGGHLGSSLGVVELTVALHYVFNAPQDKILWDVGHQSYPHKILTGRRDKMHTMRQTNGLSGFTKRSESEFDCFGTGHSSTTISAGLGMAVGRDLKGRKNNVVAVIGDGAMTAGQAYEAMNNAGYLDSDMIVILNDNKQVSLPTATLDGPIPPVGALSSALSRLQSNRPLRELREVAKGVTKRIGGPMHELAAKVDEYARGMISGSGSSLFEELGLYYIGPVDGHNINDLVAILNEVKNTETTGPXLIHVVTEKGRGYPYAERAAAKYHVVSKFDPATGEQFKAKATTRSYSTYFAEALIAEAEADKDIIGIHAAMGGGTGMNLFHRRFPTRCFDVGIAEQHAVTFAAGLACEGLKPFCAIYSSFMQRAYDQVVHDVDLQKLPVRFAMDRAGLVGADGPTHCGSFDVTFMACLPNMVVMAPSDEADLFHMVATAAAINDRPSCFRYPRGNGIGVQLPTGNKGTPLEIGKGRILIEGERVALLGYGSAVQNCLAAASLVEHHGLRVTVADARFCKPLDRSLIRSLAKSHEVLITVEEGSIGGFGSHVAQFMALDGLIDGKLKWRPIVLPDRYIDHGSPADQLSLAGLTPSHIAATVFNILGQTREALEVMS

SEQ ID NO: 4008 - protein, 749 aa, Glycine max
  Clone ID: PAT_MRT3847_92633C.1.pep
MDAYSSGEEVVVKTRKPYTITKQRERWTEEEHNRFLEALKLHGRAWQRIEEHIGTKTAVQIRSHAQKFFTKLEKEALVKGVPIGQALDIDIPPPRPKRKPNNPYPRKTRIGTTSLHSGAKDGKLNLVESSHVNQALDLKKEPLPEKHDLDEGLTTVKENKDENHAKVFTLLQEVPCSSVSSANESSITMSVPLGNPCAFKEITPSVKEVIARDEKTESFVTVEPENGKLEINDGKQTNGTSKDSRLEDSDALHMKLVQNEKPDGLDCELTIDGMQGNQNYPRHVTVHVVDGNLGTNTQNPSQDMLFRDSMFQPIGGVNGQRNVFTNTAPSNTSESQNNTARSSVHQSFLPYPPFTQHNQDDYQSFLHMSSTFSNLIVSTLMQNPAAHAAASFAATFWPYANPETSANSPRCSQGGFTNRQIGSPPCVAAIAAATVAAATAWWAAHGLLPLCAPLHTSFACPASVTTVPSMNTGEAPALKAEQEKTTLQNPPLQDQMLDPEYSEAQQAQHSASKSPAAILSDSESGDAKLNTSSKVTDHETNKTISEHLDSNKTKGRKPVDRSSCGSNTASSSDVETDALEKGEKGKEEPEIPDANQLAIEFSNRRRSVSNLTDSWKEVSEEGRLAFQALFSREVLPQSFSPPHALKNTDHQMDNANDNKQNIDDKDEDLDGKKCSSNYEAMQKNLLFVENNEGLLTIGLGQGKLKTHRTGFKPYKRCSMEAKENRVGASSNQGEEQGCKRIRLEGETST

SEQ ID NO: 4009 - protein, 36 aa, Glycine max
  Clone ID: PAT_MRT3847_93042C.1.pep
MAAFNKLGGLLRHSALVPGITGGSSPAVFNAARLMS

SEQ ID NO: 4010 - protein, 97 aa, Glycine max
  Clone ID: PAT_MRT3847_93101C.1.pep
KKKLHPLQFAHKLRDYEFSLRFGKKASFCYNYYYFFPDSLGCGCVKRVADSLQMLLDYMLLSSSTSPLLFITSSLSLNFLQRECVTSNNCVFVCMFL

SEQ ID NO: 4011 - protein, 188 aa, Glycine max
  Clone ID: PAT_MRT3847_93738C.1.pep
SEAFRTLLMWLCRYKHVEDAEALFHNSVKKGLRADIKMWNVILNGWCVLGNSHEAKRVWRDIVASPCKPDIFTYATFIKALTKKGKLGTALKLFRGMWDKGGKPDVVICNCIIDALCFKKRIPEALEIFCDMSERGCEPNVATYNSLIKYMCKIQRMEKVYELVDEMERKKGSCLPNAVTYCYLLKSL

SEQ ID NO: 4012 - protein, 74 aa, Glycine max
  unsure (1)..(74): unsure at all Xaa locations
  Clone ID: PAT_MRT3847_9385C.1.pep
STXKERETHVCVAKLSEQAXRYEEMVECMKTIAKLDLELTVEERNLLSVGYKNVIGARRASWRIMSSIEQKEES

SEQ ID NO: 4013 - protein, 33 aa, Glycine max
  Clone ID: PAT_MRT3847_94325C.1.pep
VDQGRKYDEYGFVEKQSVEYGFPVHAFSVTYVA

SEQ ID NO: 4014 - protein, 92 aa, Glycine max
  unsure (1)..(92): unsure at all Xaa locations
  Clone ID: PAT_MRT3847_94669C.1.pep
SAPTTREDYEYMAKLADQSTRYEEMEEFMNKVYLSAXSYELTVEERNLLSVAYKNMIGARRASXRIISSIEQKEESRSNXDHCPVIHDYRSR

SEQ ID NO: 4015 - protein, 481 aa, Glycine max
  Clone ID: PAT_MRT3847_94687C.1.pep
MAIEKHEDVESGYLHEPFIQPEDAAAACKENGSDKSVKNGSIGMVFLSTLVAVCGSFTFGTCVGYSAPTQAAIRADLNLSLAEFSMFGSLVTIGAMLGAITSGRITDFIGRKGAMRISTGFCITGWIAVFFSKGSYSLDMGRFFTGYGIGVISYVVPVYIAEIAPKNLRGGLATTNQLLIVTGGSVSFLLGSVINWRELALAGLVPCICLLVGLCFIPESPRWLAKVGREKEFQLALSRLRGKDADISDEAAEILDYIETLQSLPKTKLLDLFQSKYVHSVVIGVGLMACQQSVGINGIGFYTAEIFVAAGLSSGKAGTIAYACIQIPFTLLGAILMDKSGRRPLVMVSAAGTFLGCFVAAFAFFLKDQSLLPEWVPILAFAGVLIYIAAFSIGLGSVPWVIMSEIFPIHLKGTAGSLVVLVAWLGAWVVSYTFNFLMSWSSPGTLFLYAGCSLLTILFVAKLVPETKGKTLEEIQACISS

SEQ ID NO: 4016 - protein, 129 aa, Glycine max
  unsure (1)..(129): unsure at all Xaa locations
  Clone ID: PAT_MRT3847_9479C.1.pep
MTQCRNMQGDLIDYVPGFPKESDMNIVECTILLNVPQGYSDVLIKNLYLSCDPYMRLLMAKDRAFGDGYFTLDYPLKGYGVSQVLESGRSDYMKGDLMWGITEWEEYSXWPSSIIHFIIEHTDXPLCYY

SEQ ID NO: 4017 - protein, 468 aa, Glycine max
  Clone ID: PAT_MRT3847_95346C.1.pep
MRIPSTLVEVLLVLALFCCSPWTVWSSNTLCQQTNEEVRPHSVSITEFGAVGDGVTLNTKAFQNAIFYLNSFADKGGAKLFVPAGRWLTGSFDLISHLTLWLDKDAVILGSTNPEDWPVVDPLPSYGRGRELPGGRHKSLIYGHNLTDVIITGNNGTIDGQGSIWWNRFWNRSLDYTRPHLVELMNSTGVLISNLTFLNSPFWTIHPVYCSQVTVQNVRILAPHDSPNTDGIDPDSSDNVCIEDCYISTGDDLIAIKSGWDEYGIAYGRPSTNIIIHRLVGKTQTSGIAIGSEMSGGVSEVHAEDIQFYDSYNGIRIKTSPGRGGYVRNIYVSNVSLANVDIAIWFTGSYGEHPDDAYDPNALPVIEKVTIKDVVGENIKTAGLIEGIEGDNFVNICLSNIILNVTSNYPWNCSYVKGYSDLVQPEACEPLKERIFPDHCSDCYYLTNQIQSSNSQNRAGQTSGDIRG

SEQ ID NO: 4018 - protein, 333 aa, Glycine max
  Clone ID: PAT_MRT3847_95870C.1.pep
MSKARVYTDVNVLRPKEYWDYESLTLQWGDQDDYEVVRKVGRGKYSEVFEGINVNSNERCIIKILKPVKKKKIKREIKILQNICGGPNIVKLLDIVRDQHSKTPSLIFEYVNSTDFKVLYPTLTDYDIRYYIYELLKALDYCHSQGIMHRDVKPHNVMIDHELRKLRLIDWGLAEFYHPGKEYNVRVASRYFKGPELLVDLQDYDYSLDMWSLGCMFAGMIFRKEPFFYGHDNHDQLVKIAKVLGTDELNAYLNKYHLELDPQLDALVGRHSRKPWSKFINADNQHLVSPEAIDFLDKLLRYDHQDRLTAREAMAHPYFSQVRAAESSRMRTQ

SEQ ID NO: 4019 - protein, 87 aa, Glycine max
  Clone ID: PAT_MRT3847_96578C.1.pep
AAAPSPREENEYMAKLADQAARYEEMVETMENVSAAVDNQELTVKERNLLSPAYKNVIGARRASRRIISSIEQKDESHTNQDHESVI

SEQ ID NO: 4020 - protein, 96 aa, Glycine max
  unsure (1)..(96): unsure at all Xaa locations
  Clone ID: PAT_MRT3847_9664C.1.pep
MAPPNPTEFSFAMERTGQWVFSQKIPTVVIVAVDQTNFSFHRLFLAGKSNYVKKSDNGNQRESDLTRXIRFPTYPGGSESFEKSGEILFTALNFEN

SEQ ID NO: 4021 - protein, 160 aa, Glycine max
  Clone ID: PAT_MRT3847_96842C.1.pep
MSDEEHHFESKADAGASKTYPQQAGTIRKNGYIVIKGRPCKVVEVSTSKTGKHGHAKCHFVGIDIFTAKKLEDIVPSSHNCDVPHVNRTDYQLIDIAEDGFLSLLTENGNTKDDLKLPTDESLLTQIKDGFAEGKDLVVSVMSAMGEEQICALKDIGPKN

SEQ ID NO: 4022 - protein, 160 aa, Glycine max; identical to SEQ ID NO: 4021
  Clone ID: PAT_MRT3847_96843C.1.pep

SEQ ID NO: 4023 - protein, 71 aa, Glycine max
  unsure (1)..(71): unsure at all Xaa locations
  Clone ID: PAT_MRT3847_97352C.1.pep
MGYSSREENAYMEKLAELSTRFNEMVDFMXMVAXTVEVEELTVEERILLSVAYKNVIDSRRAWLMIIFFIE

SEQ ID NO: 4024 - protein, 58 aa, Glycine max
  unsure (1)..(58): unsure at all Xaa locations
  Clone ID: PAT_MRT3847_97372C.1.pep
MARYQKHFHDQGPQGDQFCNRYKQTDQYXGTPVHAAKCTYVATKTAAGGYSDDINKQH

SEQ ID NO: 4025 - protein, 147 aa, Glycine max
  unsure (1)..(147): unsure at all Xaa locations
  Clone ID: PAT_MRT3847_97721C.1.pep
DAWEQIESLQRPITMEAGSIVLMDLLWSDPTENDSVEGLRPNARGPGLVTFGPDRVMEFCNNNDLQLIVRAHECVMDGFERFAQGHLITLFSATNYCGTANNAGAILVLGRDLVVVPKLIHSLPPAMSSPEASSERLIXDTWMQELN

SEQ ID NO: 4026 - protein, 66 aa, Glycine max
  Clone ID: PAT_MRT3847_97804C.1.pep
HINMRWWLVASLIVQSMLDSQPTHRNHEFGAAEECRRGQLAGIARIGRHAPSAHESLESSSFISHR

SEQ ID NO: 4027 - protein, 160 aa, Glycine max; identical to SEQ ID NO: 4021
  Clone ID: PAT_MRT3847_98128C.1.pep

SEQ ID NO: 4028 - protein, 160 aa, Glycine max; identical to SEQ ID NO: 4021
  Clone ID: PAT_MRT3847_98129C.1.pep

SEQ ID NO: 4029 - protein, 257 aa, Glycine max
  Clone ID: PAT_MRT3847_98366C.1.pep
MSDSSREENVYMAKLAEQAERYEEMVEFMEKVAKTVEVEELTVEERNLLSVAYKNVIGARRASWRIISSIEQKEESRGNEDHVAIIKEYRGKIEAELSKICDGILNLLESNLIPSAASPESKVFYLKMKGDYHRYLAEFKTGAERKEAAESTLLAYKSAQDIALADLAPTHPIRLGLALNFSVFYYEILNSPDRACNLAKQAFDEAISELDTLGEESYKDSTLIMQLLRDNLTLWTSDITDDAGDEIKETSKQQPGE

SEQ ID NO: 4030 - protein, 350 aa, Glycine max
  Clone ID: PAT_MRT3847_98379C.1.pep
MENAPVVCKEDDQMDLPPGFRFHPTDEELISHYLYKKVIDTKFCARAIGEVDLNKSEPWDLPWKAKMGEKEWYFFCVRDRKYPTGLRTNRATEAGYWKATGKDKEIFRGKSLVGMKKTLVFYRGRAPKGEKSNWVMHEYRLEGKFSVHNLPKTAKNEWVICRVFQKSSAGKKTHISGIMRLDSFADELGSSALPPLSDSSPSIGNTKPLNDTAYVPCFSNPIDVQRNQEGVFDSFTNSIYAVSSNPMGILPRMPPSGSFYSTQGVQAAPNLAFPGSVYTLQDHTILRTLCENNGYKPERDMISVSQETGLTTDINAETSSNFDMGRRPFENHNHASVSVAPLDLDGLWNY

SEQ ID NO: 4031 - protein, 350 aa, Glycine max
  Clone ID: PAT_MRT3847_98380C.1.pep
MENVPAVCKEDDQMDLPPGFRFHPTDEELISHYLYKKVIDTKFCARAIGEVDLNKSEPWDLPWKAKMGEKEWYFFCVRDRKYPTGLRTNRATEAGYWKATGKDKEIFRGKSLVGMKKTLVFYRGRAPKGEKSNWVMHEYRLEGKFSAHNLPKTAKNEWVICRVFQKSSAGKKTHISGIMRLDSFANELGSSALPPLSDSSPSIGNTKPLNDSAYVPCFSNPIDVQRNQEGVFDSFTNSMYGVSSNPMDILPRMPPSGSFYSTQGVQAAPNFAFPGSVYTLQDHTILRALCENNGYKPERDMISVSQETGLTTDINAETSSNFDVGWRPFENHNHASVSVAPLDLDGLWNY

SEQ ID NO: 4032 - protein, 505 aa, Glycine max
  Clone ID: PAT_MRT3847_98690C.1.pep
RGVFLLSRRSGGMGGPGGPGFPLAFGQSKAKFQMEPNTGVTFDDGAGVDEAKQDFMEVVEFLKKPERFTAVGARIPKGVLLVGPPGTGKTLLAKAIAGEAGVPFFSISGSEFVEMFVGVGASRVRDLFKKAKENAPCIVFVDEIDAVGRQRGTGIGGGNDEREQTLNQLLTEMDGFEGNTGIIVVAATNRADILDSALLRPGRFDRQVTVDVPDIRGRTEILKVHASNKKFDADVSLEVIAMRTPGFSGADLANLLNEAAILAGRRGKTAISSKEIDDSIDRIVAGMEGTVMTDGKSKSLVAYHEVGHAICGTLTPGHDAVQKVTLVPRGQARGLTWFIPNDDPTLISKQQLFARIVGGLGGRAAEEIIFGEPEVTTGAAGDLQQITSLAKQMVTTFGMSDIGPWSLMEPSAQGGDVIMRMMARNSMSERLAEDIDAAIKRISDEAYEIALEHIRNNREAIDKIVEVLLEKETLSGDEFRAILSEFVEIPAENRVAPSTPVPATV

SEQ ID NO: 4033 - protein, 336 aa, Glycine max
  Clone ID: PAT_MRT3847_98960C.1.pep
MENSTEESHLRSENSVTYESPYPIYGMSFSPSHPHRLALGSFIEEYNNRVDILSFHPDTLSVTPHPSLSFDHPYPPTKLMFHPRKPSPSSSSDLLATSGDYLRLWEIRDNSVDAVSLFNNSKTSEFCAPLTSFDWNDIDPNRIATSSIDTTCTIWDIERTLVETQLIAHDKEVYDIAWGEARVFASVSADGSVRIFDLRDKEHSTIIYESPHPDTPLLRLAWNKQDLRYMATILMDSNKVVILDIRSPTTPVAELERHRGSVNAIAWAPHSSTHICSAGDDTQALIWELPTLASPTGIDPVCMYSAGCEINQLQWSAAQPDWIAIAFANKMQLLKV

SEQ ID NO: 4034 - protein, 234 aa, Glycine max
  Clone ID: PAT_MRT3847_9915C.1.pep
MFTLNHSSDLYHVSPELSSSLDTSSPASEGSRGVAFSDEEVRLAVRHPKKRAGRKKFRETRHPVYRGVRRRNSDKWVCEVREPNKKTRIWLGTFPTPEMAARAHDVAAMALRGRYACLNFADSAWRLPVPATAEAKDIQKAAAEAAQAFRPDQTLKNANTRQECVEAVAVAVAETTTATAQGVFYMEEEEQVLDMPELLRNMVLMSPTHCLGYEYEDADLDAQDAEVSLWNFSI

SEQ ID NO: 4035 - protein, 100 aa, Glycine max
  unsure (1)..(100): unsure at all Xaa locations
  Clone ID: PAT_MRT3847_99178C.1.pep
AFXXSSEKFKKAGAVVVGISGDDAASHKAFASKYRLPFTLLSDEGTKVRKEWGVPGDFFGSLPGRETYVLDKNGVVQLVYNNQFQPEKHIDETLKILQSL

SEQ ID NO: 4036 - protein, 214 aa, Glycine max
  Clone ID: PAT_MRT3847_99180C.1.pep
MASLTVPNHCVPTLLRTHSLNYPSSQNLPLPSAPSNSQFFGLKLSHSSFSTIPSSSSSLKGSIFAKVNKGSKPPNFTLKDQNGKNVSLSNFKGKPVIVYFYPADETPGCTKQACAFRDSYEKFKKAGAVVVGISGDDAASHKAFASKYKLPFTLLSDEGNKVRKEWGVPGDFFGSLPGRETYVLDKNGVVQLVYNNQFQPEKHIGETLKILQSL

SEQ ID NO: 4037 - protein, 174 aa, Glycine max
  Clone ID: PAT_MRT3847_99342C.1.pep
MRVTNKPMMGRDSANRAQQTPVREKRKKASNKKAPKPPRPPKAPSLDAADHKLIREISELAMLKRARMERMRVRKIAKSSAPSSSNASSLLAMIFTVVFFVVIILQGMSSGKTSVASFQGSPVSAGESEDGLISVHYQLNPSAIDSNAPGSESHTFVQQVAGSDLPEKLRRDSG

SEQ ID NO: 4038 - protein, 159 aa, Glycine max
  Clone ID: PAT_MRT3847_99499C.1.pep
MSDEEHHFESKADAGASKTFPQQAGTIRKNGYIVIKNRPCKVVEVSTSKTGKHGHAKCHFVGIDIFTGKKLEDIVPSSHNCDVPHVNRIDYQLIDISEDGFVSLQTETGGTKDDLRLPTDENLLTQIKDGFAEGKDLVVSVMSSMGEEQICALKDIGPK

SEQ ID NO: 4039 - protein, 179 aa, Glycine max
  Clone ID: PAT_MRT3847_99501C.1.pep
SLVWPSLGIFCALPGAEFGTRSDEEHHFESKADAGASKTFPQQAGTIRKNGYIVIKNRPCKVVEVSTSKTGKHGHAKCHFVAIDIFTGKKLEDIVPSSHNCDVPHVNRIDYQLIDISEDGFVSLLTETGGTKDDLRLPTDENLLSQIKDGFAEGKDLVVSVMSSMGEEQICALKDIGPK

SEQ ID NO: 4040 - protein, 72 aa, Glycine max
  Clone ID: PAT_MRT3847_99856C.1.pep
HPTNTLFGTKRLIGRRFDDAQTHKEMKMVPFKIVKAPNGDAWVEANGQQYSPSQIGAFVLTKMKETAEAYLG

SEQ ID NO: 4041 - protein, 493 aa, Zea mays
  unsure (1)..(493): unsure at all Xaa locations
  Clone ID: PAT_MRT4577_100006C.1.pep
QTDLQYIKXXISSVERXRAELYRTKERYSMKLRMLLDEPTAQKIWPSPIDKASCRFLPNSRTPLSGLCPGTLQNKKLDLKAQVSHQGFQRRDALTSSDPPNSPXIQSGNVIARKRRVQAQFNELQEYYLQRRRTGAQARRQEERDIVAMNREGYHAGLQDFQSVLTTFTRYSRLRVIAELRHGDLFHSANIVSSIEFDRDDELFATAGVSKRIKVFEFSTVVNEPSDVHCPVVEMATRSKLSCLSWNKYSKNIIASSDYEGIVTVWDVQTRQSVMEYEEHEKRAWSVDFSRTDSSMLVSGSDDCKVKVWCTNQEASVINIDMKANICSVKYNPGSSFYVAVGSADHHIHYFDLRNPSSPVHIFGGHKKAVSYVKFLSNNELASASTDSTLRLWDVKDNCPVRTFRGHKNEKNFVGLSVNNEYIACGSETNEVFVYHKAISKPAASHRFVSSDPDDADDDPGSYFISAVCWKSDSPTMLTANSQGTIKVLVLAP

SEQ ID NO: 4042 - protein, 44 aa, Zea mays
  Clone ID: PAT_MRT4577_100058C.1.pep
SVHPMMAHIHILHTVDTSHDWQIRHRSLISFSVSIRNYEVGLVD

SEQ ID NO: 4043 - protein, 271 aa, Zea mays
  Clone ID: PAT_MRT4577_100095C.1.pep
MAHGDRMTTFEEGERESEYGYVRKVSGPVVVADGMGGAAMYELVRVGHDSLIGEIIRLEGDSATIQVYEETAGLTVNDPVLRTKKPLSCELGPGILGNIFDGIQRPLKTIAIKSGDVYIPRGVSVPALDKDQQWEFQPNKLGVGDNITNGDLYATVFENTLMKHHIALPPGAMGKISYIAPAGQYSLQDTVLELEFQGIKKEFTMLHTWPVRTPRPVASKLAADTPLLTGQRVLDALFPSVLGGTCAIPGAFRCGKTSIRQVLSQYSNSDT

SEQ ID NO: 4044 - protein, 69 aa, Zea mays
  Clone ID: PAT_MRT4577_100187C.1.pep
RLQMIMKLGESTRQNCFWQSTLTHPIRIHHYSSRKANSYFSCHLSSCDYHKKTCYATAYMIMHMHAKDN

SEQ ID NO: 4045 - protein, 58 aa, Zea mays
  Clone ID: PAT_MRT4577_100196C.1.pep
EKSSSKATVCIHHHRAGWFSVHRMLIAPPDAPRPSHTLMFCHHKLNTLPAQMHVKNTC

SEQ ID NO: 4046 - protein, 350 aa, Zea mays
  Clone ID: PAT_MRT4577_100216C.1.pep
MAAGGNGAGGDTRAAFARIYKTLKEELLTDPAFEFTEESRQWIDRMVDYNVLGGKCNRGLSVVDSYKLLKGADALGEEETFLACTLGWCIEWLQAFFLVLDDIMDDSHTRRGQPCWFRVPQVGLIAANDGIILRNHISRILRRHFKGKPYYADLLDLFNEVEFKTASGQLLDLITTHEGEKDLTKYNITVHGRIVQYKTAYYSFYLPVACALLLSGENLDNYGDVENILVEMGTYFQVQDDYLDCYGDPEFIGKIGTDIEDYKCSWLVVQALERADESQKRILFENYGKKDPACVAKVKNLYKELDLEAVFQEYENESYKKLIADIEAQPSIAVQKVLKSFLHKIYKRQK

SEQ ID NO: 4047 - protein, 217 aa, Zea mays
  Clone ID: PAT_MRT4577_100218C.1.pep
MKFLYLPPFKQMVDYNVLGGKCNRGLSVVDSYKLLKGADALGEEETFLACTLGWCIEWLQAFFLVLDDIMDDSHTRRGQPCWFRVPQVGLIAANDGIILRNHISRILRRHFKGKPYYADLLDLFNEVEFKTASGQLLDLITTHEGEKDLTKYNITVHGRIVQYKTAYYSFYLPVACALLLSGENLDNYGDVENILVEMGTYFQVQDDYLDCYGDPEI

SEQ ID NO: 4048 - protein, 419 aa, Zea mays
  Clone ID: PAT_MRT4577_100294C.1.pep
MELLPVEVVGNILSHLGVARDVMIASAVCRKWRDACRRHLRLLSFNSNDFPRDMTTRQLEIVITQTIFQTIGLQRLSIHIDNTHEFSAAPVIAWLMYTRETLRSLSYNVRTIPNVSILEKCGRQKLEVLDLELDHNTITGVEPSYQRFTCLKSLSLRHVSILALDLSLLVAACPRIESLALDVLEVVTSELQSTMELTSHTLKSLFAKSVGVDKIILDADNLEVLHLNALNLDLFELNGKGTLKHFKIDDVSVTHLDIGDNTDHLEAVDVSNFTIVWPKFYSMISRASNLRMLRFWGVVFDDEDEIVDSETIAVSFPLLRHLSLSYELRDGLLHYSLQGSSLLENVSVLELGWTVISEHFGPWVFGMIGRCPNLKKLVIHGVLSETKTREDRQMLASFTSFIVCVMRKYVHVDVQFEYE

SEQ ID NO: 4049 - protein, 1090 aa, Zea mays
  unsure (1)..(1090): unsure at all Xaa locations
  Clone ID: PAT_MRT4577_100586C.1.pep
MAPPPGKLSDDIDGSSDPDADKKGLDSEMDMLGRGNSEKKASERTRRGLDIDLEDQKVRRIPVDEFAPKKLTLQLDLEKPSLGDEKSPSERRQPQPQPQQLQQQKPSKAEIKHEKSAMPAAVTPPMPIPVGGWLGNFPPFGYLSPVPGLSAAGLHHPMDVKPGSSSGLHHSALLPPPSRSKRCATHCYIAQFIQHQQRVAKMNSFWPPTAAAAAAAAANRPPGPFFGARPFSMGVVPPTDAASMLVNPMQGSYPVRAHTPMQEAKAPMATSPFQGSLSKDKTLGNAAGAESSQRKQPPSHETLQSTPLPNMLQAPAFIFPFNQQHAMVAAANAANRAGDAKSSGAGNTLPPSASAHTLATNSGAAAMNLSFANMQPADAQFLAILQNGYPFQVAAHPGGPPYRGMAPPGPAVPFFNGHVYSSPMLHPSQQQGAQSQSHQKTQMPNLPSSSQKHQPQQSQGLLGYAPNANAAAAASNSQNYSSGNQRPVLAHRQESDKTGEDGLSSDDKPSHSQKSGYEHNFAVPVHLPNFAMMPAAQPAVSQSEKKLSDHHHQQQQPQVSRGQGVRIDLASSQPFVMPFGSIGPPGSTPSGLDFSALAQNHAVFQSHQDAARHGYPQLNFAAAQSTQHKPQHGETKSVAGDSSLTHIAGDSQRKKSTSTKYSGDSQQHSLSFTRTESKNHVPPFLSGSTNESSSRTLSXLEQNLQIHLWEANPQIPPLLPQHHLQLXSSISQQHQHFLQMQVQHKHQHQQMIQHHHLNRPRSAAPSTQNSAGGYPDRLNMASFQNMMYPPNAAQGQGRVQSPQLKASSGRGTPSSTATTPPAAAPPNLIVMKTSSLHPQQAKIPMQALSTPGHQSQSSLSMSSSKMAPVTNLSTGGGDLSRSSNAPVASGSPSNSVSKSTGGSPPATGNAKGVQQPVQLPSPQQQLAKNSVSTCGSKSTPANHFSMAMPSILGQQPNSSPGSNTGSKQQSHMSSSMKQQPFPQGHFFISSTYAPQAPGAGGAAALGLYQKRPGDKTQPQAPHQQNALSAAAGSNMKSLHPSSGGFMHLAAATQSAGGGMPHTHMPAAQLSFGTMPVPLKPSSDQKPAAGK

SEQ ID NO: 4050 - protein, 90 aa, Zea mays
  unsure (1)..(90): unsure at all Xaa locations
  Clone ID: PAT_MRT4577_100678C.1.pep
KNKAPXWHDHLQCWCLNFHGRVTVASVKNFQLVATAGSGGPWGVGDEETVILQFGKIEDDAFTMDYRQPLSAFQAFAICLTSFGTKLACE

SEQ ID NO: 4051 - protein, 195 aa, Zea mays
  Clone ID: PAT_MRT4577_100772C.1.pep
METEEAYEMVLNDVLGFMLLSTPRVDSQLPRSLFFSRSGSAAVAAMDVSGAGGKAKKGAAGRKAGGPTKKSVSRSSRAGLQFPVSRVGRYLKKGRYAQRVGTGAPVYLAAVLEYLAAEVLELAGNAARDNKKTRIIPRHVLLAIRNDEELGKLLAGVTIAHGGVLPNIHTVLLPKKVAEKAAKEPKKAAKSPKKA

SEQ ID NO: 4052 - protein, 419 aa, Zea mays
  Clone ID: PAT_MRT4577_100776C.1.pep
MAARVLPPPLTLVLLLLLLPLSARDTVAAGEDFPRDGRVIDLDESNFEAALGAIDFLFVDFYAPWCGHCKRLAPELDEAAPMLAGLSEPIVVAKVNADKYRKLGSKYGVDGFPTLMLFIHGVPIEYTGSRKADQLVRNLKKFVAPDVSILESDSAIKNFVENAGTSFPMFLGFGVNDSFIAEYGRKYKKRAWFAVAKDFSEDVMVAYEFDKVPALVAIHPKYKEQSLFYGPFEENFLEDFVRQSLLPLVAPINTETIKMLNDDQRKVVLTIMEDDSDENSTQLVKILRSAASANRDLVFGYVGIKQWDEFVETFDVSKSSQLPKLLVWDRNEEYELVDGSERLEEGTDQASQISQFLEGYRAGRTTKKKISGPSFMGFLNSLVSLTSLYILIFVIALLFVMVYFAGQDDTPQPRRIHEE

SEQ ID NO: 4053 - protein, 552 aa, Zea mays
  Clone ID: PAT_MRT4577_100777C.1.pep
MAQKKKKKKKKKKKKKKKKKKKKKKKKKRAPATAMAAKVLPPALLSFILLLLLSLSAREEGVPFPYFRRGGDRIERPPRRWRLESCHRLCSLSYSCCCSRSQTSRPAGGPGKLVKFSAPILPARRRSNRAPATAMATRVLPPALLSLVLLLLLSLSARDTVAAGEDFPRDGRVIDLDDSNFEAALGAIDFLFVDFYAPWCGHCKRLAPELDEAAPVLSGLSEPIVVAKVNADKYRKLGSKYGVDGFPTLMLFIHGVPIEYTGSRKADQLVRNLKKFVSPDVSILESDSAIKNFVENAGISFPIFLGFGVNDSLIAEYGRKYKKRAWFAVAKDFSEDIMVAYEFDKVPALVAIHPKYKEQSLFYGPFEENFLEDFVRQSLLPLVVPINTETLKMLNDDQRKVVLTILEDDSDENSTQLVKILRSAANANRDLVFGYVGIKQWDGFVETFDVSKSSQLPKLLVWDRDEEYELVDGSERLEEGDQASQISQFLEGYRAGRTTKKKITGPSFMGFLNSLVSLNSLYILIFVIALLFVMVYFAGQDDTPQPRRIHEE

SEQ ID NO: 4054 - protein, 158 aa, Zea mays
  unsure (1)..(158): unsure at all Xaa locations
  Clone ID: PAT_MRT4577_101009C.1.pep
FGSRWSQAVGFRWRELQSCVRTXRRCLETMARSNLRLDIHGGRKCEGXGLDIQDLSHDGCWGXLKTSGTFNPSKGCTLXTYVDWWMRGSLKKSIFKNSXLMRLPQSVYALSRTVIKARMECIMDGEHPTIDVVVRLAGITIEMLAKLIAKTRKVRYMH

SEQ ID NO: 4055 - protein, 122 aa, Zea mays
  Clone ID: PAT_MRT4577_101107C.1.pep
TTPRRVRTRRVFGARVRGGADSRWRGSDVENRWLPGGLACATDDHSLHNAFSTYGEALESKIILDRETQRSRGCGLATFFTEEAMRNAIEGMNGKELDGPNMTENEVQSLCGRGGGGGGYGG

SEQ ID NO: 4056 - protein, 202 aa, Zea mays
  Clone ID: PAT_MRT4577_101123C.1.pep
MASIVASRRAVPLVRALEKLIAASSAPGTGSALRPVAVAGGLRGYNTGAPLRRYEGAESEDDSVREYDGRHGGRDYAVPSLFSGNIFRDPLSAPHSIGRLLNLMDDLAVAAPGRAVRRGWNAKEDEEALHLRVDMPGLGKEHVKVWAEQNSPPPRYSGRIELAPEVYRMDKIKAEMKNGVLKVVVPKVKEQQRKDVFQVNVE

SEQ ID NO: 4057 - protein, 219 aa, Zea mays
  unsure (1)..(219): unsure at all Xaa locations
  Clone ID: PAT_MRT4577_101127C.1.pep
MASIVASRRAVPLVRALEKLIAASSAPGTGSALRPVAVAGGLRGYNTGAPLRRYEGAESEDDSVREYDGRHGGRDYAVPSLFSDIFRDPLSAPHSIGRLLNLVDDLAVAAPGRAVRRGWNAKEDEEALHLRVDMPGLGKEHVKVWAEQNSLVIKGEGEKEDSEDEAAPXPPRYSGRIELAPEVYRMDKIKAEMKNGVLKVVVPKVKEQQRKDVFQVNVE

SEQ ID NO: 4058 - protein, 190 aa, Zea mays
  Clone ID: PAT_MRT4577_101162C.1.pep
QQQQLSLSHKTATWLRRRPRRWRWRSPRSPPPPPADDSKALAIVEKVADEPAPEKPAPAKQGGSNDRDLALARVETEKRNSLIKAWEENEKTKAENKAAKKVSAILSWENTKKANIEAELKKIEEQLEKKKAEYAEKMKNKVAMIHKEAEEKRAMVEAKRGEEVLKAEEMAAKYRATGHAPKKLIGCFGA

SEQ ID NO: 4059 - protein, 199 aa, Zea mays
  Clone ID: PAT_MRT4577_101166C.1.pep
MAEEEAKKVEVEVTKEPEAAAKEDVADDKAVIPATDPPPPPPPADDSKALAIVEKVADEPAPEKPAPAKQGGSNDRDLALARVETEKRNSLIKAWEENEKTKAENKAAKKVSAILSWENTKKANIEAELKKIEEQLEKKKAEYAEKMKNKVAMIHKEAEEKRAMVEAKRGEEVLKAEEMAAKYRATGHAPKKLIGCFGA

SEQ ID NO: 4060 - protein, 205 aa, Zea mays
  Clone ID: PAT_MRT4577_101168C.1.pep
MAEEEAKKVEVEVTKEPEAAPASAAEAAAKEDVADDKAVIPATDPPPPPADDSKALAIVEKVADEPAPEKPAPAKQGGSNDRDLALARVETEKRNSLIKAWEENEKTKAENKAAKKVSAILSWENTKKANIEAELKKIEEQLEKKKAEYAEKMKNKVAMIHKEAEEKRAMVEAKRGEEVLKAEEMAAKYRATGHAPKKLIGCFGA

SEQ ID NO: 4061 - protein, 199 aa, Zea mays; identical to SEQ ID NO: 4059
  Clone ID: PAT_MRT4577_101170C.1.pep

SEQ ID NO: 4062 - protein, 189 aa, Zea mays
  Clone ID: PAT_MRT4577_101249C.1.pep
PLLSGVAYAQRVVHADREGFERHQGWIIKTMKHEPSPAQDEYAPVVYSQETVSYIEGLDMMSGEEDRENILRSRASGKAVLTRPFRLMSNHLGVVLTFPVYHADLPSDAKEEDRVAATAGYLGGAFDVESLVENLLRQLAGNQELVVNVYDVTNISNPLVMYGSEVPLGNPSSSHICMLDFGDPFRKHH

SEQ ID NO: 4063 - protein, 104 aa, Zea mays
  Clone ID: PAT_MRT4577_101312C.1.pep
MLAESNSASSYRGGTSREMLRATEEVLATSRVPVGLVNITRLSEYRRDAHTQTYKKQWVEPTAEQRADPRSYADCTHWCLPGVPDTWNELLYWKLFFPSNDQVL

SEQ ID NO: 4064 - protein, 391 aa, Zea mays
  Clone ID: PAT_MRT4577_101314C.1.pep
RSSSSPCWRSSPPPPPGQGEEGGGPPLPFALGAAPAGCDVAQGEWVRDDDARPWYQEWECPYIQPQLTCQAHGRPDKAYQSWRWQPRGCSLPSSFNATLMLEMLRGKRMLFVGDSLNRGQYVSLLCLLHRAIPDGAKSFETVDSLSVFRAKNYDATIEFYWAPMLAESNSDDAVVHSADDRLIRGAPMDRHSSFWKGADVLVFNSYLWWVAGDKIQILRGADNDPSKDIVEMKSEEAYRLVLHQVVRWLERNVDPGKSRVFFVTASPTHTDGRAWGDDDAEGSSNCYNQTSPISAASSYRGGTSREMLRATEEVLATSRVPVGLVNITRLSEYRRDAHTQTYKKQWVEPTAEQRADPRSYADCTHWCLPGVPDTWNELLYWKLFFPSNDQV

SEQ ID NO: 4065 - protein, 393 aa, Zea mays
  Clone ID: PAT_MRT4577_101317C.1.pep
MKVLVLAVLALVAAASAAGQGEEGGGPPLPFALGAAPAGCDVAQGEWVRDDDARPWYQEWECPYIQPQLTCQAHGRPDKAYQSWRWQPRGCSLPSFNATLMLEMLRGKRMLFVGDSLNRGQYVSLLCLLHRAIPDGAKSFETVDSLSVFRAKNYDATIEFYWAPMLAESNSDDAVVHSADDRLIRGAPMDRHSSFWKGADVLVFNSYLWWVAGDKIQILRGADNDPSKDIVEMKSEEAYRLVLHQVVRWLERNVDPGKSRVFFVTASPTHTDGRAWGDDDAEGSGNCYNQTSPISAASSYRGGTSQEMLRATEEVLATSRVPVGLVNITRLSEYRRDAHTQTYKKQWVEPTAEQRADPRSYADCTHWCLPGVPDTWNELLYWKLFFPSNDQVL

SEQ ID NO: 4066 - protein, 165 aa, Zea mays
  unsure (1)..(165): unsure at all Xaa locations
  Clone ID: PAT_MRT4577_10137C.1.pep
LSPAGTSVCENXPILQXPTAIHQCNSXMAVLPLXPLCLQHSXALLQQXPLVHLLGQNIRFFQLQQLVLANLAAYCQXQQILPFNXQLGSLNSASYLRQQQLPFSQLPAAYPQQYIAFNQLAAXLNCTAYLQEHQLLPFMQLAGVSHATLLXQPQMMPFYHHVAPN

SEQ ID NO: 4067 - protein, 66 aa, Zea mays
  Clone ID: PAT_MRT4577_101478C.1.pep
LFYAVQVSIPKRVKVATAAEITEGGGTTYTITSRSLSLQHHEHTPAPTILAMPASNRMHITLMIRA

SEQ ID NO: 4068 - protein, 47 aa, Zea mays
  Clone ID: PAT_MRT4577_101706C.1.pep
FLVHSHLPFIPFELQLTLNISTFSPHKLITCHLLVLHINAESLFLAL

SEQ ID NO: 4069 - protein, 348 aa, Zea mays
  unsure (1)..(348): unsure at all Xaa locations
  Clone ID: PAT_MRT4577_101720C.1.pep
MMPVAAVDDWSERGFSLTCEEDCADLGNGVVDDDEFLPLYNAGEEEEEEYLEQLVFKETSLCSSSDSAADCDGDGEGDEEYPSLASEEWFRQARLAAVKWILETRGCFGFGHRTAYLAIAYFDSFLLRRRVDREAMPWAAQLLSVACVSVAAKMEECQVPALSEFHAGGYDFDSASIRRMELLVLSTLGWRMGAVTPLDFLPCFSSRVXARRRRRRRXVAHKAIGFIFATAEAGSVLDHRPSTVAAAAILAATYGPLLTKEALDSKMSYLSPSCLIEKEHVHACYSMMVGDNNRRGSKRSLPCSGSNEIATSTYHSVLVDDVTDTAAAFATAVSARNKRIRLELTGIS

SEQ ID NO: 4070 - protein, 264 aa, Zea mays
  Clone ID: PAT_MRT4577_101955C.1.pep
LLGHLTPKQKDIIYKLEAHDRFKRNAVGSALYIHPCLSELSEVNAEHRANTFRDDLVDSLVDSITVRDGVKANFFMNILSLANSAGEKVLAFSQYISPMIFFERLLVKKKGWHVGKEIFMISGDTSQEDRELATDHFNNSADAKIMFGSIKACGEGISLVGASRVVILDVHLNPSVTRQAIGRAFRPGQQKKVFVYRLVAADSDEVKVHETAFKKEVIPKLWFEWSEHCTTEDFKLGQIDIDDSGDELLDTKAIRKDIKALYRR

SEQ ID NO: 4071 - protein, 199 aa, Zea mays
  unsure (1)..(199): unsure at all Xaa locations
  Clone ID: PAT_MRT4577_102061C.1.pep
QRRKHNTSTNNGSQKFRLLTLAGLSARAATATIFPHCSXQAAIACLLPPYLSPEVASVCENPILQPYRIQQAITGGMLPLSPLLLQQSSALLHQVPLMHSLAQNIRARQLQHLGLPHLAAYSQQQLFLALNQLAVLNSASYEQQQQLPFTQLTAAYPQYFLPFNQPTALNSPAYLQEQQLLPFRQLAGVSPATFLIQPQ

SEQ ID NO: 4072 - protein, 59 aa, Zea mays
  Clone ID: PAT_MRT4577_102085C.1.pep
AAHRYGIKRVILPERNLKDLSEVPSPILSGMEILLVKHIEDVLDHAFEGGCPLKSRSKL

SEQ ID NO: 4073 - protein, 74 aa, Zea mays
  unsure (1)..(74): unsure at all Xaa locations
  Clone ID: PAT_MRT4577_102318C.1.pep
MSCNCGSSCGCGSSCTCGKKYPDLEATSTGGQATVTLEGGREKKAAPXFVQGAAALREAPHGWSXGGNWKCDPC

SEQ ID NO: 4074 - protein, 79 aa, Zea mays
  unsure (1)..(79): unsure at all Xaa locations
  Clone ID: PAT_MRT4577_102583C.1.pep
MAAKIGRLIMLLGLSASASSSSIFPXCSQAPIASLLSPYLSPAMSSVCENPIFIPYRIQQAILASNFYLLSPLAAITPF

SEQ ID NO: 4075 - protein, 147 aa, Zea mays
  Clone ID: PAT_MRT4577_102590C.1.pep
LRVRGRVGARKGKKARRKKELRPLDVLDDENDGDEDGGGGGSDSTESSAGGSGGGERQREHPFVVTEPGEVARAKKNGLDYLFHLYEQCRVFLLQVQSLAKLGGHKFPTKVTNQVFRYAKKCGASYINKPKMRHYVHCYALHCLDED

SEQ ID NO: 4076 - protein, 57 aa, Zea mays
  Clone ID: PAT_MRT4577_102632C.1.pep
QKKTNLIHKQKGSQIFLHTYMLMVEDAVDHLKLNTYLLRLIQLVATSEVHMLTDDKF

SEQ ID NO: 4077 - protein, 104 aa, Zea mays
  unsure (1)..(104): unsure at all Xaa locations
  Clone ID: PAT_MRT4577_102752C.1.pep
WAPKDPRVLGDPPGDFVPDRFLGEEGSKLFQYVYWSTGRETENPRVDNKQCPGKNFVVLVGRFLLVEFFLRXDTFPPEVGKELLGPRVFFPGVPKATSXGPGSE

SEQ ID NO: 4078 - protein, 367 aa, Zea mays
  Clone ID: PAT_MRT4577_102819C.1.pep
MERELLETFDAAKKAADATAGQGDSPEAGRCLDALHRLRDIRVNTDILVSTQVGKRLRPLTKHPHSGIQAVASDLFGYWKKVVLEETGKKNGSSENEKSMDSSGKVEKVRPMKVEKNSASASMKVEKRDVDDRGQKPDNVKVEKTASNGSRTQSVKVERVSKEVNRTDAKKPASVPNGHPKLTSLVKCNDPTRDKIRELLAEAFVRVSRETSDDDRDEVKNILDEVEACDPYRVAVTVESALFERLGPSTGTHRAKYRSIMFNLRAENNTDFRRRVLIGLVTPERLPDISPDEMASDARKQENMQIKEKALFDCERGAAPKATTDQFKCGRCGQRKTTYYQLQTRSADEPMTTFVTCVNCNNHWKFC

SEQ ID NO: 4079 - protein, 316 aa, Zea mays
  Clone ID: PAT_MRT4577_102820C.1.pep
VGKRLRPLTKHPHSGIQAVAADLFGYWKKVVLEESGKKNGGSENERSSDSSGKVEKVRPVKIEKNSASASMKLEKRDVDVRGQKPNNVKVEKTTSNGSKAQSVKVERVSKEVIRTPDSKRPASVPNGHPKLTSLVKCNDPTRDKIRELLAEAFVSVSRETSDDDRDEVKNILDEVEACDPYRVAVTVESALFERLGPSTGTHRAKYRSIMFNLRAENNTDFRRRVLIGLVAPERLPDIPPDEMASDARKQENMQIKEKALFDCERGAAPKATTDQFKCARCGQRKTTYYQLQTRSADEPMTTFVTCVNCNNHWKFC

SEQ ID NO: 4080 - protein, 66 aa, Zea mays
  Clone ID: PAT_MRT4577_102894C.1.pep
SLESAMKEAKSNGADKADAKLAAKSKVADKPAKGKKGKDGKDPNKPNRAPSAFFEFIDEFHKEFKE

SEQ ID NO: 4081 - protein, 107 aa, Zea mays
  unsure (1)..(107): unsure at all Xaa locations
  Clone ID: PAT_MRT4577_102912C.1.pep
MRRPKVACGPGGEGLGKGGAKRHRKVLRDNIQGITKPAIRRLARRGGVERIXGLIYEETRGVLKIFLENVIRDDCNYTEHARRKTVTGMDVVYPLKRQGRSVYGFGS

SEQ ID NO: 4082 - protein, 73 aa, Zea mays
  Clone ID: PAT_MRT4577_102920C.1.pep
MATTTDLGFEATELRLGLPGGGGGGEPALCGKERSSCCAYGMRGYSETMDLKLKLEPAAAVEAYDDEEDHGVG

SEQ ID NO: 4083 - protein, 340 aa, Zea mays
  Clone ID: PAT_MRT4577_102951C.1.pep
MTSCGCLMLEKVEGDASAKTRVKAAPGAGAGAWCGSCAGDWRGRSEAIFPIYVMGSSRESTVAAARGIVDSPEDPIWVAVKAEAKSEAEKEPILSSFLYASVLSHDCLERALSFVLANRLEDPTLLATQLIDIFNDVMLNNKDICRSIRLDAQAFKDRDPACAQYSWALLYLKGYQSLQSYRIANILWNQGRKVLALALQSRISEVFAVDIHPAAKIGEGILLDHGTGLVIGETAVVGNWVSLMQGVTLGGTGKEHGDRHPKIGQGALIGASATILGNINVGEGAMIAAGSLVLKDVPPHSMAVGNPAKVVGYTEKEDPSLTMKHDARRDYFEHAAIRLR

SEQ ID NO: 4084 - protein, 126 aa, Zea mays
  unsure (1)..(126): unsure at all Xaa locations
  Clone ID: PAT_MRT4577_102973C.1.pep
RKPKNILLHIYLHISLTDFQLCFFTSRRXQMFLPHYIDKKKKRRNSISNPIFFAEPILSSNSFVGTXEYISPDIITRAGHTSSVYCFALGILLYEILYCYTLFIGKTIHKTFTNIFYKDIIFSVSI

SEQ ID NO: 4085 - protein, 409 aa, Zea mays
  Clone ID: PAT_MRT4577_103013C.1.pep
MAVVAGDSESLMQRCKPYVAMISLQFGYAGMNVITKVSLNHGMSHYVLVVYRHAFATLSIAPFALVLERKVRPRMTLWAFLQIFVLALLGPVIDQNFYYAGLKFTSPTFSCAMSNMLPAMTFVLAVLFRMEKVNLKKARCVAKVVGTLVTVAGAMLMTLYKGRVVELVWTKHIHLHGPHPDAAAAAAAADKDWFTGSIFLIIATLAWASLFILQAATLKRYDAPLSLTTLICFVGTLQAIVVTFVMEREPSVWRIGFDMNLLAAAYAGIVTSSIAYYVQGLVIQSRGPVFASAFSPLMMIIVAIMGSFILAENIYLGGIIGSVLIVAGLYSVLWGKHKENEEKEGEAAMEIPVAIKAVDGNGRIMEIVELDEVQLEKAQANTNANANAAVAVTAVPAAEARMQGKDDQA

SEQ ID NO: 4086 - protein, 133 aa, Zea mays
  unsure (1)..(133): unsure at all Xaa locations
  Clone ID: PAT_MRT4577_103148C.1.pep
GRERVXRVQEGGEGXQAQAAPRRXAAPSPPGPSHFTKSPRRKRTXGARAPPQDQEEGSGGGGRRLRGFRLPRAPRKKKGPQGGPGGRRQKKAPLFRLIDPPVSSSLPXCATGGCVKXIERPPFCGGVRMYALV

SEQ ID NO: 4087 - protein, 75 aa, Zea mays
  unsure (1)..(75): unsure at all Xaa locations
  Clone ID: PAT_MRT4577_103156C.1.pep
FAIGSAALVSLALFGSFVIIAGGNIFDVLSPNLFINXIVXALLPYXFSAITMNSVGSSSLNMVDYVHTQFNTIPF

SEQ ID NO: 4088 - protein, 191 aa, Zea mays
  Clone ID: PAT_MRT4577_103177C.1.pep
LDSAQFFHQALYLGGVTAAPARPTLRLMKQNLAFLSSVLTEQAQLPAVLEVMRASVEAFLTVVLAGGSGRAFARGDHAAVAADFASLKRLFCSFGVGEEAVERETVRAEGVLALMAVPTEQLIHELLGHYASTPMRAAGDELPQLPMMPMTPTARRWSRSDANTVLRVLCYRDDEPANRFLKKTFNLPKRR

SEQ ID NO: 4089 - protein, 287 aa, Zea mays
  unsure (1)..(287): unsure at all Xaa locations
  Clone ID: PAT_MRT4577_103195C.1.pep
RSRLMESDLHHFIKANDDLTKEHYQFFLYQLLRALKYIHTANVYHRDLKPKNILANSNCKLKICDFGLARVAFNDTPTTIFWTDYVATRWYRAPELCGSFFSKYTPAIDVWSIGCIFAEVLTGKPLFPGKNVVHQLDLMTDLLGTPSMDTISRVRNEKARRYLSSMRKKELISFSHKFPNADPLALDLLQRLLAFDPKDRPTAEEALSHPYFKGLAKVEREPSCQPITKMEFEFERRRVTXEDIRELIFREILEYHPTLLKDYTNGTERXTFLYPSAVDHFRXQFAH

SEQ ID NO: 4090 - protein, 45 aa, Zea mays
  Clone ID: PAT_MRT4577_103258C.1.pep
GAGFPGPLTPEQVADPKSYADCTHWCLPGLQDTWNELLYSKLFFP

SEQ ID NO: 4091 - protein, 210 aa, Zea mays
  unsure (1)..(210): unsure at all Xaa locations
  Clone ID: PAT_MRT4577_10326C.1.pep
MARERREIRRIESAAARQVTFSKRRRGLFKKAEELAVLCDADVALVVFSATGRLSQFASSSVNDIVDKYSTHSKNLGKSHQQPSIDLNVEQSKYSGLNEQLAEETNGLRQMRGEDLEGLSVEELHRMERKLEAGLHRVISTKDQLFMQQIGELLQKGTQLEDENRASKRTKNILTEDGQSSESVMTALHSGSSLDCDDGSDISXLKLSLP

SEQ ID NO: 4092 - protein, 225 aa, Zea mays
  Clone ID: PAT_MRT4577_10330C.1.pep
MARERREIRRIESAAARQVTFSKRRRGLFKKAEELAVLCDADVALVVFSATGRLSQFASSSVNDIVDKYSTHSKNLGKSHQQPSIDLNVEQSKYSGLNEQLAEETNGLRQMRGEDLEGLSVEELHRMERKLEAGLHRVISTKDQLFMQQIGELLQKGTQLEDENRRLKEQMPQVLTAGTMVVAAAAENILTEDGQSSESVMTALHSGSSLDCDDGSDISLKLSLP

SEQ ID NO: 4093 - protein, 174 aa, Zea mays
  Clone ID: PAT_MRT4577_103363C.1.pep
MAMATSASYPPPPPFYRLYKKFEQDPSSAPEPPPPIDEPFKALGVDYTGDVVIPSLESHNVRQLYPKGPNIDFKKELRTLNRELQLHILELADILVERPSQYARRVEDITLIFKNLHHLLNSLRPHQARATLIHMLESQIRHRKEAIEDIKQRREEAQKMLGESLLILDGSQTN

SEQ ID NO: 4094 - protein, 174 aa, Zea mays
  Clone ID: PAT_MRT4577_103367C.1.pep
MAMATSSSYPPPPPFYRLYKNFEQDPSSAPEPPPPIDGPFKALGVDYTGDVVIPSLESHNVRQLYPKGPNIDFKKELRTLNRELQLHILELADILVERPSQYARRVEDITLIFKNLHHLLNSLRPHQARATLIHMLESQIQRRKEAIEDIKQRRVEAQKLLGESLHILDASQAN

SEQ ID NO: 4095 - protein, 135 aa, Zea mays
  unsure (1)..(135): unsure at all Xaa locations
  Clone ID: PAT_MRT4577_10366C.1.pep
QHLVLESIHAYSQQQQFLPFNQLAALNSAAYLQQQLPFSQLAAAYPQQLLPFSQLTALNYAAYLQQQQLPPFSQLSDVSPXAAFLTQQQLLLFYSRYAPSVGTLLQLQRLLPFSQHALSNTAAFYRQTIIGGALF

SEQ ID NO: 4096 - protein, 153 aa, Zea mays
  Clone ID: PAT_MRT4577_10397C.1.pep
MSLVRRSSVFDPFSVDLFDPFDSMFRSIVPSSSSAAASETAAFASARIDWKETPEAHVFKADLPGVKKEEVKVEVEDGNVLLISGQRSREEEDKGDKWHRVERSSGQFVRRFRLPENAKTEEVRAALENGVLTVTVPKAEVKKPEVKSIQISG

SEQ ID NO: 4097 - protein, 77 aa, Zea mays
  Clone ID: PAT_MRT4577_104004C.1.pep
RWGPPGQVILFPPLVFSLVQRVYLRSSRLVWPLWVFDCKVALCQLLMLCSSPAPADPCVNQHGMWIGGYCYPRQDLF

SEQ ID NO: 4098 - protein, 350 aa, Zea mays
  Clone ID: PAT_MRT4577_10400C.1.pep
MDQSFGNLGAGAGSSSGGSNSKAAAAAVSSSSFLQLPLSTASPAYYGAPLALLHHAAAAPSSSQQQQQHHHHQYARHGAEMSAAEAEAIKAKIVAHPQYSALLAAYLDCQKVGAPPDVLERLTAMAAKLDARPPGRHEPRDPELDQFMEAYCNMLVKYREELTRPIDEAMEFLKRVEAQLDCISGGGGSSSARLSLADGKSEGVGSSEDDMDPNGRENDPPEIDPRAEDKELKYQLLKKYSGYLSSLRQEFSKKKKKGKLPKEARQKLLHWWELHYKWPYPSETEKIALAESTGLDQKQINNWFINQRKRHWKPSEDMPFVMMEGFHPQNAAALYMDGPFMADGMYRLGS

SEQ ID NO: 4099 - protein, 326 aa, Zea mays
  Clone ID: PAT_MRT4577_104121C.1.pep
MADNAKAAAAHARPESSQEEEEDWKEAEGDVAEVDRAATNGAGEGGVPTDRPIRVYADGIYDLFHFGHAKSLEQAKKSFPNTYLLVGCCNDELTHKFKGRTVMTEDERYESLRHCKWVDEVIPDAPWVVTEEFLDKHNIDFVAHDSLPYADASGAGNDVYEHVKKLGKFKETQRTDGISTSDIIMRIVKDYNEYVMRNLARGYTRKDLGVSYVKEKRLRVNMGLKNLRDRVKQHQEKVGEKWSTVAKLQEEWVENADRWVAGFLEKFEEGCHSMGTAIKERIQERLIKAQSSDFGSLLQYDSYDSDEAKENDEDEDEDELFEDVKE

SEQ ID NO: 4100 - protein, 71 aa, Zea mays
  Clone ID: PAT_MRT4577_104216C.1.pep
HGAPPSDPCPCVSHSTSQLKPDACLCSNPSSPSFFDLGFQTQHSKAGKFLGPTSFSAQICSSPIADVTATT

SEQ ID NO: 4101 - protein, 245 aa, Zea mays
  unsure (1)..(245): unsure at all Xaa locations
  Clone ID: PAT_MRT4577_104403C.1.pep
MGRGKVQLKRIENKINRQVTFSKRRSGLLKKAHEISVLCDAEVALIIFSTKGKLYEYSTDSCMDKILDRYERYSYAEKVLISVESETQGNWCHEYRKLKAKVETIQKCXRHLMGEDLETVNLKELQQLEQQLESSLKHIRTRKSQLMLESISELQRKEKSLQEENKVLQKELAEKQKAQRKQVQWGQTQQQTSSSSSCFMIREAAPTTNISIFPVAAGGRLVEGAAAQPQARVGLPPWMLSHLSS

SEQ ID NO: 4102 - protein, 363 aa, Zea mays
  unsure (1)..(363): unsure at all Xaa locations
  Clone ID: PAT_MRT4577_104555C.1.pep
MINHHEIVQFGKLYNRDMESAPAHTPLIHGLPDEVALICLARVPRRYHNILRRVSRRWRALLCSEEWHLCRKRNNLDEPWIYVICREAGIKCYVLAPDPPSRCFRIMHVIEPPCSGRKGVTIEALDKKLFLLGGCSSVYDATDEVYCYDASSNRWSSAAPMPTARCYFVSASLKEKLYITDGYGLTDKSPNSWDIYDPATDSWCTHKNPLLTPDIVKFVALGEELVXFTERRGTGCTXAGVYDPLERTWRGRGNEIALCYSSPTVVVDGTLYMLEQSMGTKLMVWREDAKEWAMLGRLSDKVTRPPCALVAIGRKIHVVGRGLSMVTVDVDTAARVDGFLVTTSVGPLVEEDLTPERCVVITI

SEQ ID NO: 4103 - protein, 76 aa, Zea mays
  unsure (1)..(76): unsure at all Xaa locations
  Clone ID: PAT_MRT4577_104608C.1.pep
MVGTAEGGADRAVRRWVDAVGKRLVLDCRLATELXINCADLNDTVWSAKCLISSSDLIRKVHMDYLETGANIIITA

SEQ ID NO: 4104 - protein, 74 aa, Zea mays
  unsure (1)..(74): unsure at all Xaa locations
  Clone ID: PAT_MRT4577_10482C.1.pep
MAGRIFCKLMLLGLSASVATATIFPQCSQAPIASLLPPYLSPAVSAMCETPIVQPYKIHXAIATSILPLSPLNL

SEQ ID NO: 4105 - protein, 48 aa, Zea mays
  Clone ID: PAT_MRT4577_10491C.1.pep
TKRPPHPDLPTSLIEVLRIPPLQLTASAHPLKAHAACLKLFNTTLYRV

SEQ ID NO: 4106 - protein, 69 aa, Zea mays
  Clone ID: PAT_MRT4577_104966C.1.pep
MESTFIMIKPDGVQRGLIGVIISRFEKKGCYLKALKLDHAQRSVAEKHYADLACKPFFQGLADYMISVP

SEQ ID NO: 4107 - protein, 76 aa, Zea mays
  unsure (1)..(76): unsure at all Xaa locations
  Clone ID: PAT_MRT4577_105105C.1.pep
SSQATISTIITSYLSPSMSSLXKNPILQPYNIQHAITSRILPLSPFFLQQSSPLLHQLHLMHLFSQNIRAQQLQQL

SEQ ID NO: 4108 - protein, 48 aa, Zea mays
  Clone ID: PAT_MRT4577_105235C.1.pep
SCVHPRLQQTHASTSMDCGSRGAVTTVRLYSKLNPNEKNCASWCCKSK

SEQ ID NO: 4109 - protein, 57 aa, Zea mays
  unsure (1)..(57): unsure at all Xaa locations
  Clone ID: PAT_MRT4577_105517C.1.pep
GSPVFDLGGEQIEMAAHDVEYRYYVGRLIWATDDHXIHNAFSTYCEVLXSKIIRVWE

SEQ ID NO: 4110 - protein, 137 aa, Zea mays
  Clone ID: PAT_MRT4577_105598C.1.pep
MAGKGGKGLLAAKTTAAKSAEKDKGKKAPISRSSRAGLQFPVGRIHRQLKQRTQANGRVGATAAVYSAAILEYLTAEVLELAGNASKDLKVKRITPRHLQLAIRGDEELDTLIKGTIAGGGVIPHIHKSLINKSSKE

SEQ ID NO: 4111 - protein, 137 aa, Zea mays; identical to SEQ ID NO: 4110
  Clone ID: PAT_MRT4577_105599C.1.pep

SEQ ID NO: 4112 - protein, 162 aa, Zea mays
  Clone ID: PAT_MRT4577_105638C.1.pep
MASPSSSPSRKALSKIACSRLQKELAEWQVNPPAGFKHRVTDDLQRWVIDVAGAAGTLYTGETYKLQVDFPEHYPMEAPQVIFLHPAPMHPHIYSNGHICLDILYDSWSPAMTVSSICISILSMLSSSPEKQRPADNDRYVKNCRNGRSPKETRWWFHDDTV

SEQ ID NO: 4113 - protein, 252 aa, Zea mays
  unsure (1)..(252): unsure at all Xaa locations
  Clone ID: PAT_MRT4577_105744C.1.pep
LEAGRDRASIIRDXLIADSINDRKRKERLDSVSEETTTIVXRLYHMYESGVLLFPAINVYDSPTDSKIDNLYGCRHSLPDGLMRATDAXIAVKVTVVCGYIDVDNDCAAVLKQDVVRAIVDEIDPICGLQDLMEGLQNLLLXMLALKTDIFXVTTNGNKDIIMPDHMKKIKNNAVVCNIGHFDNENDMLLLEYYPEDXRINIKPHTDRCVFPDNNTAIIVLDXGRLMNLGCATDHPNSDMLWSFTNHVIAQL

SEQ ID NO: 4114 - protein, 109 aa, Zea mays
  unsure (1)..(109): unsure at all Xaa locations
  Clone ID: PAT_MRT4577_105790C.1.pep
HICVPTLAAIILSLLMLLGLSASAATATIFPXCSQAPICFLFPPFLSPAVSSVCVNPILLPFKIQHAFTAGILPLSPLFLQHSSALLHQFPLVHLLAHYIMAQHLLQLV

SEQ ID NO: 4115 - protein, 415 aa, Zea mays
  Clone ID: PAT_MRT4577_105922C.1.pep
MGQMISGDKSDEQTARDDGIIKNGREILFQAFNWESNKHNWWSILEEKVTDLAESGFTSVWLPPPTQSLSREGYLPQNLYCLDSCYGSLHELKLLLHKMSEHNVRAMADVVINHRIGTTQGSNGMYNRYDGIPVSWDEHAVTSCSGGKGNKSTGDNFDGVPNIDHTQPFVRKDIIEWLIWLRKSVGFQDFRFDFTKGYAAKFVKEYIEESKPLFAVGEYWDSCEYSPPDYRLNYNQDIHRQRIINWIDNTGGLCAAFDFTTKGILQEAVKGELWRLRDSEGKPPGVMGWWPSRSVTFIENHDTGSTQGHWPFPSDHIMEGYAYILTHPGIPTVFYDHFYDQGVPLHDEIAKLMQIRKCQDIHSRSSIKILEVGSDLYSAIIDDKLCMKIGDGSWCPSDPEWRLAVSGDRYAVWHK

SEQ ID NO: 4116 - protein, 261 aa, Zea mays
  Clone ID: PAT_MRT4577_106002C.1.pep
MASAELSREENVYMAKLAEQAERYEEMVEFMEKVAKTVDSEELTVEERNLLSVAYKNVIGARRASWRIISSIEQKEEGRGNEDRVTLIKDYRGKIETELTKICDGILKLLETHLVPSSTAPESKVFYLKMKGDYYRYLAEFKTGAERKDAAENTMVAYKAAQDIALAELAPTHPIRLGLALNFSVFYYEILNSPDRACSLAKQAFDEAISELDTLSEESYKDSTLIMQLLRDNLTLWTSDISEDPAEEIREAPKRDSSEGQ

SEQ ID NO: 4117 - protein, 261 aa, Zea mays; identical to SEQ ID NO: 4116
  Clone ID: PAT_MRT4577_106003C.1.pep

SEQ ID NO: 4118 - protein, 102 aa, Zea mays
  unsure (1)..(102): unsure at all Xaa locations
  Clone ID: PAT_MRT4577_106005C.1.pep
PELSREENVYMANLAEQADRYEEIVEFMEKVPKTVDSDELTVEERNLLSVAYNNVIGPRRAXWRIICSIEHNEEGRGNEDRLTLIKDYRGKIETELTKICDG

SEQ ID NO: 4119 - protein, 278 aa, Zea mays
  Clone ID: PAT_MRT4577_106010C.1.pep
MYICRSGVLQILKLNCKMASAELSREENVYMAKLAEQAERYEEMVEFMEKVAKTVDSEELTVEERNLLSVAYKNVIGARRASWRIISSIEQKEEGRGNEDRVTLIKDYRGKIETELTKICDGILKLLESHLVPSSTAPESKVFYLKMKGDYYRYLAEFKTGAERKDAAENTMVAYKAAQDIALAELAPTHPIRLGLALNFSVFYYEILNSPDRACSLAKQAFDEAISELDTLSEESYKDSTLIMQLLRDNLTLWTSDISEDPAEEIREAPKRDSSEGQ

SEQ ID NO: 4120 - protein, 78 aa, Zea mays
  Clone ID: PAT_MRT4577_106098C.1.pep
SVLGYKVDTVDTTGAGDTLVGCLLFNVGTDDCMLHNEEKLREAIKFCNACGAICTTKKGAIPVLSTVDTAQDLIAKAN

SEQ ID NO: 4121 - protein, 406 aa, Zea mays
  Clone ID: PAT_MRT4577_106131C.1.pep
MSSAGGMDGSPPVAEFQPTVTHGGRFLRYNIFGNLFEITRKYQPPVMPIGRGAYGIVCSVMNFETREMVAIKKIANAFDNHMDAKRTLREIKLMRHLDHENIIGIRDVIPPPIPRAFNDVYIGMEFMETDLHQIIRSGQELSEEHCQYFLYQILRGLKYIHSAGVIHRDLKPSNLLLSANCDLKICDFGLARPSSDSDMMTEYVVTRWYRAPELLLNSTDYSAAIDVWSVGCIFMELINRQPLFPGRDHMHQMRLITEARVTHATHPTSPSYNSIPSSSSAHNIAARQVIGTPTDDELGFIRNEDARKYMRHLPQFPRRPFVSLFPRMQPVALDLIERMLTFNPLQRITVEEALEHPYLERLHDVADEPICTDPFSFDFEQQALTEDQMKQLIFNEAIELNPNFRY

SEQ ID NO: 4122 - protein, 390 aa, Zea mays
  Clone ID: PAT_MRT4577_10627C.1.pep
MEIDSLREGFDRVAEKRSLSSAKALEVVDQIVNEIEQAIVKLQMMNTDSTGNVDHPSILAELKAKLNEMAPLNQLEGSQKELNVALSKYLKLLEKSFNPDISKAYRNVDFEVHTVNNIIANHFYRQGLFDLGDMFVHECGELGGASLKLPFQEMYAILEAMKARNLEPALSWAAKNHDQLLQNGSMLEFKLYQLQFVEILSKGSRGEAKDEALLYARTHLVPFAAVHKEEFQKLMACLLWVGRLDQSPYSELMSSAHWEKLAEELTHQFCSLLGQSRESPLSVAVSAGFQGLPTLLKLTQVMAAKKQEWQVMKQLPVPIDIGPEFQYHSVFVCPVLREQSSDENPPMRMPCGHVVSKQSIMKLSKSSSRAFKCPYCPSEAMASHCKQLHF

SEQ ID NO: 4123 - protein, 242 aa, Zea mays
  Clone ID: PAT_MRT4577_106286C.1.pep
MGQGGEVKAAPAVRVLVVDDSPVDRKVVELLLRNHNHQGGAAPFHVTAVDSGKKAMEHLRLMEQGGQLDSCAADANRITIDIVLTDYCMPEMTGYDLLKAIKALSSPNPIPVVVMSSENEPQRISRCLTAGAEDFILKPLKTKDVQRLRNCSSAARPTDGAAHQCESLRSSSRKLRSDQVAAPAHRSQPTTGLTMVLHASSIELSHYFQFLLKFVLLAYAVLCLTELLHRWSNGSVLSLWSA

SEQ ID NO: 4124 - protein, 222 aa, Zea mays
  Clone ID: PAT_MRT4577_106290C.1.pep
RKNEIKFPQHELIKARVSFLSSFGSVTAVDSGKKAMEHLRLMEQGGQLDSCAADANRITIDIVLTDYCMPEMTGYDLLKAIKALSSPNPIPVVVMSSENEPQRISRCLTAGAEDFILKPLKTKDVQRLRNCSSAARPRDDAAHQCESLRRSSRKLRSDQVAAPGHRSQPTTGLTMVLHASSIELSHYFQFLLKFVLLAYAVLCLTELLHRWSNGSVLSLWSA

SEQ ID NO: 4125 - protein, 390 aa, Zea mays; identical to SEQ ID NO: 4122
  Clone ID: PAT_MRT4577_10629C.1.pep

SEQ ID NO: 4126 - protein, 145 aa, Zea mays
  Clone ID: PAT_MRT4577_106327C.1.pep
MGISSMPAPEDSLLGFVLYNTAASVAILAGLVRAALLFLGLAAAEDEEPRQQAEAVTVTAVGPSLADRFRSRFRPSRYGRRRGGDCRVCLVRFETESVVQRLPCGHLFHRACLETWIDYDHATCPLCRHRLLPPAAAADEVPRIA

SEQ ID NO: 4127 - protein, 252 aa, Zea mays
  unsure (1)..(252): unsure at all Xaa locations
  Clone ID: PAT_MRT4577_106424C.1.pep
MAFFRGLAAVSRLRSRMGQDATTLGGVRWLQMQSASDLDLRSQLQEMIPEQQDRLKKLKSEHGKVQLGNITVDMVLGGMRGMTGMLWETSLLDPEEGIRFRGLSIPECQKVLPAAVKDGEPLPEGLLWLLLTGKVPTKEQVDALSKELLSRSTVPGYVYKAIDALPVTAHPMTQFTTGVMALQVESEFXKAYDKGMPKTKFWEPTYEDCLXLIARLXTSGFYGYRRISRMGSYAADXTLDYAANFXHMLWFD

SEQ ID NO: 4128 - protein, 120 aa, Zea mays
  Clone ID: PAT_MRT4577_106455C.1.pep
MNLHSDQGSNSLGCSDLGWENDTKTPDITSIAPIPTIAEGDESVFVNSNSNSSMVPPVLENNAVDLTDGLTDLESYMRFLMDGGASDSIDSLLNLDGSQDLGSNMDLWTFDDMPIAGDFF

SEQ ID NO: 4129 - protein, 361 aa, Zea mays
  Clone ID: PAT_MRT4577_106460C.1.pep
MCGGAILAELREPAPRRLTERDIWQQKKKPKRGGAGGRRSFAAEDDEDFEADFEDFEADSGDSDLELGEGADDDVIEIKPFAAKSTFSRDGLSTMTTAGYDAPAARLAKRKRKNQYRGIRQRPWGKWAAEIRDPQKGVRVWLGTFNSPEEAARAYDAEARRIRGKKAKVNFPDAPAVGQKCRSSSASAKALKSCVEQKPIVKTDMNILANTNAPFYQSVNYASNNPFVPAMNSTVSFEDPIMNLHSDQGSNSLGCSDLGWENDTKTPDITSIAPIPTIAEGDESVFVNSNSNSSMVPPVLENNAVDLTDGLTDLESYMRFLMDGGASDSIDSLLNLDGSQDLGSNMDLWTFDDMPIAGDFF

SEQ ID NO: 4130 - protein, 98 aa, Zea mays
  unsure (1)..(98): unsure at all Xaa locations
  Clone ID: PAT_MRT4577_106556C.1.pep
AVTIXGGRGQAGTWGKQLGAEVYDCNNMVEQELPGGGLLIYQSFCAAEDAVATSPKSVLHCFEGVNMENAPPVKDRKLANLLCWEEVDAMEKDGVLDE

SEQ ID NO: 4131 - protein, 56 aa, Zea mays
  Clone ID: PAT_MRT4577_106579C.1.pep
VKRHYSFFRSIYTHGPCHDGGNHCTYTFISALESLLTHRWGQYVFLANKQLGKTSF

SEQ ID NO: 4132 - protein, 184 aa, Zea mays
  Clone ID: PAT_MRT4577_106585C.1.pep
MAMATQGQADQQQQHGRSEPTTSVAANRWGPYSGAGDFASNMAVILAALLAALALGLALNAAVRYLLRRSRRAGSVGGQGNGSGVLMPSDDPAEKPSVEVELQAPPPALLVYSAAGTTLAGAAAECAICLAEFADGDAVRVMPACGHGFHARCIERWLAEGRRSSCPTCRAPAVQRSLHASELL

SEQ ID NO: 4133 - protein, 197 aa, Zea mays
  Clone ID: PAT_MRT4577_106587C.1.pep
MAMATQGQADQQQQHGRSEPTTSVAANRWGPYSGAGDFASNMAVILAALLAALALGLALNAAVRYLLRRSRRAGSVGGQGNGSGVLMPSDDPAEKPSVEVELQAPPPALLVYSAAGTTLAGAAAECAIWTKLAGAAAECAICLAEFADGDAVRVMPVCGHGFHARCIERWLAEGRRSSCPTCRAPAGRRSLHASELL

SEQ ID NO: 4134 - protein, 58 aa, Zea mays
  Clone ID: PAT_MRT4577_106632C.1.pep
LRSGSAVSPRTGSSVRGGTAAATGKKRNATAVLASPPYSPPSSSAPLEDLVSTRRTCL

SEQ ID NO: 4135 - protein, 208 aa, Zea mays
  Clone ID: PAT_MRT4577_106650C.1.pep
MSTVTSCTFLSLGSPVRPAVSSARPAAAAVASRRRPRSLSVCCEAGRKGDHNPKTDLHPFNIPAFVLVHPVAPREERWQLEEDADKVNLWFEVPGQSKDDLTVEIDEDVLVIKKRKELVGQRSPAGGGVAEYGSQSQQQSRRGTADGKELPAAQQGQAGEVVYARMLLPAGYSRDGVQAELKSGVLRVTVVKVTERARRKIDVPIQVK

SEQ ID NO: 4136 - protein, 591 aa, Zea mays
  Clone ID: PAT_MRT4577_106832C.1.pep
MGGEAEGGERRLGRVLSFGIPDTALGLVMGYVEDPWDRDAISLVCRHWCRVDALSRKHVTVAMAYSTTPERLFGRFPCLESLKLKAKPRAAMFNLISDDWGGSASPWIRQLSATFHSLKKLHLRRMIVSNDDINTLVRAKAHMLVSLKLDRCSGFSTPSIALIARSCRKLETLFLEESMIDEKENDEWIRELATSNSVLETLNFFQTDLRASPEYLTLLVRNCQRLKTLKISECFMPDLVSLFRTAQTLQEFAGGSFEDQGQPVAGRNYENYYFPPLLHRLSLLYMGTNEMQILFPYAAALKKLDLQFTFLSTEDHCQIVQRCPNLETLEVRDVIGDRGLQVVAETCKKLQRLRVERGDDDQGGLEDEQGRISQVGMMAIAQGCPELTYWAIYVSDITNAALEAVGTCSRNLNDFRLVLLDREAHITELPLDNGVRALLRGCTKLRRFAFYVRPGALSDVGLGYVGEFSKSIRYMLLGNVGESDNGIIQLSKGCPSLQKLELRGCLFSEHALAMAALELKSLRYLWVQGFRSSPTGTDLMAMVRPFWNIEYILPDQDEPCPEYKKQILAYYSLAGRRTDCPPSVTPLYPAV

SEQ ID NO: 4137 - protein, 638 aa, Zea mays
  unsure (1)..(638): unsure at all Xaa locations
  Clone ID: PAT_MRT4577_106833C.1.pep
ISQPSLSPSSSSPPHHHTPSPPRTNPKEGEEGNRSAGGNXSRLGXGTMGGEAEGGERRLGRVLSFGIPDTALGLVMGYVEDPWDRDAISLVCRHWCRVDALSRKHVTVAMAYSTTPERLFRRFPCLESLKLKAKPRASMFNLISDDWGGSASPWIRQLSATFHFLKKLHLRRMIVSNEDINILVRAKAHMLVALKLDRCSGFSTPSIALVARSCRKLETLFLEESTIDEKENDEWIRELATSNSVLETLNFFLTDLRASPEYLTLLVRNCQRLKTLKISECFMPDLVSLFRTAQTLQEFAGGSFEEQGQPVASRNYENYYFPPSLHHLSLLYMGTNDMQILFPYATALKKLDLQFTFLSTEDHCQIVQRCSNLETLEVRDVIGDRGLQVVAQTCKKLHRLRVERGDDDQGGLEDEQGRISQVGLMAIAQGCPELTYWAIHVSDITNAALEAVGTCSKNLNDFRLVLLDREAHITELPLDNGVRALLRGCTKLRRFAFYVRPGALSDVGLGYVGEFSKSIRYMLLGNVGESDNGIIQLSKGCPSLQKLEVRGCLFSEHALALAALQLKSLRYLWVQGFRSSPTGTDIMAMVRPFWNIEYIVPDQDEPCPEHKRQILAYYSLAGRRTDCPPSVTLLYPAF

SEQ ID NO: 4138 - protein, 96 aa, Zea mays
  Clone ID: PAT_MRT4577_106856C.1.pep
RNLPGRLLFSSVRSPTRLPHRSSPTSALPPHALATSPSPPRCSHPRLYKCRRSSWRKLRRALAAAAGAREREPRGGGAVARQGQDRFCHRNIIGHE

SEQ ID NO: 4139 - protein, 139 aa, Zea mays
  unsure (1)..(139): unsure at all Xaa locations
  Clone ID: PAT_MRT4577_107184C.1.pep
MAGKGGKGLLAAKTTRRPSRRSKDTGXKKAPISRSSRAGLQFPVGRIHRQLKQRTQANGRVGATAAVYSAAILEYLTAEVLELAGNASKDLKVKRITPRHLQLAIRGDEELDTLIKGTIAGGGVIPHIHKSLINKSSKE

SEQ ID NO: 4140 - protein, 137 aa, Zea mays; identical to SEQ ID NO: 4110
  Clone ID: PAT_MRT4577_107185C.1.pep

SEQ ID NO: 4141 - protein, 137 aa, Zea mays; identical to SEQ ID NO: 4110
  Clone ID: PAT_MRT4577_107186C.1.pep

SEQ ID NO: 4142 - protein, 67 aa, Zea mays
  Clone ID: PAT_MRT4577_107313C.1.pep
ATPGRRAHTEAGRCGGAGAGAGAYMGVVEPGGCTAEAVVNGSTLGVGSSSRPSCSFGRRRPRQTLTS

SEQ ID NO: 4143 - protein, 66 aa, Zea mays
  unsure (1)..(66): unsure at all Xaa locations
  Clone ID: PAT_MRT4577_107364C.1.pep
MAIKRTKAEKNIAYDNKLCSLLDGSTKWLIARAXHVGSKQLQDIRRGLRGDSVVLMGKNTLIQRCI

SEQ ID NO: 4144 - protein, 94 aa, Zea mays
  Clone ID: PAT_MRT4577_107366C.1.pep
RNLAEEEPEKYQSHFSKYIKKGIEADDMEALYKKVHAAIRADPSVVKSTKQPPKEHKRYNPKKLTYEQRKASLIERLNQLNSSGGADDDDEDDE

SEQ ID NO: 4145 - protein, 80 aa, Zea mays
  Clone ID: PAT_MRT4577_107370C.1.pep
FSEYIKKGIEADDMEALYKKVHAAIRADPSVVKSTKQPPKEHKRYNPKKLTYEQRKASLIERLNQLNSSGGANDDDEDDE

SEQ ID NO: 4146 - protein, 128 aa, Zea mays
  unsure (1)..(128): unsure at all Xaa locations
  Clone ID: PAT_MRT4577_107373C.1.pep
FAGFKKDDKQLDADIHRKYIYGGHVADYMRNLAEEEPEKYQSHFSEYIKKGIEAIXMEALYKKVHAAIRADPSVVKSTKQPPKEHKRXNPKKLXIEQRKASLIXRLTNSLLGGADDDDEDTSKVCPIK

SEQ ID NO: 4147 - protein, 71 aa, Zea mays
  unsure (1)..(71): unsure at all Xaa locations
  Clone ID: PAT_MRT4577_107426C.1.pep
MASPTQGQVITSKAAVAYDNNKPLVIEDVQVAPPQXGEVRVKILFTALCHTDHLSWSGKDPEGLFPCILGH

SEQ ID NO: 4148 - protein, 77 aa, Zea mays
  Clone ID: PAT_MRT4577_107482C.1.pep
LNYQAYSQQHQLPPFSRVAGVSPGALFTQPQLLSFYHRPAPNAGTLLQVRLLLPFNRLAFTNPAAFRQRPIIGGALF

SEQ ID NO: 4149 - protein, 94 aa, Zea mays
  Clone ID: PAT_MRT4577_107781C.1.pep
CNCGSSCGCGSSCKCGKKYLYLEKTSTPAQAAVVLGVAPDKKPAPEFVEPAAKSVESAHAYGSGNSCKFDPCNCCSHRSTTMDMIIIYLACGGG

SEQ ID NO: 4150 - protein, 77 aa, Zea mays
  unsure (1)..(77): unsure at all Xaa locations
  Clone ID: PAT_MRT4577_107783C.1.pep
MSCNCGSSCGCGSSCKCDKKYPDLEEKSTXXAQATVVLGVAPKKKPAPKFVKPAAKSGEPAHGCSCGGNCKCDPCNC

SEQ ID NO: 4151 - protein, 181 aa, Zea mays
  Clone ID: PAT_MRT4577_107935C.1.pep
MAGATTPASGALVRLCLPSLLLFLYRCCRCEAVEMERTLAMIKPDGLSGKYTEAIKEVILDSGFHIVKETEVQLDAERASVFYAEHSQRSFFDSLVKYITSGPVLAMVLERPDAVAQWRTLIGPTDAKKAKTSHPNSIRAMCGLDSEKNCVHGSDSPESADREISFFFGEAESVTVEHDEL

SEQ ID NO: 4152 - protein, 187 aa, Zea mays
  Clone ID: PAT_MRT4577_107936C.1.pep
MAGATTPASGALVRLCLPSLLLFLYRCCRCEAVEMERTLAMIKPDGLSGKYTEAIKEVILDSGFHIVKETEVQLDAERASVFYAEHSQRSFFDSLVKYITSGPVLAMVLERPDAVAQWRTLIGPTDAKKAKTSHPNSTLCHFSIRAMCGLDSEKNCVHGSDSPESADRGISFFFGEAESVTVEHDEL

SEQ ID NO: 4153 - protein, 64 aa, Zea mays
  unsure (1)..(64): unsure at all Xaa locations
  Clone ID: PAT_MRT4577_107976C.1.pep
MAAADVXYRCYVGWLAWATSNESLENAFSSYCEILDSKVITDRETGRSRGFSFLTFSSENFILY

SEQ ID NO: 4154 - protein, 81 aa, Zea mays
  Clone ID: PAT_MRT4577_108267C.1.pep
QTDELANGMEKVAVSEPEKHGHNEEEHEVVGEEKEGLLAKLHRTSSRSRSSGDEEEEAVGGDSEVIGRKKKEMGLEERLEE

SEQ ID NO: 4155 - protein, 123 aa, Zea mays
  unsure (1)..(123): unsure at all Xaa locations
  Clone ID: PAT_MRT4577_108332C.1.pep
LADWSVNSPEGLHLSQEDLIXKFATGVFMGSFLSLAISYPTLASLPHMFINGYNNVLAFAVETNYSYPHADKIKEYLKDPNKFAVPAXAAGDSGASTASKEEEKASEPEKESDEEMGFNLFDD

SEQ ID NO: 4156 - protein, 74 aa, Zea mays
  unsure (1)..(74): unsure at all Xaa locations
  Clone ID: PAT_MRT4577_108376C.1.pep
MRLRVLSAQPFLAFLSEVQSADRKIPFREKVIYTXISLLILLVCTQLPLYRIHSTTGADPFYWMRXILAXNRGT

SEQ ID NO: 4157 - protein, 76 aa, Zea mays
  unsure (1)..(76): unsure at all Xaa locations
  Clone ID: PAT_MRT4577_108660C.1.pep
HSSDIGHFDNEIVLLVLETYPGVKRITIKSETVRXVFSETNTGIIVLDEGSLIYLGCAFAHPNLSCSWSFTNQIIV

SEQ ID NO: 4158 - protein, 124 aa, Zea mays
  unsure (1)..(124): unsure at all Xaa locations
  Clone ID: PAT_MRT4577_108691C.1.pep
MAAKILCLLMLLGLSASAATATILPQCSQAPIAYLLTTYIXSAVYYDCENPIIQPYRIQQAISAGILAISRICLQQLSALLHQVPTAHLLAHNITAHQLQQLVLAKLAVYYHQQQNLAFYQLTA

SEQ ID NO: 4159 - protein, 244 aa, Zea mays
  unsure (1)..(244): unsure at all Xaa locations
  Clone ID: PAT_MRT4577_108742C.1.pep
MAPLGDAVAPAAAAAAPGLVVSFGEMLIDFVPDVAGVSLAESGGFVKAPGGAPANVACAISKLGGSSAFIGKFGDDEFGHMLVEILKQNGVNAEGCLFDQHARTALAFVTLKSNGEREFMFYRNPSADMLLTEAELNLDLIRRARIFHYGSISLITEPCRSAHVAAMRAAKSAGILCSYDPNVRLPLWPSAQAARDGIMSIWKEADFIKVSDDEVAFLTQGDATDEKXVLSLWFEGLKLLIVTD

SEQ ID NO: 4160 - protein, 288 aa, Zea mays
  Clone ID: PAT_MRT4577_108770C.1.pep
MAKDIEASGPEAGEFSAKDYTDPPPAPLVDADELTKWSLYRAVIAEFIATLLFLYITVATVIGYKHQTDAAASGPDAACGGVGILGIAWAFGGMIFILVYCTAGISGGHINPAVTFGLFLARKVSLVRALLYIIAQCLGAICGVGLVKGFQSAYYVRYGGGANELSDGYSKGTGLAPEIIGTFVLVYTVFSATDPKRSARDSHVPVLAPLPIGFAVFMVHLATIPITGTGINPARSLGAAVIYNKDKAWDDQWIFWVGPLIGAAIAAAYHQYVLRASATKLGSYRSNA

SEQ ID NO: 4161 - protein, 146 aa, Zea mays
  Clone ID: PAT_MRT4577_108771C.1.pep
PELSRSLVYRAVIAKFIATLLFLYITVATVIGYKHQTDASASGPDAACGGVGILGIAWAFGGMIFILVYCTAGISCGHINPAVTFGLFLARKVSLVRALLYIVAQCLGAICGVGLVKGFQSAYYVRYGGGANELSDGYSKGTGLAA

SEQ ID NO: 4162 - protein, 289 aa, Zea mays
  Clone ID: PAT_MRT4577_108772C.1.pep
MAKQDIEASGPEAGEFSAKDYTDPPPAPLIDADELTKWSLYRAVIAEFIATLLFLYITVATVIGYKHQTDAAASGPDAACGGVGILGIAWAFGGMIFILVYCTAGISGGHINPAVTFGLFLARKVSLVRALLYIIAQCLGAICGVGLVKGFQSAYYVRYGGGANELSDGYSKGTGLAAEIIGTFVLVYTVFSATDPKRSARDSHVPVLAPLPIGFAVFMVHLATIPITGTGINPARSLGAAVIYNKDKAWDDQWIFWVGPLIGAAIAAAYHQYVLRASATKLGSYRSNA

SEQ ID NO: 4163 - protein, 293 aa, Zea mays
  unsure (1)..(293): unsure at all Xaa locations
  Clone ID: PAT_MRT4577_108774C.1.pep
MAKQDIEASGPEAGEFSAKDYTDPPPAPLVDADELTKWSLYRAVIAEFIATLLFLYITVATVIGYKHQTDAAASGPDAACGGVGILGIAWAFGGMIFILVYCTAGISGGHINPAVTFGLFLARKVSLVRALLYIIAQCLGAICGVGLVKGFQSAYYVRYGGGANELSDGYSKGTGLAAEIIGTFVLVYTVFSATDPKRSARDSXHVPVLAPPSIFGFXAVFMVHLXATIPITGTGINPARSLGAAVIYNKDKAWDDQWIFWVGPLIGAAIAAAYHQYVLRASATKLGSYRSNA

SEQ ID NO: 4164 - protein, 71 aa, Zea mays
  Clone ID: PAT_MRT4577_108925C.1.pep
VCTVAINVWWCLLQSYSGDFCCVSAKSRKEPFFFILWRLSRVVVCTPRNLVCVCWFSWNRKSVWCRPRLPG

SEQ ID NO: 4165 - protein, 198 aa, Zea mays
  Clone ID: PAT_MRT4577_10894C.1.pep
MSALYLQVSIVSQALIFVTRSRSWSFVERPGLLLVTAFLLAQLVATFLAVYANWGFARIKGIGWGWAGVVWLYSIVFYFPLDLIKFFIRFVLSGRAWDNLLENKTAFTTKKDYGREEREAQWATAQRTLHGLQPPEAATNTLFNDKSSYRELSEIAEQAKRRAEIARLRELNTLKGHVESVVKLKGLDIDTIQQNYTV

SEQ ID NO: 4166 - protein, 134 aa, Zea mays
  Clone ID: PAT_MRT4577_108964C.1.pep
ITLEKPRWLIAAANIFVVVHVIGSYQIYAMPVFDMLETFLVKKLRFKPGMPLRLIARSLYVVLTALVGIAVPFFGGLLGFFGGFAFAPTTYYLPCILWLKIKKPKKFSLSWFINWFCIIVGVLLTVLAPIGGLR

SEQ ID NO: 4167 - protein, 591 aa, Zea mays
  Clone ID: PAT_MRT4577_10896C.1.pep
LAARASRTENQDAIDAAMVGMLADPKEARAGIREIHFLPFNPVDKRTALTYIDADGHWHRVSKGAPEQILDLCHCKEDLRRKVHGIIDKYAERGLRSLAVARQEVPERNKESPGGPWQFVGLLPLFDPPRHDSAETIRKALVLGVNVKMITGDQLAIGKETGRRLGMGTNMYPSSALLGQNKDATLEALPVDELIEKADGFAGVFPEHKYEIVKRLQEKKHIVGMTGDGVNDAPALKKADIGIAVADATDAARSASDIVLTEPGLSVIISAVLTSRCIFQRMKNYTIYAVSITIRIVLGFMLIALIWQYDFSPFMVLIIAILNDGTIMTISKDRVKPSPLPDSWKLKEIFATGIVLGSYLALMTVIFFWAMHKTDFFSDKFGVRSIRDSEHEMMSALYLQVSIVSQALIFVTRSRSWSFVERPGLLLVTAFLLAQLVATFLAVYANWGFARIKGIGWGWAGVVWLYSIVFYFPLDLIKFFIRFVLSGRAWDNLLENKTAFTTKKDYGREEREAQWATAQRTLHGLQPPEAATSTLFHDKNSYRELSEIAEQAKRRAEIARLRELNTLKGHVESVVKLKGLDIDTIQQNYTV

SEQ ID NO: 4168 - protein, 951 aa, Zea mays
  Clone ID: PAT_MRT4577_10899C.1.pep
MGGLEEIKNEAVDLENIPIEEVFEQLKCTREGLSSSEGQQRLEIFGPNRLEEKKESKILKFLGFMWNPLSWVMEMAAVMAIALANGGGKPPDWEDFVGIIVLLVINSTISFIEENNAGNAAAALMANLAPKTKVLRDGRWGEQEAAILVPGDIVSIKLGDIVPADARLLEGDPLKVDQSALTGESLPVTKGPGDEVFSGSTCKQGEIEAVVIATGVHTFFGKAAHLVDSTNQVGHFQQVLTAIGNFCICSIAVGIVVEIIVMFPIQHRRYRSGIENLLVLLIGGIPIAMPTVLSVTMAIGSHKLSQQGAITKRMTAIEEMAGMDVLCSDKTGTLTLNKLSVDKNLVEVFCKGVDKDHVLLLAARASRTENQDAIDAAMVGMLADPKEARAGIREIHFLPFNPVDKRTALTYIDADGHWHRVSKGAPEQILDLCHCKEDLRRKVHGIIDKYAERGLRSLAVARQEVPERNKESPGGPWQFVGLLPLFDPPRHDSAETIRKALVLGVNVKMITGDQLAIGKETGRRLGMGTNMYPSSALLGQNKDATLEALPVDELIEKADGFAGVFPEHKYEIVKRLQEKKHIVGMTGDGVNDAPALKKADIGIAVADATDAARSASDIVLTEPGLSVIISAVLTSRCIFQRMKNYTIYAVSITIRIVLGFMLIALIWQYDFSPFMVLIIAILNDGTIMTISKDRVKPSPLPDSWKLKEIFATGIVLGSYLALMTVIFFWAMHKTDFFSDKFGVRSIRDSEHEMMSALYLQVSIVSQALIFVTRSRSWSFVERPGLLLVTAFLLAQLVATFLAVYANWGFARIKGIGWGWAGVVWLYSIVFYFPLDLIKFFIRFVLSGRAWDNLLENKTAFTTKKDYGREEREAQWATAQRTLHGLQPPEAATSTLFHDKNSYRELSEIAEQAKRRAEIARLRELNTLKGHVESVVKLKGLDIDTIQQNYTV

SEQ ID NO: 4169 - protein, 951 aa, Zea mays
  Clone ID: PAT_MRT4577_10901C.1.pep
MGGLEEIKNEAVDLENIPIEEVFEQLKCTREGLSSSEGQQRLEIFGPNRLEEKKESKVLKFLGFMWNPLSWVMEMAAIMAIALANSGGKPPDWQDFVGIIVLLVINSTISFIEENNAGNAAAALMANLAPKTKVLRDGRWGEQEAAILVPGDIISIKLGDIIPADARLLEGDPLKVDQSALTGESLPVTKGPGDEVFSGSTCKQGEIEAVVIATGVHTFFGKAAHLVDSTNQVGHFQQVLTAIGNFCICSIGVGILVEIIVMFPIQHRRYRSGIENLLVLLIGGIPIAMPTVLSVTMPIGSHKLSQQGAITKRMTAIEEMAGMDVLCSDKTGTLTLNKLSVDKNLVEVFCKGVDKDHVLLLAARASRTENLDAIDAAMVGMLADPKEARAGIREIHFLPFNPVDKRTALTYIDADGNWHRVSKGAPEQILDLCHCKEDLRRKVHSIIDKYAERGLRSLAVARQEVPEKNKESPGGPWQFVGLLRVFDPPRHDSAETIRKALVLGVNVKMITGDQLAIGKETGRRLGMGTNMYPSSALLGQNKDRTLSALPVDELIEKADGFAGVFPEHKYEIVKRLQEKKHIVGMTGDGVNDAPALKKADIGIAVADATDAARSASDIVLTEPGLSVIISAVLTSRAIFQRMKNYTIYAVSITIRIVLGFMLIALIWQYDFSPFMVLIIAILNDGTIMTISKDRVKPSPLPDSWKLKEIFATGIVLGSYLALMTVIFFWAMHKTDFFSDKFGVRSIRDSEHEMMSALYLQVSIVSQALIFVTRSRSWSFVERPGLLLVTAFLLAQLVATFLAVYANWGFARIKGIGWGWAGVVWLYSIVFYFPLDLLKFFIRFVLSGRAWDNLLDTRIAFTRHQDLRKGEREAQWATAQRTLHGLQPPEASSNTLFNDKSSYRELSEIAEQAKRRAEIARLRELNTLKGHVESVVKLKGLDIDPIQQNYPV

SEQ ID NO: 4170 - protein, 951 aa, Zea mays
  Clone ID: PAT_MRT4577_10903C.1.pep
MGGLEEIKNEAVDLENIPIEEVFEQLKCTREGLSSSEGQQRLEIFGPNRLEEKKESKILKFLGFMWNPLSWVMEMAAIMAIALANGGGKPPDWQDFVGIIVLLVINSTISFIEENNAGNAAAALMANLAPKTKVLRDGRWGEQEAAILVPGDIISIKLGDIVPADARLLEGDALKVDQSALTGESLPVTKGPGDEVFSGSTCKQGEIEAVVIATGVHTFFGKAAHLVDSTNQVGHFQQVLTAIGNFCICSIGVGILVEIIVMFPIQHRKYRSGIENLLVLLIGGIPIAMPTVLSVTMAIGSHKLSQQGAITKRMTAIEEMAGMDVLCSDKTGTLTLNKLSVDKNLVEVFCKGVDKDHVLLLAARASRTENQDAIDAAMVGMLADPKEARAGIREIHFLPFNPVDKRTALTYIDADGNWHRVSKGAPEQILDLCHCKEDLRRKVHSIIDKYAERGLRSLAVARQEVPEKNKESPGGPWQFVGLLPLFDPPRHDSAETIRKALVLGVNVKMITGDQLAIGKETGRRLGMGTNMYPSSALLGQNKDATLEALPVDELIEKADGFAGVFPEHKYEIVKRLQEKKHIVGMTGDGVNDAPALKKADIGIAVADATDAARSASDIVLTEPGLSVIISAVLTSRCIFQRMKNYTIYAVSITIRIVLGFMLIALIWQYDFSPFMVLIIAILNDGTIMTISKDRVKPSPLPDSWKLKEIFATGIVLGSYLALMTVIFFWAMHKTDFFSDKFGVRSIRDSEHEMMSALYLQVSIVSQALIFVTRSRSWSFVERPGLLLVTAFLLAQLVATFLAVYANWGFARIKGIGWGWAGVVWLYSIVFYFPLDLLKFFIRFVLSGRAWDNLLENKTAFTTKKDYGREEREAQWATAQRTLHGLQPPEASSNTLFNDKSSYRELSEIAEQAKRRAEIARLRELNTLKGHVESVVKLKGLDIDTIQQNYTV

SEQ ID NO: 4171 - protein, 72 aa, Zea mays
  Clone ID: PAT_MRT4577_109104C.1.pep
SQHPKVSRIKATGYIHCALRHVLPNMPLEQRRQLPVDLPEGHLKALSPQTLGQGVDMHLGLAIDSPEATLAV

SEQ ID NO: 4172 - protein, 342 aa, Zea mays
  Clone ID: PAT_MRT4577_109142C.1.pep
MAASEGVLLGMGNPLLDISAVVDDAFLAKYDIKLNNAILAEEKHSPMYDELASNSNVEYIAGGATQNSIRVAQWMLQTPGATSYMGCIGKDKFGEEMKKNAQAAGVTAHYYEDETAPTGTCAVCVVGGERSLIANLSAANCYKSEHLKRPENWALVEKAKYIYIAGFFLTVSPDSIQLVAEHAAANNKVFLMNLSAPFICEFFYDAQEKVLPYADFIFGNETEAKIFAKVRGWETENVEEIALKISQLPLASGKQKRIAVITQGADPVVVAEDGKVKTFPVILLPKEKLVDTNGAGDAFVGGFLSRLVQGKSIEDCVTAGCYAANVVIQRPGCTYPEKPDFN

SEQ ID NO: 4173 - protein, 281 aa, Zea mays
  Clone ID: PAT_MRT4577_109144C.1.pep
MAATEGVLLGMGNPLLDISAVVDDAFLTKYDIKLNNAILAEEKHLPMYDELASKSNVEYIAGGATQNSIRVAQWMLQTPGATSYMGCIGKDKFGEEMKKNAQAAGVTAHYYEDETAPTGTCAVCVVGGERSLIANLSAANCYKSEHLKRPENWALVEKAKYIYIAGFFLTVSPDSIQLVAEHAAANNKVFLMNLSAPFICEFFRDAQEKVLPYADYIFGNETEAKIFAKVRGWETENIEEIALKISQLPLASGKQKRIAVITQGADPVVVAEDGKVCFLSV

SEQ ID NO: 4174 - protein, 342 aa, Zea mays
  Clone ID: PAT_MRT4577_109145C.1.pep
MAASEGVLLGMGNPLLDISAVVDDAFLAKYDIKLNNAILAEEKHLPMYDELASNSNVEYIAGGATQNSIRVAQWMLQTPGATSYMGCIGKDKFGEEMKKNAQAAGVTAHYYEDETAPTGTCAVCVVGGERSLIANLSAANCYKSEHLKRPENWALVEKAKYIYIAGFFLTVSPDSIQLVAEHAAANNKVFLMNLSAPFICEFFYDAQEKVLPYADFIFGNETEAKIFAKVRGWETENVEEIALKISQLPLASGKQKRTAVITQGADPVVVAEDGKVKTFPVILLPKEKLVDTNGAGDAFVGGFLSRLVQGKSIEDCVTAGCYAANVIIQRPGCTYPEKPDFN

SEQ ID NO: 4175 - protein, 342 aa, Zea mays
  Clone ID: PAT_MRT4577_109147C.1.pep
MAASEGVLLGMGNPLLDISAVVDDAFLAKYDIKLNNAILAEEKHLPMYDELASNSNVEYIAGGATQNSIRVAQWMLQTPGATSYMGCIGKDKFGEEMKKNAQAAGVTAHYYEDETAPTGTCAVCVVGGERSLIANLSAANCYKSEHLKRPENWALVEKAKYIYIAGFFLTVSPDSIQLVAEHAAANNKVFLMNLSAPFICEFFCDAQEKVLPYADFIFGNETEAKIFAKVRGWETENVEEIALKISQLPLASGKQKRTAVITQGADPVVVAEDGKVKTFPVILLPKEKLVDTNGAGDAFVGGFLSRLVQGKSIEDCVTAGCYAANVIIQRPGCTYPEKPDFN

SEQ ID NO: 4176 - protein, 458 aa, Zea mays
  Clone ID: PAT_MRT4577_109260C.1.pep
MECARELRVRSTFTAAAMASKKQVGPGGAVPAQEQMNGGDAARLVRKPMDTFPQPAAARGRRALVDVGNLMNGRPSLVNHQKQAVAAAATSHKPLNVGNKKPLVPQAAARGLRPLADVTNLMINDRAAPANRQKPLDAVFNRNGKAVKLKECKVKPEVIVSIPDSEKEKKSKFPGGQKVCRRVPTLFDNLTKCSRASDGITTPKKKNPYDIDAPDSCNELAVVEYVEDIYRFYKSTEGTCLPLSSYMSSQAEISERMRAILIDWIIEYLSMESVPRKELQLVGISAMLIASKYEEIWAPLVKDLMCLCDNAFTRDQILTKEKAILDMLHWNLTVPTMYMFIVRYLKAAMCDAELENMAFFYSELALVQYAMLVYPPSVTAAAAVYAARSTLGMNPPWTDILEHHTGLAEPQLLDCARRLISFHALAPESKQKAVYRKYSKPKLGSVALQSPDKKLLSG

SEQ ID NO: 4177 - protein, 487 aa, Zea mays
  Clone ID: PAT_MRT4577_109262C.1.pep
MECARELRVRSTFTAAAMASKKQVGPGGAVPAQEQMNGGDAARLVRKPMDTFPQPAAARGRRALVDVGNLMNGRPSLVNHQKQAVAAAATSHKPLNVGNKKPLVPQAAARGLRPLADVTNLMIKDRAAPANRQKPVDAVFNRNGKAVKLKECKVKPEVIVIIPDSEKEKKGKFPGGQRVCRRVPTLFDNLTKCSRYEHKQNSKASDGITTPKKKNPYDIDAPDSCNELAVVEYVEDIYRFYKSTEGTCLPLSSYMSSQAEISERMRAILIDWIIEVQYRLTLMPETLYLTVYIIDQYLSMESVPRKELQLVGISAMLIASKYEEIWAPLVKDLMCLCDNAFTRDQILTKEKAILDMLHWNLTVPTMYMFIVRYLKAAMCDAELENMTFFYSELALVQYAMLVYPPSVTAAAAVYAARSTLGMNPPWTDILEHHTGLAEPQLLDCARRLISFHALAPESKQKAVYRKYSKPKLGSVALQSPDKKLLSG

SEQ ID NO: 4178 - protein, 54 aa, Zea mays
  Clone ID: PAT_MRT4577_109267C.1.pep
TVVPVPSEEDKEAEAVLMHKISRLVVVIAKLSFLSPWPEVNALFIELVTACIPR

SEQ ID NO: 4179 - protein, 57 aa, Zea mays
  unsure (1)..(57): unsure at all Xaa locations
  Clone ID: PAT_MRT4577_109273C.1.pep
PRVRPRFRLCFRKKKKKKKKENIKKKKKKKKKKKKKXKKKKNKKKKKKRVGLLKNQN

SEQ ID NO: 4180 - protein, 201 aa, Zea mays
  Clone ID: PAT_MRT4577_109470C.1.pep
TPSGVFVILMLIGYIIYAAWNRYDSVTEDCRKMKALKKRAEAADVAKSQFLATVSHEIRTPMNGVLGMLDMLLDTELKSTQRDFAQTAQICGKALISLINEVLDRAKIEAGKLELESVPFDLRSILDEVVSLFSSKSREKGIELAVYVSERVPEILLGDPGRFRQIITNLVGNSIKFTERGHIFVQVHLADHSNLATEPKV

SEQ ID NO: 4181 - protein, 122 aa, Zea mays
  unsure (1)..(122): unsure at all Xaa locations
  Clone ID: PAT_MRT4577_109586C.1.pep
QHIKHNSVSTLAAKIFCLLVLVVLSPRAATATILPQXSQASIAYILHQYLSPEVYSLCENPTLXPYRIQHAITADILPLSXSFSNNYKXLLHHIPLLHLLAQNIRSQQLQQLVLTNLTVYSQ

SEQ ID NO: 4182 - protein, 62 aa, Zea mays
  unsure (1)..(62): unsure at all Xaa locations
  Clone ID: PAT_MRT4577_10969C.1.pep
MPPIGGGDALPDGQXGWIDXENDQLQQVSVPALADGNKVILFGVPGAFTPKCRNQYVPGSIT

SEQ ID NO: 4183 - protein, 300 aa, Zea mays
  Clone ID: PAT_MRT4577_110073C.1.pep
MAPRPPRAYIHPSSYSYPATYSTTYYSAPDAQNSRERTRPPPPSVPIQMMLRVSASPAAAVANHLSGGAAATTAPARVTAQRSGVSLSAAAAAGKGKEVLSGVVFQPFEEIKGELALVPQSPDRSLARHKFVDDCEAAINEQINVEYNASYAYHSLFAYFDRDNVALKGFAKFFKESSDEEREHAEKLMEYQNKRGGRVRLQSIVAPLTEFDHPEKGDALYAMELTLALEKLVNEKLHSLHGVATRCNDPQLIDFIESEFLEEQVEAINKVSKYVAQLRRVGNKGHGVWHFDQMLLEEEA

SEQ ID NO: 4184 - protein, 310 aa, Zea mays
  Clone ID: PAT_MRT4577_110074C.1.pep
TPRGSPRDHENAHWLPRGRPGAAQSIHPSILQSTHSIPLPTPRIHANAHAPTRHIQMMLRVSPSPAAAVPTQLSGAPATPAPVVRVAAPRGVASPSAGAACRAAGKGKEVLSGVVFQPFEEIKGELALVPQSPDKSLARHKFVDDCEAALNEQINVEYNASYAYHSLFAYFDRDNVALKGFAKFFKESSDEEREHAEKLMEYQNKRGGRVRLQSIVTPLTEFDHPEKGDALYAMELALALEKLVNEKLHNLHGVATRCNDPQLTDFIESEFLEEQVEAINKISKYVAQLRRVGKGHGVWHFDQMLLEEEA

SEQ ID NO: 4185 - protein, 126 aa, Zea mays
  Clone ID: PAT_MRT4577_110079C.1.pep
IIKRVVGRIKMMPSDGAPRANGPCFTQQGSGNPRPRGDPKKGAYTHGLELFSFPPPRDVLFFLLSGKNGKRPPLAPLAGGSPPGLGGLWGGPLPTHQRPPPAPKLLFPLWSSSATIVIMPVWVMLD

SEQ ID NO: 4186 - protein, 107 aa, Zea mays
  unsure (1)..(107): unsure at all Xaa locations
  Clone ID: PAT_MRT4577_110208C.1.pep
VGFSSRCGSGSSSRGSPGLGFVGERXREAASGVEYRCFVCGLTXDTDDHSLENTLITYGEVLESKIILDRKTQRSLDFGFGTFCTKEEMRNSIKDINGKELNGRNIP

SEQ ID NO: 4187 - protein, 580 aa, Zea mays
  unsure (1)..(580): unsure at all Xaa locations
  Clone ID: PAT_MRT4577_110225C.1.pep
MEQRNVLALGEHVLKATVWKRKHKTAMEHPEGNDVMVFSQHDQRKHPVIFDDRAKCKKSKLISCGSGVILESYWNFXTSGLPVRVLFYQHGDWSDFPEDVVNLAQQDFQLKKPITTAVFQNKHILLDFIHMICIDYEMTIDKPLAWVDDNGKRFFPDLSAGLYTSKPSQHENGEADECDGTPTSVAESSSSVSVGEVVSHGKRINDIAEDNMRAHNILYEAVGENISGPSFHLNEYSSXPYKLLASQTIVDVLIXAVRNLLLKGLGQPFSEEDIIGIYRTPLLDQRGQVRCGLFQKEIEETRSRRGNANVRYAWLPCSRYTMEQMAMRGALEIAKPHKGSICGVGTCLAPANCTNSCARYSDFHEDGIIRMMLCRVIMGNVEVVLPGSKQFQPSNGSFDNGVDDLQNPQNYIVWDANVHKHIYAEYAVIVQAPLVTNECSGLKDSVPNISEIISSGSRDNLTKEDRFAPCGVEQEAPRLGRAPRAPSSPWMPFSMLFAAISTKVPRSDMELVIRYYEEFKRKRMSRSDLVVRMRQIVGDKILVSTIMRLHHQKKPPSMAAAAAGLARALARGEEGGGVAE

SEQ ID NO: 4188 - protein, 446 aa, Zea mays
  Clone ID: PAT_MRT4577_110243C.1.pep
MAAPSAATRRKLQRKFRLRGFTLKVDALEEAAAFLDRFPDAEDDALDLLLDELDKEPLQSSILDRDAVRRVVALLVEAEEALDVASPAATSARSALRVVDAFLVPRFHYDPIKKVFYEYVNADSSLWIWEILHGDLSIGSFFLGFSIEPGHTGRLAVHGEAGDKASLYRDRYQVLLQRLSRDKYFSKPAFDTVATEHCSCEVNTCGFPPLEDREASVSLLMGFDFFGGGVIPTEETLRLSSLEKKAVNDMFVILSDVWLDNPEYEITLSYVPPHRFQFGKLGEMIAARSRLKEHSRFLFIPGPDDAGPSKALPRCALPKYLIEELQKHIPNSIFVSNPCSYALCYFEISLHNHMMYNGIGVKFYTQEIVFFRQDLLYRMRRSCLIPPTTEETSDPFEHIVLGDKSEQKAFKYTGITCFNPGSFANDSTFAAYRPCTKEVELSALEG

SEQ ID NO: 4189 - protein, 352 aa, Zea mays
  Clone ID: PAT_MRT4577_110317C.1.pep
MAHAALLHCSQSSRSLAACRRGSHYRAPSHVPRHSRRRRRAVVSLRPMASSTAQAPATAPPGLKEGIAGLYDESSGLWENIWGDHMHHGFYDSSEAASMADHRRAQIRMIEEALAFAGVPASDDPEKTPKTIVDVGCGIGGSSRYLAKKYGAQCTGITLSPVQAERGNALAAAQGLSDQVTLQVADALEQPFPDGQFDLVWSMESGEHMPDKRKFVSELARVAAPGGTIIIVTWCHRNLDPSETSLKPDELSLLRRICDAYYLPDWCSPSDYVNIAKSLSLEDIKTADWSENVAPFWPAVIKSALTWKGFTSLLTTGWKTIRGAMVMPLMIQGYKKGLIKFTIITCRKPGAA

SEQ ID NO: 4190 - protein, 109 aa, Zea mays
  unsure (1)..(109): unsure at all Xaa locations
  Clone ID: PAT_MRT4577_110361C.1.pep
MAAADVKHRSFISGLAXATSNESLENAFFFYGXMLDSXVITDRXTGRSRGFRFVTFYSENSMLDAIENMNXKELDGRNITVNHAQSRDGGGGCGGCVYSGGRGGCGYGG

SEQ ID NO: 4191 - protein, 154 aa, Zea mays
  Clone ID: PAT_MRT4577_110481C.1.pep
WDLEPAGRDSLSQQLQMADTRGIATVVRQLIQNQGIVRGLPSSTGIEMTVVTTGRQRARARRPQRQDNNASPSIHVAAQNMGNVASESSNQIQLPHSNGDNAAQMVLASPQQSSSVEQLSTSSTTALIVGEPRSTRRLRPLESPTIRRTRRRPL

SEQ ID NO: 4192 - protein, 719 aa, Zea mays
  unsure (1)..(719): unsure at all Xaa locations
  Clone ID: PAT_MRT4577_11048C.1.pep
MEVNSSGEETVIKVRKPYTITKQRERWTEAEHKRFLEALKLYGRAWQRIEEHVGTKTAVQIRSHAQKFFTKLEKEAINNGTSPGQAHDIDIPPPRPKRKANSPYPRKSGLSSETPTKELPSDKSTKPNMPLSNENVLMAGDASLQKFQRKELSGKESCSEVLNLFRDAPSPSFSSVNKSSSNHGAPIEASKTKIRDMTIMENSSLNPNMQEDVKEINDQEMERLNGTQISSKCEHSHEGYLDISMQQMKLKPESVETTYVDKQTARASHSLAERTGTTSIPVTATEETHSVLTSDQVGINGSMNPSIHPMFPADPKFDSSATPQPFPHNYAAFAPMMQCNCNQDTHRSLVNMSSTFSSMLVSTLLSNPAIHAAARLAASYWPAAEGNTPIDPNQENLADGVQGRSIGSPPSMASIVAATVAAASAWWATQGLLPFXRPTHGFFICXPAPSAAFPTVDVPRPSEKDRDCPAENAQKECQEARKQGQFEGFRVAASSEYDGSGKGEVSVHTELKISPVQNADATSAAGADTTDAFMNKKKQDRSSCGSNTPSSSDVDVDNVPEKEGNGNEKAKQASCSNSSAGDTNHRRFRSSGSTSDSWKEVSEEGRLVFHALFSREKLPQSFSPPQAEGSKEVGKEEEDEVTTVAVDLNKSTTSIDHDLDTIGEPRASFPNELSPLKLKLRRTGFKPYKRCSVEAKENRVPASDEVGTKRIRLDSEAST

SEQ ID NO: 4193 - protein, 493 aa, Zea mays
  unsure (1)..(493): unsure at all Xaa locations
  Clone ID: PAT_MRT4577_110516C.1.pep
SDAWADAWAGVRECLEEVGHITRLADPRDAWLPITESRSGNAYYAAFHNLSSGIGFQALVLPTAFASLGWTWAIICLTLAFGWQLYTLWLLVRLHEPVAGATRYSRYMHLATTVFGERWAKILALLPVMYLSAGICTALIIVGGGSMKLLFGIACGEPCPARPPTTVEWYLVFVCAAVLLSQLPNLNSIAGVSLVGATAAVAYCTMIWTVSVAKGRVPAVSYDPVKAPSDVDGALAILNGLGIIAFAFRGHNVVLEIQGTMPSTLKHPSHVPMWKGVKVAYAIIALCLYPVAIGGFWAYGNQVRVPHIYIHTHGLRTTSRVTDDLRCTXIPPNGILSALYKFHSRDTSRLVLGVTTTLVIVNCLTTFQIYAMPVYDNMEAGYVHKKNRPCPWWMRSGFRAFFGAVNFLIAVALPFLSQLAGLLGGISLPVTLAYPCFMWVAIKKPRKGTATWNVNWALGILGMSISLVLIVGNLWGLVEKGLRVKFFKPADSQ

SEQ ID NO: 4194 - protein, 718 aa, Zea mays
  unsure (1)..(718): unsure at all Xaa locations
  Clone ID: PAT_MRT4577_11058C.1.pep
MEMNSSGEETVVKVRKPYTITKQRERWTEAEHKRFLEALKLYGRAWQRIEEHVGTKTAVQIRSHAQKFFTKLEKEAMNNGTSPGQAHDIDIPPPRPKRKPNSPYPRKSCLSSETQTKELPNDKSTKPNMPLSNGHVKMVGDASLQNFQRKELSEKGSRSEVLNLFRDAPSASFSSVNKSSSNHGAPRRTEASKTESRDMSIMENNSFNPNTQEDVKVISDQEMERLNGIQIRSKCEHSHEGYLDISTQQMKLMPKSVETTYVDEQTARASHTLAESNGTASIPVTVPEGTHPDQTSDQVGINGSMNPCIHPMVSADPKFGSSATPQTFPHNYAAFAPMMQCNCNQDTYRSFTNMSSTFSSMLVSTLLSNPAIHAAARLAASYWPAAEGNTPIDPNQENPADGVQGRNIGSPPSMASIVAATVAAASAWWATQGLLPFFAPPVAFPFVPAPSAAFPTVDVPRPSEKDRDCPVENAQNECQEARKQVQFEGLRVAASSESDGSGKXGVSPYGVKAISXRMLMPHLPXAGTNDAFRNKKKQDRSSCGSNTPSSSDVDAGNVPEEDNANEKAKQASCSNSSAGDTNHRRFRSNGSTSDSWKEVSEEGRLAFDALFSREKLPQSFSPPQAVDSKEVAKEEEDEVTTVAVDLNKNATSIDHDDLDTMDEPRASFPNELSHLKLKSRRTGFKPYKRCSVEAKENRVPTSDMVGTKRIRLDSEAST

SEQ ID NO: 4195 - protein, 65 aa, Zea mays
  Clone ID: PAT_MRT4577_110884C.1.pep
ADDMEALYKQVRAANRGDPSEVSTPSNHQREHKEVHPQPLPYEQRKASIIERNDQLNSSGGAHDD

SEQ ID NO: 4196 - protein, 101 aa, Zea mays
  unsure (1)..(101): unsure at all Xaa locations
  Clone ID: PAT_MRT4577_111062C.1.pep
RESRAAGRNLASFTASAHAFFSLNYAAYLEGQHLLPESQLSLVSPASFXTQPQAPPIYQHAAPNXAGTVLQLQQLXLPFNQLALTNPAAFYQQPIIGGALF

SEQ ID NO: 4197 - protein, 117 aa, Zea mays
  Clone ID: PAT_MRT4577_11119C.1.pep
GDLSTSLLFARAQHHPPTSSKRRRPATCGAKRHRKVLRDNIQGITKPAIRRLARRGGVKRISGLIYEETRGVLKIFLENVIRDAVTYTEHARRKTVTAMDVVYALKRQGRTLYGFGG

SEQ ID NO: 4198 - protein, 103 aa, Zea mays; identical to SEQ ID NO: 3555
  Clone ID: PAT_MRT4577_11121C.1.pep

SEQ ID NO: 4199 - protein, 98 aa, Zea mays
  Clone ID: PAT_MRT4577_11122C.1.pep
MSGKGLGKGGAKRHRKVLRDNIQGITKPAIRRLARRGGVKRISGLIYEETRGVLKIFLENVIRDAVTYTEHARRKTVTAMDVVYALKRQGRTLYGFGG

SEQ ID NO: 4200 - protein, 486 aa, Zea mays
  unsure (1)..(486): unsure at all Xaa locations
  Clone ID: PAT_MRT4577_11123C.1.pep
MAHPSSAAAVSSTAPAANPSYGAREEGGARSPPSPSPSPSQRGRAKVVIVMGATGAGKSRLAVDLAAHFAGVEVVSADSMQLYRGLDVLTNKAPLHEQNGVPHHLLSVIDPSVEFTCRDFRDRALPIIQEIVDRGGLPVVVGGTNFYIQALVSPFLLDDMAEEMQGCTLRDHIDDGIGLTDEDEGNGFERLKEIDPVAAQRIHPNDHRKIKRYLELYATTGALPSDLFQGEAAKXTCWEFLVIMSEQKWGRPSNSRLYCCFLWVDADLQVLDSYVNKRVDCMMDGGLLDEVCSIYDADAVYTQGLRQAIGVREFDEFFRAYLARKESGEGSCASLLGMHDDQLKSLLDEFFSQLKANTRRLVRRQRRRLHRLSKDFGWNLHRVDATEAFFCATDDSWQKKVVEPCVDVVRRFLSDDSTVLPSTSASDPSSRELWTQYVCEACDNRVLRGAHEWEQHRQGRGHRKRVQRLKRKSLRPWPSLLPQDRS

SEQ ID NO: 4201 - protein, 108 aa, Zea mays
  unsure (1)..(108): unsure at all Xaa locations
  Clone ID: PAT_MRT4577_111398C.1.pep
SRIPSCDGRPGPRSTRQRRXGARAPPQDQEGGPGGAARRLRRFPLPRAPRKKKGPQGPPGGRRRKKAPLFRLFDPPRTVAXPCPTRGCVRVIXERPPFCARVRMYALV

SEQ ID NO: 4202 - protein, 117 aa, Zea mays
  unsure (1)..(117): unsure at all Xaa locations
  Clone ID: PAT_MRT4577_111497C.1.pep
MIPNDVHNVLIPKHTCMPWSDSQTYLLCCNEPAETFVRADGAFIPFAHDFDISTVTTXXRGVGDIGDVKVIDLQSPLNSLIGRQVCKIGRSSGHTTGTVVAYALEYNDEKGISFFTD

SEQ ID NO: 4203 - protein, 77 aa, Zea mays
  Clone ID: PAT_MRT4577_111499C.1.pep
CVGPYWLRPSYLIHLKDRVTVRFCHRVSVRSTFGLGVGTPVVPFVCPPYETSPKKNEQGFCSHPFLSNKIEKLFPRP

SEQ ID NO: 4204 - protein, 746 aa, Zea mays
  unsure (1)..(746): unsure at all Xaa locations
  Clone ID: PAT_MRT4577_111563C.1.pep
MALTLRSSTSFLSPVDPTSKLLHKPADEAQPCCVAVPPAPGRRPRALRAAAAAAPSPATHRAPAEAAELLHGGGADQHHGLPRGGVPVYVMLPLDTVGPGGQLSRQRAVAASLMALRGAGVEGVMVDVWWGVVEREGPGRYDWEAYAELVRMVERAGLRLQAVMSFHQCGGNVGDTCNIPLPPWVLEEMSSNPDIVYTDRSGRRNPEYISLGCDTLPVLKGRTPIQVYTDYMRSFRERFRDYLGNVIAEIQVGMGPCGELRYPSYPEANGTWRFPGIGEFQCYDKYMRASXRVYLANLVNXDVGCSDVCSIPLPPWVLEEMSSNPNIVYTDRSGRRNPEYISLGCDTLPVLRGRTPIQVYTDYMRSFRQRFRDYLGNVIAVINQPPLLRSLNVAIAVDHKEAMPDVVILGQTTRVSLSQETSVGMGACGELRYPSHPQANVMGGFTGNRDFQCYDKVGARDSKGIRRCCDTLPELLCVGTVHAGXLEAAAVASGHEEWGRGGPHDAGEYKQMPDDTGFFRREGTWSTEYGHFFLEWYSGMLLEHGDRVMAAAEAVFGGTGATLSAKVAGIHWHYRTRSHAAELTAGYYNTRGHDGYAPIARMLAKRGAVLNFTCMEMKDEQQPQHASCSPELLVQQVKAATSAAGVQLAGENALERYDDAAFSQVVSTARGAGLAAFTYLRMNKTLFDGDNWGRFVSFVRAMADGGARPALPRCDTGHSDLYVGFVDAAKERKAAEAKGAATTAAL

SEQ ID NO: 4205 - protein, 348 aa, Zea mays
  unsure (1)..(348): unsure at all Xaa locations
  Clone ID: PAT_MRT4577_111565C.1.pep
TGTGTPGLGCDTLPVLKGRXPIQVYTDYMRSFRERFRDYLGNVIAEIQVGMGPCGELRYPSYPEANGTWRFPGIGEFQCYDKYMRASLEAAAVAAGXQEWGRGGPHDAGEYKQMPDDTGFFRREGTWSTEYGHFFLAWYSGMLLEHGDRVLAAAEAVFGGTGATLSAKVAGIHWHYRTRSHAAELTAGYYNTRDRDGYAPIARMLAKRGAVLNFTCMEMKDEQQPKHASCSPELLVQQVKTAASAAGVELAGENALERYDEAAFSQVASTARGAGLAAFTYLRMNKTLFDGDNWRQFVSFVRAMADGGARPALPRCDTGHSDLYVGFLDAAKKSKAPEAEGAATAAAL

SEQ ID NO: 4206 - protein, 54 aa, Zea mays
  Clone ID: PAT_MRT4577_111657C.1.pep
APQAGGSTTGMVCLCVVTLASHQRRLLVPRLLFPMLSSTPNIVKMSVWVMFVCS

SEQ ID NO: 4207 - protein, 89 aa, Zea mays
  unsure (1)..(89): unsure at all Xaa locations
  Clone ID: PAT_MRT4577_111758C.1.pep
NKVLFSREEGQQQGEQRLQESVIVEISKEQIRALSKRAKSSSRKTISSEDKPFNLRSRDPIYSNKLGKFFEITPEKNPKLXRDLDIFLS

SEQ ID NO: 4208 - protein, 308 aa, Zea mays
  Clone ID: PAT_MRT4577_11183C.1.pep
MAKLWTLLLAAVVVLSLLVSPIACTRKLNKPKPKPGSYRRPVKPKPKPVTGSYKPAPVAARRNHTATPTPSPTVYGPGGWLSGAGATYYGATNGDGSDGGACGYQTAVGKKPFDSMIAAGSTPLYRGGEGCGACYEVKCTTNAACSGQPVTIVITDQSPGGLFPGEVEHFDMSGTAMGAMARPGMADKLRAGGVLRILYRRVPCKYTGVNIAFKVDQGANPYYFDVLIEFEDDDGDLSAVDLMEAGSGVWTPMAHNWGATWRLNNGRKLKAPFGLRLTSDSRRVLVANNAIPAAWKPGKTYRSLVNYP

SEQ ID NO: 4209 - protein, 61 aa, Zea mays
  unsure (1)..(61): unsure at all Xaa locations
  Clone ID: PAT_MRT4577_112075C.1.pep
MAVKIFCFLMLLGLSASAATATIFPHCSQAXIDSFFSPYLXPAVVSVCENPILLSYMIQHA

SEQ ID NO: 4210 - protein, 46 aa, Zea mays
  unsure (1)..(46): unsure at all Xaa locations
  Clone ID: PAT_MRT4577_112288C.1.pep
LSRSISYADAPSLHMQMMLXVXPAPADTVPTQLFGAPATPAPVVRV

SEQ ID NO: 4211 - protein, 93 aa, Zea mays
  unsure (1)..(93): unsure at all Xaa locations
  Clone ID: PAT_MRT4577_112369C.1.pep
MEYGQQGQRGHGATGHVDQYGNPVGGVEHGTGGMRHGTGTTGGMGQLGEHGGAGMGGGQLQPARXEHXTGGILHRFVSSSSSSLEDDCMCGRW

SEQ ID NO: 4212 - protein, 93 aa, Zea mays
  unsure (1)..(93): unsure at all Xaa locations
  Clone ID: PAT_MRT4577_112620C.1.pep
HPLVTLGXPMVLEEPLLXTFXLPPFLVKGDYXALXXYXSTVANRALXTAEXLGLSREXACHNLLFXRXSXXXXGXXVXSXGLLXXVXXGGXKM

SEQ ID NO: 4213 - protein, 182 aa, Zea mays
  unsure (1)..(182): unsure at all Xaa locations
  Clone ID: PAT_MRT4577_112636C.1.pep
IRHEEPVRAANLSNCTQSAIHCRRRSNLLRASSMASSDHGSTTALKDVPGSYCLPLVGGGRDXLFFYYLQGQDKYLEYRVERYRSTXVRMNLPSRHYMARDPRMDAVLDAKSLPGLFDMDKAENKDLFTATYMPCTSLTGGYRACWYLDPCEPTHTMEKQLIXSLLLYSXDKVIPTLRSNFS

SEQ ID NO: 4214 - protein, 91 aa, Zea mays
  unsure (1)..(91): unsure at all Xaa locations
  Clone ID: PAT_MRT4577_112665C.1.pep
EILKVIRKNLVKKCIEMLFDDADNKDDYGKFYDAFSKNIKXGIHDVSDNRAKLTDLLLYHSTKSGXDQTTXSLKDYXTRMKDGHNDIYYIT

SEQ ID NO: 4215 - protein, 83 aa, Zea mays
  Clone ID: PAT_MRT4577_112678C.1.pep
PQAEPFCARCDLVSTSLPSPSREAAPVTASAVGDRTEASPAGRFQPCGVPICGERTRSSTPPSLIPEKATALSQVRSGLTGTL

SEQ ID NO: 4216 - protein, 79 aa, Zea mays
  Clone ID: PAT_MRT4577_112707C.1.pep
TVPIHPSPSSRPGQRNPSHERLLQEALPGRQVPRALRFSPLRPCRLGPHRRARHAHQLWQEDPSHRLLYPTTCRDPTMP

SEQ ID NO: 4217 - protein, 87 aa, Zea mays
  unsure (1)..(87): unsure at all Xaa locations
  Clone ID: PAT_MRT4577_112978C.1.pep
AIAAGILPLLPLFLQQPGGLLQQLPLVHLLGQNIKAQQLQQLVLGNPGGYFXQQQFLSFNQMAALDPACYLQQQLPFNKEAGDYPQQ

SEQ ID NO: 4218 - protein, 77 aa, Zea mays
  Clone ID: PAT_MRT4577_113047C.1.pep
NVCQAFPFPVNVDPKVNMQLLSNLQPYWAFFGFSPCPPLKGPGGGSGVLFLDQGAYPNPPQTCDSKGFMLYNWPPTC

SEQ ID NO: 4219 - protein, 223 aa, Zea mays
  Clone ID: PAT_MRT4577_113066C.1.pep
MRVLLVALALLALAASATSTHTSGGCGCQPPPPVHLPPPVHLPPPVHLPPPVHLPPPVHLPPPVHLPPPVHVPPPVHLPPPPCHYPTQPPRPQPHPQPHPCPCQQPHPSPCQLQGTCGVGSTPILGQCVEFLRHQCSPTATPYCSPQCQSLRQQCCQQLRQVEPQHRYQAIFGLVLQSILQQQPQSGQVAGLLAAQIAQQLTAMCGLQQPTPCPYAAAGGVPH

SEQ ID NO: 4220 - protein, 63 aa, Zea mays
  Clone ID: PAT_MRT4577_113206C.1.pep
TLLSNSIKSYSEAVNLHYQLPAGAHRRKRCRSSSASTSGAGVDASWVARTFAARAEERRTLRA

SEQ ID NO: 4221 - protein, 50 aa, Zea mays
  Clone ID: PAT_MRT4577_113275C.1.pep
KDGRHRKHHVISTQTETYKKKVKHSYEAYKTLQQELGLREEPAWIVDNTG

SEQ ID NO: 4222 - protein, 488 aa, Zea mays
  Clone ID: PAT_MRT4577_11332C.1.pep
RVQSTVDRTANVLGHPTPSLRDHYALGRKLGQGQFGTTYLCTDLATGVDYACKSIAKRNVITNEDVEDVRREIQIMHHLAGHRNVVAIKGAYEDQLYVHIVMEFCAGGELFDRIIQRGHYSERKAAELTRIIVGVVEACHSLGVMHRDLKPENFLLSNKDDDMSLKAIDFGLSVFFKPGQIFTDVVGSPYYVAPEVLRKRYGPEADVWTAGVILYILLCGVPPFWAETQQGIFDAVLKGVIDFDLDPWPVISESAKDLIRRMLNPIPSERLTAHEVLCHPWICDHGVAPDRPLDPAVLSRIKQFSAMNKLKKMALQVIAESLSEEEIAGLKEMFMAMDTDNSGAITYDELKEGLRKYGSTLKDTEIRDLMEAADIDNSGTIDYIEFIAATLHLNKLEREEHLVAAFSYFDKDSSGYITVDELQQACKEHNMPAAFLDDVIKEADQDNDGRIDYGEFVAMMTKGNMGVGRRTMRNSLNISMRDTPAGAL

SEQ ID NO: 4223 - protein, 157 aa, Zea mays
  Clone ID: PAT_MRT4577_113655C.1.pep
MAASDVEYRCFVGGLAWATDDHSLNNAFSTYGEVLESKIILDRETQRSRGFGFVTFSTEDAMRSAIEGMNGKELDGRNITVNEAQSRGGRGGGGGGGYGGGRGGGGYGGGGRRDGGGGYGGGGGYGGGGGGYGGGGGGYGGGNRGGGYGNSDGNWRN

SEQ ID NO: 4224 - protein, 111 aa, Zea mays
  unsure (1)..(111): unsure at all Xaa locations
  Clone ID: PAT_MRT4577_113657C.1.pep
LVGERIEMAASDVEYRCFVGGLAWATDDHSLHNAFSTYCEVLESKIILDRETQRSRGFGFVTFSTEEAMRNAIEGMNGKELDCRYITVNEDHSRCCRXGGCCGYCGGRGGC

SEQ ID NO: 4225 - protein, 102 aa, Zea mays
  Clone ID: PAT_MRT4577_113658C.1.pep
VVVKTTTVTTVSSATATLTATGVTERWGPHGQVILFATVMLTLVQRAYLRSSRLLLPICVFDCKVALCQLLVLCSSAAPADPCINQHGLWIDGCCYSCQDLF

SEQ ID NO: 4226 - protein, 126 aa, Zea mays
  unsure (1)..(126): unsure at all Xaa locations
  Clone ID: PAT_MRT4577_113661C.1.pep
GSPGFGFGGERIEMAASDDEYRCFFGGLPWATDNHFPSTTPFSTXVEVPXSKIILDRETQRSRGFGFXTFSTEEAXMRNAIEGMNGKELDGRNITANEAQSRGGRGGCGRRKPWRPRRPRLPPLLS

SEQ ID NO: 4227 - protein, 108 aa, Zea mays
  unsure (1)..(108): unsure at all Xaa locations
  Clone ID: PAT_MRT4577_113663C.1.pep
TEAPVKEGLEXAEAPVAAVPATPTGTEVTERWGPRGQVILFAKVMFTLVQRVYLSSCGVCCCPSVFLIARSLCARPQSCVHRWFQQTHASSSMGCGSMDAVTPVRLYV

SEQ ID NO: 4228 - protein, 72 aa, Zea mays
  unsure (1)..(72): unsure at all Xaa locations
  Clone ID: PAT_MRT4577_113664C.1.pep
AQSPAVRGAAGVGYGGARAAAAXGGAGLRDGGGAYAGGVDYGGAAEYGGGADAYGGGNRGGGYGNSHGNCRN

SEQ ID NO: 4229 - protein, 100 aa, Zea mays
  unsure (1)..(100): unsure at all Xaa locations
  Clone ID: PAT_MRT4577_113665C.1.pep
AGGYGGSREGAQYGGGGPHDGRGGYVGGVDAYGVGGXYGGGGGGYGGGNGGGGYGNSEGNWRNLPVGPARPSYPVCYRDVYPSPEGLFSFVSFVVAHLCF

SEQ ID NO: 4230 - protein, 105 aa, Zea mays
  unsure (1)..(105): unsure at all Xaa locations
  Clone ID: PAT_MRT4577_113668C.1.pep
GSPGFGFEGERIETAASDVEYRCFVCSLACATDDHCLHNAFSTYGEVLESKIILDRXTHRSRGSGFDTFSTEEAMRNAIDGMNGKELDCRNITVNEAHSRGCRGS

SEQ ID NO: 4231 - protein, 170 aa, Zea mays
  unsure (1)..(170): unsure at all Xaa locations
  Clone ID: PAT_MRT4577_113693C.1.pep
PTRPVSWVSGSRWQASDVEHRCLXVAGLGWATDDHSLHNAFSTYGEVLESKIMLDRETQMSRGFRFVTFCTEEAMRNAIEGMNGTEXLDGRNITVNEAQSRGGRGGGGGRGYRGGRGGGSYSSGRRRDGGGGYRGGSXXGGSGGYRGGGGGSEXGNRGGGYXNCDRNWRN

SEQ ID NO: 4232 - protein, 148 aa, Zea mays
  unsure (1)..(148): unsure at all Xaa locations
  Clone ID: PAT_MRT4577_113695C.1.pep
RCFVGGLAWATDDHSLHNAFSTYGEVLESKIILDRETQRSRGFGFVTFSTEEAMRNAIEGMNGKELDGRNITVNEAQSRGGRGGGGGGYGGGRGGGGYGGGGRRDGGGGYRGGGGYGGGCGYGGGGGGYGGGNRGGGYGNSDGNXWRN

SEQ ID NO: 4233 - protein, 155 aa, Zea mays
  unsure (1)..(155): unsure at all Xaa locations
  Clone ID: PAT_MRT4577_113696C.1.pep
MAASDVEYRCFVGGLAWATDDHSLHNTFSTYCDVLEXKIILHRETQRSRGFGFVTLSTEEAMPNPIDGMNGTELDGTNITVNEAQSRSGRRGSTGGYGGGRRGGDYGEGGRRDGRGDYRGGNGYGDGRGYRGGGVRYCGENRLHGYLNSDRNWMN

SEQ ID NO: 4234 - protein, 61 aa, Zea mays
  Clone ID: PAT_MRT4577_113698C.1.pep
GYGGARGDAGYGGGGRRDGAGGYGGGGGGYGGDGGYGGGGGGYGGGNRGGGYGNSDGNWRN

SEQ ID NO: 4235 - protein, 91 aa, Zea mays
  unsure (1)..(91): unsure at all Xaa locations
  Clone ID: PAT_MRT4577_113699C.1.pep
GMTAKEADGXRTIPVKKAHSPAAREAAAAAGYVGAGEAGGYAGGGPRDAAAGYAGDAGYGGAADGYGGGGGGYAGGNRGGGYGNSDGNWRN

SEQ ID NO: 4236 - protein, 48 aa, Zea mays
  Clone ID: PAT_MRT4577_113701C.1.pep
YGGGGLRDGADGYDGVDAGYGAGGGSGGGGAGYDGDNRGGGYGNFDGN

SEQ ID NO: 4237 - protein, 88 aa, Zea mays
  Clone ID: PAT_MRT4577_113705C.1.pep
TGKKLNDPNITVNKAQSRADRGDDDVAGYGGGREVGGYDGGGPRDGGGGYGGGVGYGGGDGGYGGGVGGYGGGNRGGGYGNSDGNWRN

SEQ ID NO: 4238 - protein, 145 aa, Zea mays
  Clone ID: PAT_MRT4577_113706C.1.pep
MAASDVEYRRFVGGLAWATDDHSLHNAFSTYGEVLESKIILDRETQRSRGFGFVTFSTEEAMRNAIEGMNGKELDGRNITVNEAQSRGGRGGGGGGGYGGGRGGGGYGGGGRRDGGGGYGGGGGYGGRREGGGGGYGGGGGGWRD

SEQ ID NO: 4239 - protein, 75 aa, Zea mays
  unsure (1)..(75): unsure at all Xaa locations
  Clone ID: PAT_MRT4577_113723C.1.pep
GYGGVREDGGYDGDGHRDDASGYDGGDGYGGAXDYGGGGGGYVGGNRGGGYGNSDGNWRKLNGGARAAKLSCSLP

SEQ ID NO: 4240 - protein, 165 aa, Zea mays
  Clone ID: PAT_MRT4577_113725C.1.pep
PHQHEPAPPLSPNSSPSSGNAVLIFRAERIREAAWDVEYRCFVGGLAWATDDHSLHNAFSTYGEVLESKIILDRKTQRSRGLGFVTFYTEEAMRNAIEGMNGKELDGRNITVNEAHSRGGRGGGGGGDYGGGRGGGGYGGGGRRDGGGGYGGGGSYGGGGGGYKG

SEQ ID NO: 4241 - protein, 155 aa, Zea mays
  Clone ID: PAT_MRT4577_113729C.1.pep
MAASNVENRCFVGGLAWATDDHSLHNAFRTYGEVLESKIILNRKTQRSRGFGFVTFSTEEAMRNAIEGMNGKELDGRNITVNEAQSRGGREGGGGGNGGAREGGVYGGGGRRDGGGGYGGGGGYGGGGGYGGGGGGYGGGNRGGGFGTSDGNWRY

SEQ ID NO: 4242 - protein, 164 aa, Zea mays
  unsure (1)..(164): unsure at all Xaa locations
  Clone ID: PAT_MRT4577_113739C.1.pep
AIEGMNGRELNGRSITVKEAQYRGVRGXRAGGYGGHVQPLATAGGGSCDAGGGYAGGAGYGAGGAYGGGDAGYGGGICGGGYGNPVGNWRNRPVGPARPSYLVRYRDVYPSPEGLSSFSVVFVVAHLCLSDCKVALCQLLVRVFNHGSIRPMHQTAWTPDRWML

SEQ ID NO: 4243 - protein, 158 aa, Zea mays
  Clone ID: PAT_MRT4577_113764C.1.pep
MAASDVEYRCFVGGLAWATDDHSLHNAFSTYGEVLESKIILDRETQRSRGFGFVTFSTEEAMRNAIEGMNGKELDGRNITVNEAQSRGGRGGGGCGYCGGRGGGGYCGGGRRDGGGGSGGGGGGYGGGGGYGGGGGYGGRREGGGGGYGGGGGGGWRD

SEQ ID NO: 4244 - protein, 273 aa, Zea mays
  unsure (1)..(273): unsure at all Xaa locations
  Clone ID: PAT_MRT4577_113768C.1.pep
MASTIMAATSRIVAAKTPFLGQGRAAAAAANASPLRDVAAAAAGGRITMGNDLWYGPDRVKYLGPFSAQTPSYLTGEFPGDYGWDTAGLSADPEAFARNRALEVIHGRWAMLGALGCITPEVLEKWVRVDFKEPVWFKAGAQIFSEGGLDYLGNPNLVHAQSILAVLGFQVILMGXLVEGFRINGLDGVGEGNNLYPGGQYFDPLGLADDPVTFAELKVKEIKNGRLAMFSMFGFFVQAIVTGKGPLENLLDHLDDPVANNAWVYATKFAPGS

SEQ ID NO: 4245 - protein, 156 aa, Zea mays
  Clone ID: PAT_MRT4577_113770C.1.pep
MAASDVEYRCFVGGLAWATDDHSLHNAFSTYGEVLESKIILDRETQRSRGFGFVTFSTEEAMRNAIEGMNGKELDGRNITVNEAQSRGGRGGGGGGYGGGRGGGGYGGGGRRDGGGGYGGGGGGYGGGGGYGGGGGGYGGGNRGGGYGNSDGNWRN

SEQ ID NO: 4246 - protein, 297 aa, Zea mays
  unsure (1)..(297): unsure at all Xaa locations
  Clone ID: PAT_MRT4577_113817C.1.pep
VKFVFWRGKIGAGPTASPSPSPWPPSCSAPALPCPHPARSGPAPSRRRPRPPRRGPRAPXPCAXPWPRPRCSAPPASPCPRWPAPSRPPSPRPPWSSPPPSPRTTRSPPRPGPWPPRPCPWRAPPPPRSGPWPPSPPPAPGPRPRVPPPWPAPSRAPPCPRPPAPRHASRSSLAPSPGTPCPRRPPPRPSPGPWPARPCPTPGPPRGRPCPAPCSSSPRPSSWRAPWRPRWRPSPPPPRPCTCPLFLSGLPARCRMPGTILAQPASRGGSRSLPAGAAEGSTPAWEEPACQQRCRYR

SEQ ID NO: 4247 - protein, 281 aa, Zea mays
  unsure (1)..(281): unsure at all Xaa locations
  Clone ID: PAT_MRT4577_113942C.1.pep
MCKKAAIGTFEAGRNFVIPKLEKVIDEEKEVSHSSLMDDAEKAILDPLKVKVKLKPDNVDICYPPVFQSGGKFDLKPGASSNDEYLYYDSASIIICAIGSKYSSYCSNVARTYLIDATPTQNKAYETLRKAHEAAIQQVKPGNQMSAVYQAAVAVIERDAPELLPNLTKSAGTGIGLEFRESGLNLNAKNDRRIKKGMVFNVSLGLHNIQAETTSEKTKQFSLLLADTVLVNERGHEVLTAPCSRXFKDVAYSFNEDDDAVAAEVKIKSKDIDVMPTKATL

SEQ ID NO: 4248 - protein, 715 aa, Zea mays
  Clone ID: PAT_MRT4577_114301C.1.pep
MASADVHMAGGAETETFAFQAEINQLLSLIINTFYSNKEIFLRELISNASDALDKIRFESLTDKSKLDAQPELFIRLVPDKASKTLSIIDSGVGMTKSDLVNNLGTIARSGTKEFMEALAAGATDVSMIGQFGVGFYSAYLVADRVMVTTKHNDDEQYVWESQAGGSFTVTHDTTGEQLGRGTKITLFLKDDQLEYLEERRLKDLVKKHSEFISYPIYLWTEKTTEKEISDDEEEEDNKKEEEGDVEEVDDEDKDTKDKSKKKKKVKEVSHEWVQINKQKPIWLRKPEEITRDEYASFYKSLTNDWEDHLAVKHFSVEGQLEFKAILFVPRRAPFDLFDTRKKLNNIKLYVRRVFIMDNCEELIPEWLGFVKGVVDSDDLPLNISRETLQQNKILKVIRKNLVKKCIEMFFEIAENKDDYAKFYDAFSKNIKLGIHEDSQNRAKLADLLRYHSTKSGDETTSLKDYVTRMKEGQKDIYYITGESRKAVENSPFLERLKKKGYEVLFMVDAIDEYAVGQLKEYDGKKLVSATKEGLKLDDEDDEEAKKRREERKKRFEELCKVIKDILGDRVEKVVVSDRIVDSPCCLVTGEYGWTANMERIMKAQALRDSSMSAYMSSKKTMEINPDNGIMEELRKRAEADRNDKSVKDLVLLLFETALLTSGFSLDDPNTFAARIHRMLKLGLNIDEDAAGDEDADMPALDEGAAEESKMEEVD

SEQ ID NO: 4249 - protein, 256 aa, Zea mays
  Clone ID: PAT_MRT4577_114398C.1.pep
ICWNSYMKSHIASSDFEGIVQVWDVTRSQVFVGMREHERRVWSVDFSIVDPTKLVSGSDDGSVKLWDMNQAGSIGTIRTRANVCSVQFQPDTARSIAIGSADHKIYCYDLRNIRAPYCTLVGHTKTVSYVKYLDASTILSASTDNSLKLWDLSMNPGRIIDSPVQTFTGHTNTKNFVGLSISDGYIATGSETNEVFVYHKEFPMPVLAYKFSVTDPISGQEIDDQSQFISCVCWRGQSSTLLSANSSGNIKILEMD

SEQ ID NO: 4250 - protein, 106 aa, Zea mays
  Clone ID: PAT_MRT4577_114420C.1.pep
VFSEVLFFIYLLPPIIFNAGFQVKKKQFFRNFMTITLFGAVGTMISFFTISLGAIAIFSRMNIGTLDVGDFLAIGAIFSATDSVCTLQVLHQDETPFLYSLVFGEG

SEQ ID NO: 4251 - protein, 129 aa, Zea mays
  unsure (1)..(129): unsure at all Xaa locations
  Clone ID: PAT_MRT4577_114454C.1.pep
PRPRPAPRAGKGGKXXXAAKTTAAKSTDKDKDRKKAPXXRSGGAGXQXPXXRTHRQRKAXAXAHGRXGATAAGXXAATREDPTAEGPEPAGXAGKDPXGKRXTPRHPQXAXRGDEEPDTPXKGTXAGGG

SEQ ID NO: 4252 - protein, 598 aa, Zea mays
  Clone ID: PAT_MRT4577_11460C.1.pep
MSEEDEDQPPPKRPCASPPADQVLDNVLETVLQFLDAPRDRSAASLVCRSWHRAESATRDSVAVRNLLAASATRAARRFPNARSLLLKGRPRFADFNLLPHGWDASAFRPWAAAVAAGSFPALTSLYLKRIPVTDADLDLLSRPLPASFRDLTLHLCDGFTSRGLASIASHCRGLRVLDVVECDMAEEQEVVDWVAAFPPEPTNLESLSFECYEPPVAFATLEALVARSPRLSRLGVNLHVSLGQLRRLMAHAPRLSHLGTGSFRPAEGGEEEAEFGEVVSAFVSAGRARTLVSLSGFRDLAQEYLPIIDVVCSHLKSLDLSYAAVTPNQILMFIGQCYNLETLWVLDSVRDEGLDAVGIYCKKLQTLRVLPLDAHEDADELVSEVGLTAIARGCPALRSILYFCQTMTNAAVVDMSLHCPELKVFRLCIMGRHQPDHATEEPMDEGFGAIVKNCRKLTRLSTSGQLTDRAFEYIGRHGKSLRTLSVAFAGNSDVALQYILRGCSKLEKLEIRDCPFGDAGLLSGMHHFYNMRFVWMSGCNLTLRGCKEVARGLPRMVVELINGQPDENERKESVDILYMYRSLDGPREDVPPFVKIL

SEQ ID NO: 4253 - protein, 598 aa, Zea mays
  Clone ID: PAT_MRT4577_11461C.1.pep
MSEEDEDQPPAKRPSPSPPADQVLDNVLETVLQFLDAPRDRSAASLVCRSWHSAESATRESVAVRNLLAASATRAARRFPNARSLLLKGRPRFADFNLLPHGWDASAFRPWAAAVAAGAFPALTSLYLKRIPVTDADLDLLSRSLPASFRDLTLHLCDGFTSRGLASIASHCRGLRVLDVVECDMAEEQEVVDWVAAFPQEPSNLESLSFECYEPPVAFAALEALVERSPRLRRLGVNLHVSLGQLCRLMAHAPRLSHLGTGSFRPADGGEEGAGFGEVVSAFVAAGRARTLVSLSGFRDLAQEYLPTIAVVCAHLKSLDLSYSAVTPNQILMFIGQCYNLETLWVLDSVRDEGLDAVGISCKKLQSLRVLPLNAHEDADELVSEVGLTAISRGCPALRSILYFCQTMTNAAVVDMSRNCPELKVFRLCIMGRHQPDHATGEPMDEGFGAIVQNCSKLTRLSTSGQLTDRAFEYIGRHGKSLRTLSVAFAGNSDVALQYILRGCSKLEKLEIRDCPFGDAGLLSGMHHFYNMRFVWMSGCNLTLQGCKEVAQVLPRMVVELINGQSDENERNESVDILYMYRSLDGPREDVPPFVKIL

SEQ ID NO: 4254 - protein, 152 aa, Zea mays
  Clone ID: PAT_MRT4577_114642C.1.pep
ARVRPRVRPRVRPRVRPRVRGAFGCELARFDPVEFLEFGRGKAVAFVGDLLARNHMPSVVWLLAQGGYSKGLAGNPLDQNKGYQFRAYNFTISMVWSAFLVRAREPEHEGPVHTGHWSLFLDEPDDQWVFQMARFDFLLVSAGHWFFRPFLF

SEQ ID NO: 4255 - protein, 45 aa, Zea mays
  Clone ID: PAT_MRT4577_114825C.1.pep
DHCHIRSTYYVFQRERKLPQHHDITWRVVALHITSPVDHWAYIIL

SEQ ID NO: 4256 - protein, 64 aa, Zea mays
  Clone ID: PAT_MRT4577_114846C.1.pep
MIAQPIKLHAWTAFPASEHYGIARMPASVYKAICLQKPRSKRTNDREATSFARRSDSTPRPPHA

SEQ ID NO: 4257 - protein, 144 aa, Zea mays
  Clone ID: PAT_MRT4577_115011C.1.pep
GLLGRAGLLRGACELIDTMPMKPDLCVWGALLNSCRIHGDAALAEAAMAKVLQAETATTGNRTLITNLYAACGMWDDSKRVRMTMKEAGLRKNPGQSWIEVRNKVFAFTAWSAPPSEAEEVFRVLDDLYGEMKDEKRSTAILLC

SEQ ID NO: 4258 - protein, 72 aa, Zea mays
  unsure (1)..(72): unsure at all Xaa locations
  Clone ID: PAT_MRT4577_115086C.1.pep
MEGTVSSFPVENMVKLETDERATAMEVIRHSCXNWGFFLLVNHGISHELVDEVERLTKAHYSTFREAKFQEF

SEQ ID NO: 4259 - protein, 164 aa, Zea mays
  unsure (1)..(164): unsure at all Xaa locations
  Clone ID: PAT_MRT4577_115129C.1.pep
PLLSPGVYRVXSMTRQIIAPNFDRGYGEPDEMLALTSFKNFKCERGENSGAHIIRIPFGPKEKHLAKENIWPFIQEFVDGALGHIVRMSKTLGEETGSVCPVWPAVIHGHYASAGVAAALLSGALNVPMVFTGHFLGKDKLEGLLKQGRQTREQINVTYKIMRP

SEQ ID NO: 4260 - protein, 857 aa, Zea mays
  Clone ID: PAT_MRT4577_115380C.1.pep
MAQQMASVHLNDTTVVDAKPLRTLTPMFPAPLGLHTFTPQNSPSVVCVTPFGPYAGGTELGMPAVPPMFAAPVPAAGAEPSQRQPHTANMNGGDTELGMPAVPPMFAAPAPAAGAEPNQGQPHTANMNGTAVNSSVTSLQTPPSAATQESGKRKRGRPKRVPDTTVSSAPSAPLAPTISPVPSLPVVTPVPSAPQELNTIVSLTPSSDAPQESGKRKRGRPKRIQDVPVMVPLTSQGDSTSVIQTLPGSSVHESGTRRGRPKRLQDSSDIVTPIDSKDSESSPQPPIAAPAESGKRKRGRPKRIDGSVTPSSHSVFSIDDDAVDTMKRGRPRKIDTKLLQFPSLFSDDPRQTADNVLMMFDALRRRLMQMDDVKQAAKQQPNLKAGSIMNNAELRVNKDKRIGEVPGVEVGDMFYFRIEMCLVGLNSQSMAGIDYMSAKFGNEEDPVAISVVSAGVYDNTGDDPDVLVYTGHGMSGKDDQKLERGNLALERSLHRGNPIRVIRSVKDLTCPTGKIYIYDGLYKIKEAWVEKGKSGFNVFKHKLLREPGQPDGIAVWKKTEKWRENPSSRDHVILLDISYGVENNPVCLVNEVDDEKGPSRFTYTTNLTYGNSLSSMRKMQGCKCISVCLPGDNNCSCTHRNAGDLPYSASGILVSRMPVLYECGDSCTCSQNCRNRVVQKGTQIRFEVFKTGDRGWGLRSWDPIRAGTFICEYAGEIIDINRVNGEDDYIFETSPLEQNLRWNYAPELLGEPSLSDSNETPKQLPIVISAKRTGNIARFMNHSCSPNVFWQPVLYDHGDEGYPHIAFFAIKHIPPMTELTYDYGQNQRNSIQMGTHSGFRKSKSCLCWSPKCRGSFG

SEQ ID NO: 4261 - protein, 288 aa, Zea mays
  Clone ID: PAT_MRT4577_115406C.1.pep
MAKDIEASGPEAGEFSAKDYTDPPPAPLVDAEELTQWSLYRAVIAEFIATLLFLYITVATVIGYKHQTDASASGPDAACGGVGILGIAWAFGGMIFILVYCTAGISGGHINPAVTFGLFLARKVSLVRALLYIVAQCLGAICGVGLVKGLQSAYYVRYGGGANELSDGYSKGTGLAAEIIGTFVLVYTVFSATDPKRSARDSHVPVLAPLPIGFAVFMVHLATIPITGTGINPARSLGAAVIYNKDKAWDDQWIFWVGPLIGAAIAAAYHQYVLRASATKLGSYRSNA

SEQ ID NO: 4262 - protein, 110 aa, Zea mays
  unsure (1)..(110): unsure at all Xaa locations
  Clone ID: PAT_MRT4577_115435C.1.pep
HGEARHRSIGARGRRVSARTTRTSAGAPLDADEVTKWSLPRASPSSSPRCSSSNIYRGHRVIGYKHQRTGRRRARRGRGAWXPGIAWXFGGMIFILVTAPGISGGHQTRP

SEQ ID NO: 4263 - protein, 95 aa, Zea mays
  unsure (1)..(95): unsure at all Xaa locations
  Clone ID: PAT_MRT4577_11560C.1.pep
RNITVNXAQSRGGRGGGGGGYGGGRGGGGYGGGGRRDGCGGYGGGGGXYCGGGXTGGGGSCYGGVNLCCGYCNSYLNWSNCTEGPAQPIFYCFLP

SEQ ID NO: 4264 - protein, 107 aa, Zea mays
  Clone ID: PAT_MRT4577_115738C.1.pep
ATVGAAPATPMGTGGTDRWGPLAQVILFAPGLFPQVQRVYLRTCHVCCCPSVFLIERPLCASCKSCVNPGLQQTHASNSMGCGSMDPVTPVRLYFKLILRKKMVFGG

SEQ ID NO: 4265 - protein, 94 aa, Zea mays
  Clone ID: PAT_MRT4577_115781C.1.pep
MGSGTVLKSYFLTKKSEWGATRQAAALRPSTVSMVVRAYDYADELFKTAKTIASSWRSILAMDEFYATCGKRLAYIGLENTEANRQAYRTLLVT

SEQ ID NO: 4266 - protein, 412 aa, Zea mays
  unsure (1)..(412): unsure at all Xaa locations
  Clone ID: PAT_MRT4577_115783C.1.pep
MASATVLKSSFLPKKSEWGATRQAAAPRPPTVSMVVRASAYADELVKTAKTIASPGRGILAMDESNATCGKRLASIGLENTEANRQAYRTLLVTAPGLGQYISGAILFEETLYQSAVDGRKIVDILVEQGIVPGIKVDKGLVPLAGSNNESWCQGLDGLASREAAYYQQGARFAKWRTVVSIPNGPSELAVKEAAWGLARYAAISQVGWFGFYSCHYYWLQPACHDLHAXDNGLVPIVEPEILLDGEHGIERTFEVAQKVWAETFYAMAENNVMFEGILLKPSMVTPGAEAKDRATPEQVAAYTLKLLHRRIPPSVPGIMFLSGGQSEVEATQNLNAMNQGPNPWHVSFSYARALQNTCLKTWGGQPDKVKAAQDALLLRAKANSLAQLGKYTSDGEAAEAKEGMFVKNYSY

SEQ ID NO: 4267 - protein, 388 aa, Zea mays
  Clone ID: PAT_MRT4577_115786C.1.pep
MASATVLKSSFLPKKSEWGATRQAAAPRPPTVSMVVRASAYADELVKTAKTIASPGRGILAMDESNATCGKRLASIGLENTEANRQAYRTLLVTAPGLGQYISGAILFEETLYQSAVDGRKIVDILAEQGIVPGIKVDKGLVPLAGSNNESWCQGLDGLASREAAYYQQGARFAKWRTVVSIPNGPSELAVKEAAWGLARYAAISQDNGLVPIVEPEILLDGEHGIERTFEVAQKVWAETFYAMAENNVMFEGILLKPSMVTPGAEAKDRATPEQVAAYTLKLLHRRIPPSVPGIMFLSGGQSEVEATQNLNAMNQGPNPWHVSFSYARALQNTCLKTWGGQPDKVKAAQDALLLRAKANSLAQLGKYTSDGEAAEAKEGMFVKNYSY

SEQ ID NO: 4268 - protein, 389 aa, Zea mays
  unsure (1)..(389): unsure at all Xaa locations
  Clone ID: PAT_MRT4577_115789C.1.pep
MASATVLKSSFLPKKSEWGATRQAAAPRPPTVSMVVRASAYADELVKTAKTIASPGRGILAMDESNATCGKRLASIGLENTEANRQAYRTLLVTAPGLGQYISGAILFEETLYQSAVDGRKIVDILAEQGIVPGIKVDKGLVPLAGSNNESWCQGLDGLASREXAAYYQQGARFAKWRTVVSIPNGPSELAVKEAAWGLARYAAISQDNGLVPIVEPEILLDGEHGIERTFEVAQKVWAETFYAMAENNVMFEGILLKPSMVTPGAEAKDRATPEQVAAYTLKLLHRRIPPSVPGIMFLSGGQSEVEATQNLNAMNQGPNPWHVSFSYARALQNTCLKTWGGQPDKVKAAQDALLLRAKANSLAQLGKYTSDGEAAEAKEGMFVKNYSY

SEQ ID NO: 4269 - protein, 52 aa, Zea mays
  unsure (1)..(52): unsure at all Xaa locations
  Clone ID: PAT_MRT4577_11578C.1.pep
AALRLLQRLLALDPNDRPTAAEALADPYFKGIAEVERXPSCQRITKMEFEFE

SEQ ID NO: 4270 - protein, 388 aa, Zea mays
  Clone ID: PAT_MRT4577_115791C.1.pep
MASATVLKSSFLPKKSEWGATRQAAAPRPPTVSMVVRASAYADELVKTAKTIASPGRGILAMDESNATCGKRLASIGLENTEANRQAYRTLLVTAPGLGQYISGAILFEETLYQSAVDGRKIVDILVEQGIVPGIKVDKGLVPLAGSNNESWCQGLDGLASREAAYYQQGARFAKWRTVVSIPNGPSELAVKEAAWGLARYAAISQDNGLVPIVEPEILLDGEHGIERTFEVAQKVWAETFYAMAENNVMFEGILLKPSMVTPGAEAKDRATPEQVAAYTLKLLHRRIPPSVPGIMFLSGGQSEVEATQNLNAMNQGPNPWHVSFSYARALQNTCLKTWGGQPDKVKAAQDALLLRAKANSLAQLGKYTSDGEAAEAKEGMFVKNYSY

SEQ ID NO: 4271 - protein, 642 aa, Zea mays
  unsure (1)..(642): unsure at all Xaa locations
  Clone ID: PAT_MRT4577_115857C.1.pep
RPSAAASGPACVLSVTATNGLGGLGLGLPGAHYLQSALVIRCMSCNSNFLNTDLLYPHIVSDHSQQFRLLDVPQRPSGQSAQQTEGMSGLPLYDSHNVEDENGSQKFVCRLCGLKFDLLPDLGRHHKVAHMVSGAVGHIPLGRGKYQLNRGRHYYSAFKKSLRPTSTLKKSSSSGIDKNLKFQISGLTSQIVESETSSLGKLQDFQCSDVAQTLFSKIQKTRPHPSNFDVLSVARSVCCKTSLLAALEVKYGPLPENIFVKAAKLCSDNGVQIDWHQEGFICPKGCKSRYNSNALLPMQLTAVDFLEAPXIPVXDEMWGMEEYHYVLDSKHFGWKPKNESVVLCEDISFGREKVPIVCVIDVDAKDSLGMKPEELLPHGSSLPWEGFHYITNRVMDSSLIDSENSMPGCACSHPECSPENCGHVSLFDGVYNSLVDINGTPMHGRFAYDEDSKIILQEGYPIYECNSSCICDSSCQNKVLQKGLLVKLELFRSENKGWAIRAAEPILQGTFVCEYIGEVVKADKAMKNAESVSSKGGCSYLFSIASQIDRERVRTVGAIEYFIDATRSGNVSRYISHSCSPNLSTRLVLVESKDCQLAHIGLFANQDIAVGEELAYDYRQKLVAGDGCPCHCGTTNCRGRVY

SEQ ID NO: 4272 - protein, 575 aa, Zea mays
  unsure (1)..(575): unsure at all Xaa locations
  Clone ID: PAT_MRT4577_115917C.1.pep
METSRRPKPIHPQGGIHDPVRSSPRELLQTLAMSTAAAAKTPIKTLGSAAAGVITPTKSQAPAAAKTPCTSRARSSHASENSNPNIPGTPPPPQSTPSKPSLKSXRRAREPGPPPRRKSPPRPRPPRHRXRERRFLVAKKGARRRRNVGTMGGGGGGRGGEIDFDKCREAAREALRASQGEFFRKEVAASTATGEGQLGQEEEGKPLAEEDVKGGAFEERQEEETDAELEGSSKVRAMRTKAMAKAMSSVPNPGSGRVKHMVQAFESLLNISGATSDAERAGEGSWALPGLQLWKEDDKGXWGSHQCRCSLLLISRMQGLIDSAXLNGNTVRSSWDSRTSTGECSRRNSSESLRSRTSAGGRRSRRNQSSESLRSSWNKKLKVTSQHPFKLRTEQRGKFKEQQFVQKVQEMLAEEEKKRIHIAQGLPWTTDEPECLIKPAVKERTEPIDLVLHSDVRALERAEFDQHVLDRNKFAEQQRLEWERQQELEEEERIRQLRRTELVPKAQPMPYFDRPFIPKRSTKPATVPMEPKFHLRPEKISCYCRQQCMELGKLNPQQQCQHPLWQSRSTEHQHT

SEQ ID NO: 4273 - protein, 473 aa, Zea mays
  Clone ID: PAT_MRT4577_115921C.1.pep
MAGEEAAEGSGTRRHMDLNLYLGLPPLPRPPVWLDPTLMPNLTGAAPESSITGEPEESLALGAAAYSPSNALSTPEEHPMLDPIVYSWLDGNRTDGEEDTDAPEPGPVDGANVSRSQLVVAATGLEGDDDLPLVRFVRPSQMVVAGGMETVNTSILQQSIQRAAAIEARTPELRFQRVIQISQQHRIVRPASVNRSQGAASTDADRLVWAIQRTHNSLEATRRQKLDDNNLCGNGSAKKDESCDCNSSFECNICLDPAKQPVVTPCGHLFCWPCLYQWLHAHSPHSECPVCKGEVLELNVTPIYGRGGEEGNSTNPDFPPRPRANRRESLRQQLQMTDTRGIATVVRQLIQNQGIISVLPSPTGIEMSVVPAGRQRARARRQQRQDNNASSSIHVVAQNMGNVAPESSNQIQLSHSNGDNAAQMVLAAPQQSSSVEQLSTSSTTAVILGEPGSSRRSRPSESPTIRRTRRRPQ

SEQ ID NO: 4274 - protein, 475 aa, Zea mays
  Clone ID: PAT_MRT4577_115927C.1.pep
MAGEQAPEGSGTSRRMDLNLYLGLPPLPRPPVWLGTAMIAPTLMPNSTAPEAPRTGEPDESLAPAAAAYSPSNALSTPEEQPMLDPIVYSWLDGNSTDGEEHTDASEPGPVDGVNVPRSQLLVAATGLEGDDIPVVRFLRPSQVAAGGMEMVSTSILRRSNQGAAAIESGTPELRFQRVIQISQQHSIVRPASANHSQGAASTDADRLVWAIQRTHNSYEAARRQKLDGDNNLCGNGAAKKDESCDCNSSFECNICLDPAKQPVVTPCGHLFCWPCLYQWLHAHSPHSECPVCKGEVLELNVTPIYGRGGEEGNSTNPDFPPRPRANRRESLRQQLQMTDTRGIATVVRQLIQNQGIISVLPSPTGIEMSVVPAGRQRARARRQQRQDNNASSSIHVVAQNMGNVAPESSNQIQLSHSNGDNAAQMVLAAPQQSSSVEQLSTSSTTAVILGEPGSSRRSRPSESPTIRRTRRRPQ

SEQ ID NO: 4275 - protein, 62 aa, Zea mays
  unsure (1)..(62): unsure at all Xaa locations
  Clone ID: PAT_MRT4577_115969C.1.pep
MAAEGEKKMITLKSXDGEEFEVEEAVAFXSQAIRHMIXDDCSXQGIPFPTSTPKSLSTVIEY

SEQ ID NO: 4276 - protein, 55 aa, Zea mays
  Clone ID: PAT_MRT4577_115970C.1.pep
VFKPGPTRGAFPVTIGRNLFYGSARFKSANKKIPLWFPKGPFYWQNTQPPWIFEK

SEQ ID NO: 4277 - protein, 482 aa, Zea mays
  Clone ID: PAT_MRT4577_115998C.1.pep
MATETETFAFQAEINQLLSLIINTFYSNKEIFLRELISNSSDALDKIRFESLTDKSKLDAQPELFIHIIPDKATSTLTIVDSGIGMTKSDLVNNLGTIARSGTKEFMEALAAGADVSMIGQFGVGFYSAYLVAERVVVTTKHNDDEQYVWESQAGGSFTVTRDTSGEQLGRGTKMVLYLKDDQMEYLEERRIKDLVKKHSEFISYPISLWTEKTTEKEISDDEDEEEKKDTEEGKVEDVDEEKEEKEKKKKKIKEVSHEWNLVNKQKPIWMRKPEEINKEEYAAFYKSLTNDWEEHLAVKHFSVEGQLEFKAVLFVPKRAPFDLFDNKKKANNIKLYVRRVFIMDNCEELIPEYLSFVKGIVDSEDLPLNISRETLQQNKILKVIRKNLVKKCIELFFEIAENKEDYNKFYEAFSKNLKLGIHEDSQNRTKIAELPRYHSTKSGDELTSLKDYVTRMKEGQNEIYYITGESKKAVEHSPFLE

SEQ ID NO: 4278 - protein, 335 aa, Zea mays
  Clone ID: PAT_MRT4577_116090C.1.pep
MAGNDNWINSYLDAILDAGKAAIGGDRPSLLLRERGHFSPARYFVEEVITGYDETDLYKTWLRANAMRSPQERNTRLENMTWRIWNLARKKKEFEKEEACRMSKRQPETEKTRADATADMSEDLFEGEKGEDAGDPSVAYGDSTTGSSPKTSSIDKLYIVLISLHGLVRGENMELGRDSDTGGQIKYVVELAKALSSSPGVYRVDLLTRQILAPNFDRSYGEPKELLVSTSGKNYKQEKGENSGAYIIRIPFGPKDKYLAKEHLWPFIQEFVDGALSHIVRMSKAIGEETGRGHPVWPAVIHGHYASAGIAAALLSGALNLPMAFTGHFLGKDKF

SEQ ID NO: 4279 - protein, 229 aa, Zea mays
  Clone ID: PAT_MRT4577_116175C.1.pep
MAWRGPLGAGEEALDSGLELSLGLPAYFARPSGLDAAREEPAEASAYAIQAASGSNVSKARVRPAGAAPVVGWPPVRSFRRNLAASSSRPSSGKHTRQEGSAKDGLFVKINMDGVPIGRKVDLTAYGGYADLSAAVGKLFRGLLAAQRDRAATAGGEEEEEGEGPVIGGDYTLVYEDDEGDRVLAGDVPWEMFVATAKRLRVLKSSDVPASSVTLGAGGPERSAADCCC

SEQ ID NO: 4280 - protein, 195 aa, Zea mays
  unsure (1)..(195): unsure at all Xaa locations
  Clone ID: PAT_MRT4577_116192C.1.pep
LLMLLGLSAXAAAATMLPQCSQAPIASLLPPHLYQRSPXVCENPSLQPYRIQQAIGAWDLTCYHXLMLQQSLTPIXQELPLEHLLAHNIRAQRLQQLVLANLAAYFQTQQILTFNHLAEXNSGSXATLSKLPFSQLSADYPQNLLPFNQLTGLNSPAYLQQQQLLPFMQLAGVSPATFLTQPQSLXFYQHAAPNA

SEQ ID NO: 4281 - protein, 161 aa, Zea mays
  Clone ID: PAT_MRT4577_116302C.1.pep
MAAKIFCLLMLLGLSARAATATIVPLCSQAPIASLLAPYLSPAASWACENPVLQPYRLHQALAAVILPLSPLFLQHSSPLLHLFPLVHLLPHIMTPQLLQRLVLANLAAYSQQLQFLFFNQLGSLYSASYSLHPHLPFSQLPAVYPQQFVSFYHLAALYSP

SEQ ID NO: 4282 - protein, 125 aa, Zea mays
  Clone ID: PAT_MRT4577_116335C.1.pep
AYSQGRQFLPFNQRAALNSAAYLQQQLPFSQLVAAYPQQLLPFNQLAALNFPAYFQQQQLPPFTQLANVSPGAFFTQQQLLSFPSHAGPNGGPLLQLHQLLPFNQLALTNPGGFFQQPIIGGAPF

SEQ ID NO: 4283 - protein, 78 aa, Zea mays
  Clone ID: PAT_MRT4577_116680C.1.pep
FIFFFFYLEKGQFWIWSKLPQVFPCTALLLSAKRHYSFFSSYIYTWTLARAGQPLHIYIHFSPRVPPNTLDLGARGTG

SEQ ID NO: 4284 - protein, 699 aa, Zea mays
  unsure (1)..(699): unsure at all Xaa locations
  Clone ID: PAT_MRT4577_116788C.1.pep
MASETETFAFQAEINQLLSLIINTFYSNKEIFLRELISNSSDALDKIRFESLTDKTKLDAQPELFIHIVPDKANNTLTIIDSGIGMTKSDLVNNLGTIARSGTKEFMEALAAGADVSMIGQFGVGFYSAYLVAERVVVTTKHNDDEQYVWESQAGGSFTVARDTSGEQLGRGTKMTLYLKDDQLEYLEERRLKDLIKKHSEFISYPISLWIEKTTEKEISDDEDEEDKKDEEGKVEDVDDEKEEKEKKKKKIKEVSHEWQLVNKQKPIWMRKPEEITKEEYAAFYKSLTNDWEEHLAVKHFSVEGQLEFKAVLFVPKRAPFDLFDTRKKQNNIKLYVRRVFIMDNCEELIPEWLSFVKGIVDSEDLPLNISRETLQQNKILKVIRKNLVKKCVELFFEIAENKEDYNKFYEAFSKNLKLGIHEDSTNRTKIAELLRYHSTKSGDELTSLKDYVTRMKEGQNDIYYITGESKKAVENSPFLEKLKKKGYEVLFMVDAIDEYSIGQLKEFEGKKLVSATKEGLKLDESEDEKKRKEELKEKFEGLCKVIKEVLGDKVEKVVVSDRVVDSPCCLVTGEYGWTANMERIMKAQALRDSSMSGYMSSKKTMEINPENAIMVXLRKRAEADPNDKSVKDLVMLLFETALLTSGFSLDDPNTFGSRIHRMLKLGLSIDEDEEAPEADTDMPPLEDDAGESKMEEVD

SEQ ID NO: 4285 - protein, 116 aa, Zea mays
  unsure (1)..(116): unsure at all Xaa locations
  Clone ID: PAT_MRT4577_116827C.1.pep
PTRPVKLVLLSLFTVCITFAFQLSCLTANGPVILPAEAITIVVVLGLTFYTFWXAANKGYEFEFLGPFLVSVCLIHMLFXTXRIICVLGKTRTMVXRCIAQLVFSGFMIYXTDNRI

SEQ ID NO: 4286 - protein, 112 aa, Zea mays
  Clone ID: PAT_MRT4577_116932C.1.pep
MLRAFFMASSDHGSTTGPKDVPGSYCLPLEGAVRDRLDFYYFQGHDKYWESPVERYGSTVVRMNLPPGPFMVRDQGEVAVLDAQSFPVLCDMDKADKKDLIAVTYMPSTFLT

SEQ ID NO: 4287 - protein, 746 aa, Zea mays
  Clone ID: PAT_MRT4577_116976C.1.pep
MSGAVLVAIVASIGNLLQGWDNATIAAAVLYIKKEFQLQNEPTVEGLIVSMSLIGATIVTTFSGPLSDSIGRRPMLILSSILYFFSGLIMLWSPNVYVLLLARFVDGFGIGLAVTLVPLYISEIAPSEIRGLLNTLPQFSGSGGMFLSYCMVFGMSLSPSPDWRIMLGVLAIPSLFFFGLTIFYLPESPRWLVSKGRMAEAKKVLQKLRGKDDVSGELSLLLEGLEVGGDTSIEEYIIGPATEAADDLVTDGDKEQITLYGPEEGQSWIARPSKGPSMLGSVLSLASRHGSMVNQSVPLMDPIVTLFGSVHENMPQAGGSMRSTLFPNFGSMFSVTDQHAKNEQWDEENLHRDDEEYASDGAGGDYEDNLHSPLLSRQATGAEGKDIVHHGHRGSALSMRRQSLLGEGGDGVSSTDIGGGWQLAWKWSEKEGENGRKEGGFKRVYLHQEGVPGSRRGSIVSLPGGGDVLEGSEFVHAAALVSQSALFSKGLAEPRMSDAAMVHPSEVAAKGSRWKDLFEPGVRRALLVGVGIQILQQFAGINGVLYYTPQILEQAGVAVILSKFGLSSASASILISSLTTLLMLPCIGFAMLLMDLSGRRFLLLGTIPILIASLVILVVSNLIDLGTLAHALLSTVSVIVYFCCFVMGFGPIPNILCAEIFPTRVRGLCIAICAFTFWIGDIIVTYGSLPVMLNAIGLAGVFSIYAVVCLISFVFVFLKVPETKGMPLEVITEFFAVGAKQAAAKA

SEQ ID NO: 4288 - protein, 120 aa, Zea mays
  unsure (1)..(120): unsure at all Xaa locations
  Clone ID: PAT_MRT4577_11701C.1.pep
CGSRCPLPDVEYRCSAGGLAWATDDHSLHNAFSTYGXALETKIILDRXTHRTHLFGFVTFSTEEAMRNAIEGMNGKEXLDGQNITDNEAHPRRGRGGGGGGYXCGRPGRPYRTGWRLDGG

SEQ ID NO: 4289 - protein, 95 aa, Zea mays
  unsure (1)..(95): unsure at all Xaa locations
  Clone ID: PAT_MRT4577_117083C.1.pep
VYATTADPKNGSLGTIGPIAICFIVGAKVLSAGRFSRGSMNPXARAFCPGVAAGDVGGNWGYWIVPLVFGSLAGLVYVDVFIGCSXQQVSDHDYA

SEQ ID NO: 4290 - protein, 80 aa, Zea mays
  unsure (1)..(80): unsure at all Xaa locations
  Clone ID: PAT_MRT4577_117102C.1.pep
MADKMLALFALQALCASATSATHIPGHLPPVMPXGTMNPCMQYCMMQQGLANLMACTLLMLQRLVSLPLXSKPVMMPQMM

SEQ ID NO: 4291 - protein, 378 aa, Zea mays
  Clone ID: PAT_MRT4577_117128C.1.pep
MAAAHLLAALSSSTALRPPLRLRSPQHPPHIRFNCTGRRPFPVVRAAETDAKNAKANAKAPNKAPAADGSSFNQLLGIKGAKQESDIWKIRLQLTKPVTWPPLVWGVLCGAAASGNFHWTVEDVAKSIVCMIMSGPCLTGYTQTLNDWYDRDIDAINEPYRPIPSGAISENEVITQIWVLLLGGLGLGALLDVWAGHDFPIVFYLAVGGSLLSYIYSAPPLKLKQNGWIGNFALGASYISLPWWAGQALFGTLTPDIIVLTTLYSIAGLGIAIVNDFKSIEGDRTLGLQSLPVAFGMETAKWICVGAIDITQLSVAGYLLSTGKLYYALVLLGLTIPQVFFQFQYFLKDPVKYDVKYQASAQPFFVLGLLVTALATSH

SEQ ID NO: 4292 - protein, 221 aa, Zea mays
  Clone ID: PAT_MRT4577_117130C.1.pep
VYVIPDSLDTDENDSLQVITQIWVLLLGGLGLGALLDVWAGHDFPIVFYLAVGGSLLSYIYSAPPLKLKQNGWIGNFALGASYISLPWWAGQALFGTLTPDIIVLTTLYSIAGLGIAIVNDFKSIEGDRTLGLQSLPVAFGMETAKWICVGAIDITQLSVAGYLLSTGKLYYALVLLGLTIPQVFFQFQYFLKDPVKYDVKYQHWQPAINEGKLKQNEQPF

SEQ ID NO: 4293 - protein, 137 aa, Zea mays
  unsure (1)..(137): unsure at all Xaa locations
  Clone ID: PAT_MRT4577_117161C.1.pep
LSTAQIISARGACEMGLASAHSDEWPRPGLQVGLTNDAAAYCTGLLLGRRVLKTRGLDKEYEGNVEATGEDFCVEPADERRPFRALLDVGLXRTTTGNRVYGALKGAXMDGGLHIPDTEKRHAGFKHDDKQVDADIH

SEQ ID NO: 4294 - protein, 93 aa, Zea mays
  Clone ID: PAT_MRT4577_117310C.1.pep
QHCHLVRGNRSPKQMIIYFKTINTPFKKMQNSKFTLVASTTSKGKRLHDCLKEPRAPKSLKTRALLGCKSILFYKKKFPFGPLRFLHGGANFW

SEQ ID NO: 4295 - protein, 95 aa, Zea mays
  Clone ID: PAT_MRT4577_117382C.1.pep
MATPAVNVYCWAISPFVSRALLALADAGVDYDLVHMNRHDGDHRRPEHLARNPFRNVPVLEDGDFTLFESRAIAKHVLRKHKPALLGGSKLEQTV

SEQ ID NO: 4296 - protein, 441 aa, Zea mays
  Clone ID: PAT_MRT4577_117391C.1.pep
MAGSRFGSFKSEKGDSASAAAAAGGAAQRRDPYEVLGVGRTATDQEIKSAFRRMALKYHPDKNGDDPVASDRFQEVTFSYNILSDPDKRRQYDTSGFDAIESDSQELELDLSSLNTVNTVFAALFSKLGVPIKTTVSATVLEEALNGSVMVSQLQLGNSVQRKVEKQSAHFYSVDITEKQAKMGLVCRVHSNDKSKFKLLYFELEENGGLSLALQEDSVKVGKVTAAGMYFLGFPVYRFEQNNLAAAAKDSDGAFFKRLDSFQPCDIHELKPGTHFFAVYGDNFFKSASYTIEVVCGESFPAEKEMLRNVEAKILTKRAELSKFESEYREVLAKFTEMTSKYTQEMQAIDGLLKERNEIHASYTNNPPLKRSSSRNKAKSPSKVAKTGTEKHHQKEKKVKDHCMEGCGSDSDNSSEKKSKERFPRKKWLNLPFKLDRRKTC

SEQ ID NO: 4297 - protein, 93 aa, Zea mays
  Clone ID: PAT_MRT4577_117490C.1.pep
NSRADPRVHPRVRVSTAFCAEIVESADAYLFAGPIFNDYSSVGYSFLLKKEKAIIVQPERVIVGNGPAFGCVMMKEFLSELAKKVNKNTTAYE

SEQ ID NO: 4298 - protein, 101 aa, Zea mays
  Clone ID: PAT_MRT4577_117564C.1.pep
AVGARVVPPTMKPVGFTAVGPKVVVADTEGSGGGLKEFICWPLPGFGQGYLIYQKNGVTVGFCHRVSVRSTFGLGVGTPVVPFVCSRYETSREKNDPGSRL

SEQ ID NO: 4299 - protein, 343 aa, Zea mays
  unsure (1)..(343): unsure at all Xaa locations
  Clone ID: PAT_MRT4577_117709C.1.pep
MIMMPSETRRFRSTGSSAPPTTVRPSVLPATPIRRPVPSHHTLPPLAAMSPSEPTREESVYMAKLAEQAERYEEMVEFMERVARSAGGAGGGDELSVEERNLLSVAYKNVIGARRASWRIISSIEQKEEGRGNEAHAASIRAYRSKIEAELARICDGILALLDSHLVPSAGGAESKVFYLKMKGDYHRYLAEFKSGAERKDAAESTMNAYKAAQXDHCVHTDRMTVHILLIVVLSCWLLVXDIALADLAPTHPIRLGLALNFSVFYYEILNSPDRACNLAKQAFDEAISELDSLGEESYKDSTLIMQLLRDNLTLWTSDTNEDGGDEIKEAAAAPKESAPEGQ

SEQ ID NO: 4300 - protein, 269 aa, Zea mays
  unsure (1)..(269): unsure at all Xaa locations
  Clone ID: PAT_MRT4577_117710C.1.pep
MSPSEPTREESVYMAKLAEQAERYEEMVEFMERVARYAGGXAGGGEELSVEERNLLSVAYKNVIGARRASWRIISSIEQKEEGRGNEAHAASIRAYRSKIEAELARICDGILALLDSHLVPSAGGAESKVFYLKMKGDYHRYLAEFKSGAERKDAAESTMNAYKAAQDIALADLAPTHPIRLGLALNFSVFYYEILNSPDRACNLAKQAFDEAISELDSLGEESYKDSTLIMQLLRDNLTLWTSDTNEDGGDEIKEAAAAPKESAPEGQ

SEQ ID NO: 4301 - protein, 719 aa, Zea mays
  Clone ID: PAT_MRT4577_117732C.1.pep
MALSTFSVPRGFLGVPAQDSHFASAVELHVNKLLQARPINLKPRRRPACVSASLSSEREAEYYSQRPPTPLLDTINYPVHMKNLSVKELRQLADELRSDVIFHVSKTGGHLGSSLGVVELTVALHYVFNAPQDRILWDVGHQSYPHKILTGRRDKMPTMRQTNGLAGFTKRAESEYDSFGTGHSSTTISAALGMAVGRDLKGGKNNVVAVIGDGAMTAGQAYEAMNNAGYLDSDMIVILNDNKQVSLPTATLDGPVPPVGALSSALSKLQSSRPLRELREVAKGVTKQIGGSVHELAAKVDEYARGMISGPGSSLFEELGLYYIGPVDGHNIDDLITILNDVKSTKTTGPVLIHVVTEKGRGYPYAERAADKYHGVAKFDPATGKQFKSPAKTLSYTNYFAEALIAEAEQDSKIVAIHAAMGGGTGLNYFLRRFPSRCFDVGIAEQHAVTFAAGLACEGLKPFCAIYSSFLQRGYDQVVHDVDLQKLPVRFAMDRAGLVGADGPTHCGAFDVAYMACLPNMVVMAPSDEAELCHMVATAAAIDDRPSCFRYPRGNGVGVPLPPNYKGTPLEVGKGRILLEGDRVALLGYGSAVQYCLTAASLVQRHGLKVTVADARFCKPLDHALIRSLAKSHEVLITVEEGSIGGFGSHVAQFMALDGLLDGKLKWRPLVLPDRYIDHGSPADQLAEAGLTPSHIAASVFNILGQNREALAIMAVPNA

SEQ ID NO: 4302 - protein, 150 aa, Zea mays
  unsure (1)..(150): unsure at all Xaa locations
  Clone ID: PAT_MRT4577_117733C.1.pep
EVGKGRILLEGDRXVALPRDRSAVQYCLTAASLVQRHGLKVTVADARFCKPLDHALIRSLAKSHEVLITVEEGSIGGFGSHVAQFMALDGLLDGKLKWRPLVLPDRYIDHGSPADQLAEAGLTPSHIAASVFNILGQNREALAIMAVPNA

SEQ ID NO: 4303 - protein, 300 aa, Zea mays
  Clone ID: PAT_MRT4577_117774C.1.pep
MGALDLHLDFASAQHGQAKLKEYAKSSLLSDGNYNTDKINGSNPDDYEKFEKGIMHYGCPHYRRRCRIRAPCCNEIFDCRHCHNETKNSIKIDKMKRHELPRHEVQQVVCSLCGTEQEVRQVCINCGVCMGKYFCGLCKLFDDDVSKQQYHCNGCGICRIGGRENFFHCSKCGCCYSIALKNSHACVEGAMHHDCPICFEYLFDSTNDVSVLPCGHTIHVKCLKEMEEHCQFACPLCSKSVCDMSKAWERLDMELATLSDSCDHKMVRILCNDCGAISDVQFHLIAHKCQNCKSYNTRQI

SEQ ID NO: 4304 - protein, 300 aa, Zea mays; identical to SEQ ID NO: 4303
  Clone ID: PAT_MRT4577_117777C.1.pep

SEQ ID NO: 4305 - protein, 318 aa, Zea mays
  Clone ID: PAT_MRT4577_11786C.1.pep
SKEYWDYEALTVQWGEQDNYEVVRKVGRGKYSEVFEGINVNNNEKCIIKILKPVKKKKIKREIKILQNLYGGPNIVKLLDIVRDQHSKTPSLIFEYVNNTDFKVLYPTLTDYDIRYYIYELLKALDYCHSQGIMHRDVKPHNVMIDHELRKLRLIDWGLAEFYHPGKEYNVRVASRYFKGPELLVDLQDYDYSLDMWSLGCMFAGMIFRKEPFFYGHDNHDQLVKIAKVLGTDGLNVYLNKYRIELDPQLEALVGRHSRKPWTKFINADNQHLVSHEAIDFLDKLLRYDHQDRLTAREAMTHPYFQQVRAAENSRTRA

SEQ ID NO: 4306 - protein, 332 aa, Zea mays
  Clone ID: PAT_MRT4577_11789C.1.pep
MSKARVYTDVNVLRPKEYWDYEALTVQWGEQDNYEVVRKVGRGKYSEVFEGINVNNNEKCIIKILKPVKKKKIKREIKILQNLYGGPNIVKLLDIVRDQHSKTPSLIFEYVNNTDFKVLYPTLTDYDIRYYIYELLKALDYCHSQGIMHRDVKPHNVMIDHELRKLRLIDWGLAEFYHPGKEYNVRVASRYFKGPELLVDLQDYDYSLDMWSLGCMFAGMIFRKEPFFYGHDNHDQLVKIAKVLGTDGLNVYLNKYRIELDPQLEALVGRHSRKPWTKFINADNQHLVSHEAIDFLDKLLRYDHQDRLTAREAMTHPYFQQVRAAENSRTRA

SEQ ID NO: 4307 - protein, 94 aa, Zea mays
  Clone ID: PAT_MRT4577_117985C.1.pep
RIAAPPAVWIVLETPVTAMMTCASGAVTSHGYTSSTHYTFPLRTATPMLSSSCRTCSLMAPRMSVCRSRLSDDRGALEDGMAVAAVNTTHFRVL

SEQ ID NO: 4308 - protein, 278 aa, Zea mays
  Clone ID: PAT_MRT4577_118142C.1.pep
MTMATKAACVLAVWVLVASGLCDLGSARAPLGSKPQREFDYFALSLQWPGTICASTRHCCATNGCCRSEPLQTFTIHGLWPDYDDGTWPSCCRRTQFEMDKILPLKEVLDKYWPSLYCSKSGTCFSGKGLFWAHEWEKHGTCSAPVVQDELQYFTLALDLYSKYNVTEMLSSGGIQVSNGKEYALSDVIDTIKHAFGGSPQIVCKRGSIEELRLCFDKELKPRDCLTTSLANGSVSKSKHCPRYITLPTYDPLVLANSTVEIMTQFDEFEVPAALYTA

SEQ ID NO: 4309 - protein, 66 aa, Zea mays
  unsure (1)..(66): unsure at all Xaa locations
  Clone ID: PAT_MRT4577_118357C.1.pep
MASATVLKSSFLPKKSEWGATXHAAAPRPTTVSMVARACVYADELEKTAKTIASSSRGILAMDESN

SEQ ID NO: 4310 - protein, 459 aa, Zea mays
  Clone ID: PAT_MRT4577_118397C.1.pep
WVPRAGPEAHIYTRGGGQIHLGIHVIYIHARWAAPAAVARASWRARCWARRRRASLGNTGIQVFAYGLMLGMGSAVETLCGQAYGAHKYDMLGIYLQRSTVLLMATGVPLAALYAFSRPVLLLLGESPEIASAAAVFVYGLVPQIFAYAANFPIQKFMQAQSIMGPSAYISAAALAAHLALSYLVVYRLGLGLLGASLTLSASWWAIVAAQFAYIVTSSRCRLTWRGFSWQAFSGLPSFFRLSLASAVMLCLETWYFQILVLIAGLLKDPELALASLSVCMTISGWVFMISVGFNAAASVRVSNELGAGNPRAAAFSVVVVTLLSFVLSVIISVVILLCRDYISYIFTEGDDVSRAVAQLSPLLAVTLILNGIQPVLSGVAVGCGWQALVAYVNVGCYYIVGIPLGCLLGFYFDLGAAGIWSGMIGGTLMQTMILVWVTFRTNWNKEIRKLMQGCNSVS

SEQ ID NO: 4311 - protein, 126 aa, Zea mays
  unsure (1)..(126): unsure at all Xaa locations
  Clone ID: PAT_MRT4577_118552C.1.pep
DPHLLDMRDMLIGPYNPGAVLTGGTRVVLSLDTQVEEHARVKTLIMDLLHRSVRTCSADFRASVGAMLDAEDADFXRTTAXKKPSASYLLPLHQCMFXRLLCKAFVGANPFTDWLVDNFRFTILDI

SEQ ID NO: 4312 - protein, 267 aa, Zea mays
  Clone ID: PAT_MRT4577_118564C.1.pep
MDPKMTEVTQMFARFKAAYARNDLNTCVTLLSQLKVHLTQFPSLPPLFQQTPNIVEELKLARDIYEHAVVLSVKLEDQDAFERDFCQLKPYYMDTCGIIPASPEEYPILGLNLLRLLVQNRIAEFHTELELLPAKALEHPCIKHAVELEQSFMEGAYNRVLSARQAVPHETYVYFIDLLAKTVRGEIAGCSEKGYDSLSVSDAKQMLMFSSDQDLHEYITEEHPEWEIKNGAVFFQKAKESQPCKEIPSLQLINQTLSYARELERIV

SEQ ID NO: 4313 - protein, 270 aa, Zea mays
  unsure (1)..(270): unsure at all Xaa locations
  Clone ID: PAT_MRT4577_118567C.1.pep
MDPKMTEVTQMFARFKAAYTRNDLDACVTLLSQLKVHLTKFPSLPPSFEQTPKAVEELKLARDIYEHAVVLSVKLEDQDAFERDFCQLKPYYMDTCGIIPPSPEEYPILGLNLLRLLVQNRIAEFHTELELLPVKALEHPCIKHAVELEQSFMEGAYNRVLSARQAVPHETYVYFMDLLAKTVRDEIAGCSEKGYDSLSVSDAKQMLMFSSDQDLHEYITEEHPEWELXELKNGAVFFQKAKESQPYKEIPSLQLINQTLSYARELERIV

SEQ ID NO: 4314 - protein, 54 aa, Zea mays
  unsure (1)..(54): unsure at all Xaa locations
  Clone ID: PAT_MRT4577_118732C.1.pep
HRYLAEFKSGAXRKDASGRTLNAYKAXQDIALADLASTHPIRLGLALNCSIFYY

SEQ ID NO: 4315 - protein, 86 aa, Zea mays
  unsure (1)..(86): unsure at all Xaa locations
  Clone ID: PAT_MRT4577_118915C.1.pep
MDKDRKKAPVSRSSRAGLQFPVGRIHRQLKSRASAHGRVGATAAVYSAAILEYLTAEVLXLTDNSSKDLRGKLITPRHLCLGIHDY

SEQ ID NO: 4316 - protein, 48 aa, Zea mays
  Clone ID: PAT_MRT4577_119034C.1.pep
GGGHRDDGDGNDGDDDYGDGGGNGGGGDGYGGGNRGGGYGNSDGNWRN

SEQ ID NO: 4317 - protein, 71 aa, Zea mays
  unsure (1)..(71): unsure at all Xaa locations
  Clone ID: PAT_MRT4577_11925C.1.pep
SQADFGRLDIDLAFVEMPGLGGCLAEFGPSNPFVGARILGSIYMXTIQTXAVLIETFTPLGAEVRWCXSCN

SEQ ID NO: 4318 - protein, 42 aa, Zea mays
  Clone ID: PAT_MRT4577_119501C.1.pep
VTFLHITYSLLPLAASSPVASTAALFLASDGSSTIGSVSTTT

SEQ ID NO: 4319 - protein, 75 aa, Zea mays
  Clone ID: PAT_MRT4577_119533C.1.pep
SPVFGFVVGRIDISASYVEYRCFVVSVSWTTDDHSLQNAFINYCDVLEFKIIRDLETQMSRGFVFVTFSTEDAML

SEQ ID NO: 4320 - protein, 448 aa, Zea mays
  Clone ID: PAT_MRT4577_119594C.1.pep
MPFRSIVRDVRDGFGSLSRRGFEVRFLSHRRGKSHGAVHELHDPVLVVQSSCWASLPPELLRDVIERLETSEDTWPSRKHVVACAAVCRTWREMCREIVKSPEFSGKITFPVSLKQPGPRDGTIQCFIKRDKSTQIYSLYLSFSSAVPVENGKFLLSAKRNCRATYTEYIISINSGDTSRCTSNNTYIGKLRSNFLGTKFVIYDTHPPYNGTSQTVAGKTSQRFYSKKGSTKVSCRWYSIAQISYELNVLGTRGPRRMNCVMHSIPASCLEAGGSVPCQPDSIAAHSVGGSFSSVSLSKSSTMDHSMHFTSSRLSDAITGDGIVNRGQALNDADDEECKDMPLILRNKAPRWHEQLQCWCLNFRGRVTVASVKNFQLVAATQPAAGALTPSQAAPQPAPPPPPDQEKVILQFGKVGKDIFTMDYCYPLSAFQAFAICLSSFDTKLACE

SEQ ID NO: 4321 - protein, 213 aa, Zea mays
  unsure (1)..(213): unsure at all Xaa locations
  Clone ID: PAT_MRT4577_119602C.1.pep
PRVRPRVRSDGLSDKLNLLLRPYQLALSSXRHKHCSKAVLYHLEAIMNQVMFQDFENPAFQRNGSPRCLDPAEDSRQSFAAFVALRNLSWNEVLRKGTKYYSEDFSRFCDRKMSVVVATLAWSRPWPEQLLQCFFVAAKCVWLLHLLAFSFGPPLTILRVQDGRAFDELYMEDILHDRQPVQSPCQVKIMVTPGFYVQDRVLKCRVLKTRSAA

SEQ ID NO: 4322 - protein, 98 aa, Zea mays
  unsure (1)..(98): unsure at all Xaa locations
  Clone ID: PAT_MRT4577_119628C.1.pep
MEAKXGRGSSSRRSMMYEAPLGYSIEDVRPAGGVKKFQSVAYSNCAKRGGWYPFWLPHSSRLGFLFWPFDSDQSLWPAASCCSSRSPVLAPCAPSSVS

SEQ ID NO: 4323 - protein, 126 aa, Zea mays
  Clone ID: PAT_MRT4577_119804C.1.pep
HACVHACAHACDHAYGRGSRGFCFGTFSTEEATRNAIKGMNGKELDGRNITDNEAQSHSSRGGGGRGYSGGRGGCGYCGSGRRDGGGRYGGGGRYGGRRRYGGGGGGYGTSNRRGCYSNCDGNWKN

SEQ ID NO: 4324 - protein, 535 aa, Zea mays
  Clone ID: PAT_MRT4577_119841C.1.pep
PRVRPRVRPRVREVDVEVPTDEDETSEEEDSTPETTEEETEEDEDEEKEKKPKTKTIKETTSEWELLNDMKAVWLRSPKEVTDEEYSKFYHSLAKDFGDDKPMGWSHFTAEGDVEFKALLFIPPKAPHDLYESYYNSNKSNLKLYVRRVFISDEFDDLLPKYLSFLRGIVDSDTLPLNVSREMLQQHSSLKTIKKKLIRKALDMIRKLAEEDPDEYSNKDKTDEEKNEMEEKKGQYAKFWNEFGKSIKLGIIEDATNRNRLAKLLRFESTKSDGKLASLDEYISRMKPGQKDIFYLTGSSKDQLEKSPFLERLTKKNYEVIFFTDPMDEYLMQYLMDYEDRKFQNVSKEGLKLGKDSRLKDLKESFKELTEWWKKALESESVDSVKVSSRLHDTPCVVVTSKYGWSANMEKIMQAQTLSDSSKQAYMRGKRVLEINPRHPIIKELRDKVAQDNESEELKQTARLVYQTALMESGFNLPDPKEFASSIYKSVHKSLDLSPDAAVEEEDEAEEQPEVEEKEPAAKEGSEPSFDKDEL

SEQ ID NO: 4325 - protein, 809 aa, Zea mays
  Clone ID: PAT_MRT4577_119850C.1.pep
MRKWALSSALLLLLFLLTTLPDPAKKLQVNAEESSDDLANPPKVEEKLGAVPHGLSTDSEVAQREAESISRKTLRSSAEKFEFQAEVSRLMDIIINSLYSNKDIFLRELISNASDALDKIRFLSLTDKEVLGEGDTAKLEIQIKLDKEKKILSIRDRGIGMTKEDLINNLGTIAKSGTSAFVEKMQSGGDLNLIGQFGVGFYSVYLVADYVEVVSKHNDDKQYVWESKADGSFAISEDTWNEPLGRGTEIRLHLRDEAKEYLEEDKLKDLVKKYSEFINFPIYLWSTKEVDVEVPTDEDETSEEEDSTPETTEEETEEDEEKEKKPKTKTIKETTSEWELLNDVKAVWLRSPKEVTDEEYSKFYHSLAKDFGDDKPMGWSHFTAEGDVEFKALLFIPPKAPHDLYESYYNSNKSNLKLYVRRVFISDEFDDLLPKYLSFLKGIVDSDTLPLNVSREMLQQHSSLKTIKKKLIRKALDMIRKLAEEDPDEYSNKDKTDEEKSEMEEKKGQYAKFWNEFGKSIKLGIIEDATNRNRLAKLLRFESTKSDGKLASLDEYISRMKSGQKDIFYITGSSKEQLEKSPFLERLTKKNYEVIFFTDPVDEYLMQYLMDYEDKKFQNVSKEGLKLGKDSKLKELKESFKELTDWWKKALESENVDSVKISNRLHDTPCVVVTSKYGWSANMEKIMQAQTLSDSSKQAYMRGKRVLEINPRHPIIKELRDKVAQDNESEELKQTARLVYQTALMESGFNLPDPKEFASSIYKSVHKSLDLSPDAAVEEEDEAEEQPEVEEKEPAAKEGSEPSFDKDEL

SEQ ID NO: 4326 - protein, 181 aa, Zea mays
  unsure (1)..(181): unsure at all Xaa locations
  Clone ID: PAT_MRT4577_119851C.1.pep
MDSRLKDLNXFFKELTEWWKKALESESVDSVKVSSRLHDTPCVVVTSKYGWSANMEKIMQAQTLSDSSKQAYMRGKRVLEINPRHPIIKELRDKVAQDNESEELKQTARLVYQTALMESGFNLPDPKEFASSIYKSVHKSLDLSPDAAVEEEDEAEEQPEVEEKEPAAKEGSEPSFDKDEL

SEQ ID NO: 4327 - protein, 391 aa, Zea mays
  Clone ID: PAT_MRT4577_119950C.1.pep
MVQIPKVSRLRGFGLLLQTPGMAAGAGGGELEALEGVRSIVLKPSESLDESRFTRIAGADFNDPAIGLQGLLASLASTGFQASNLGDAIDVVNQMLDWRLSHEKPSEDCDEAELDPKYRASVKCKIFLGFTSNLVSSGIRDIIRFLAQHHMVDVIVTSAGGIEEDLIKCLAPTYRGDFSLPGALLRSKGLNRIGNLLVPNDNYCKFENWIMPLFDQMLQEQSTENVWTPSKVIARLGKEINDESSYLYWAYKNNIPVYCPALTDGSLGDMLFCHAVRNPGLIIDIVQDIRLMNGEAIHATPRKTGIIVLGGGLPKHHICNANMFRNGADYAVYINTAQEFDGSDSGAHPDEAVSWGKIKGSAKPVKVHCDASIAFPLLVAATFARKVHNSK

SEQ ID NO: 4328 - protein, 292 aa, Zea mays
  Clone ID: PAT_MRT4577_119971C.1.pep
MAIATESRGSEDRASAHANEEKRWVLSDFEVGKPLGRGKFGHVYLAREKRSNQIVALKVLFKSQLKQSQVEHQLRREVEIQSHLRHPNILRLYGYFYDQTRVYLILEYAAKGELYKELTRCKHFSERRSATYIASLARALIYLHGKHVIHRDIKPENLLVGAQGEIKIADFGWSVHTFNRRRTMCGTLDYLPPEMVEKTEHDYHVDIWSLGILCYEFLYGVPPFEAKEHSETYRRIVKVDLKFPLKPFVSPAAKDLISQMLVKNSAQRLPLHKVLEHPWIVQNADPSGVCRG

SEQ ID NO: 4329 - protein, 296 aa, Zea mays
  Clone ID: PAT_MRT4577_119972C.1.pep
MAVATESRGSEDRASAHANQEKRWVLSDFEVGKPLGRGKFGHVYLAREKRSSEIVALKVLFKSQLKQSQVEHQLRREVEIQSHLRHPNILRLYGYFYDQTRVYLILEYAAKGELYKELTRCKHFSERRTATYVASLARALIYLHGKHVIHRDIKPENLLVGVQGEIKIADFGWSVHTFNRRRTMCGTLDYLPPEMVEKAEHDYHVDIWSLGVLCYEFLYGVPPFEAKEHSETYRRIVKVDLKFPLKPFVSPAAKDLISQMLVKSSAQRLPLHKVLEHPWIVQNADPSGVYREGRSI

SEQ ID NO: 4330 - protein, 96 aa, Zea mays
  unsure (1)..(96): unsure at all Xaa locations
  Clone ID: PAT_MRT4577_120168C.1.pep
PAESSVCENPILQPYRVQQAITGGIAPISPLFLQHSSALLHLLPLVHLLAQNMRAQQLQQLVLANXLAAYSQQPRILTFNLLAALNSGSYLQHQQL

SEQ ID NO: 4331 - protein, 166 aa, Zea mays
  unsure (1)..(166): unsure at all Xaa locations
  Clone ID: PAT_MRT4577_120187C.1.pep
VENRFCLSHGRGLRALSRXQIDSVLDLARCTIVSELSNKDFDSYVLSESSLFIYPLKIVIKTCGTTKLLLTIPRILELAEELSMPLAAVKYSRGTFIFPGAQPAPHRSFSEEVAALNRYFGGLKSGGNAYVIGDPARPGQKWHVFYATEYPEQPMVNLEMCMTGLD

SEQ ID NO: 4332 - protein, 127 aa, Zea mays
  unsure (1)..(127): unsure at all Xaa locations
  Clone ID: PAT_MRT4577_120189C.1.pep
MAVLSAADASPVSAIGFEGYEKRLEITFSEAPVFVDPHGXXGLRALSRAQIDSVLDLARCTIVSELSNKDFDSYVLSESSLFIYPLKIVIKTCGTAKLLLTIPRILELAEELSMPLAAVKYSRGTFI

SEQ ID NO: 4333 - protein, 370 aa, Zea mays
  unsure (1)..(370): unsure at all Xaa locations
  Clone ID: PAT_MRT4577_120192C.1.pep
MAVLSAADAPPASAIGFEGYEKRLEITFSEAPVFVDPHGSGLRALSRSQIDSVLDLARKIVIKTCGTTKLLLTIPRXILELAEELSMPLAAVKYSRGTFIFPGAQPAPHRSFSEEVAVLNRYFGGLKSGGNAYVIGDAARPGQKWHIYYATEYPEQPMVNLEMCMTGLDTKKASVFFKTNADGNTTCAKEMTKLSGISEIIPEMEICDFDFEPCGYSMNAIHGSAFSTIHVTPEDGFSYASYEVMGLDATALSYGDLVKRVLGCFGPSEFSVAVTIFGGRCQSGTWGKELGAEAYDCNNMVEQELPGGGLLIYQSFCAAEDAVASSPKSVLRCFDGENASPFVKDCKLANLVCLEEXLDAIEERXGVLDE

SEQ ID NO: 4334 - protein, 447 aa, Zea mays
  unsure (1)..(447): unsure at all Xaa locations
  Clone ID: PAT_MRT4577_120193C.1.pep
MAVLSAAGAPPASAIGFEGYEKRLEITFSEAPVFVDPHGSGLRALSRSQIDSVLDLARCTIVSELSNKDFDSYVLSESSLFIYPLKIVIKTCGTTKLLLTIPRILELAEELSMPLAAVKYSRGTFIFPGAQPAPHRSFSEEVAVLNRYFGGLKSGGNAYVIGDAARPGQKWHIYYATEYPEQPMVNLEMCMTGLDTKKASVFFKTNADGNTTCAKEMTKLSGISEIIPEMEICDFDFEPCGYSMNAIHGSAFSTIHVTPEDGFSYASYEVMGLDATALSYGDLVKRVLGCFGPSEFSVAVTIFGGRGQAGTWGKELGAEAYDCNNMVEQELPGGGILIYQSFCAAEDAVASSPKSVLRCFDGENAAPFAKDCKLANLVCLEEXLDAIEEKDGVLDMSKTGFWCRFASEFFFLFISLRSRGCRLVSSQARLLVRRMSSINMCSYVATC

SEQ ID NO: 4335 - protein, 224 aa, Zea mays
  unsure (1)..(224): unsure at all Xaa locations
  Clone ID: PAT_MRT4577_120194C.1.pep
MESKGGKKSSSSRSMMYEAPLGYSIEDVRPAGGVKKFQSAAYSNCXRSHPDIPFGFLILVVXISFLTLXLTNLSDLLLPDNRPVPQSCSLHSSLLHLQHXSDSPAPMAVLSAADASPVSAIGFEGYEKRLEITFSEAPVFXDPHGRGVLRALXRAKIDSVLDLARGTIVSELSXKDFDSYVLSESSLVIYPLKIVIMTCGTTMLLLTIPRILSLLKXLSMPLLL

SEQ ID NO: 4336 - protein, 86 aa, Zea mays
  Clone ID: PAT_MRT4577_120207C.1.pep
PLDHERIKSHWPGAKALGEMQEHNFRKNRPDGSFHFSPPRGGWIQEEQIPMAFATLLVFVSNSWSLPFGPVYPPDQKSRFGVSPVL

SEQ ID NO: 4337 - protein, 242 aa, Zea mays
  Clone ID: PAT_MRT4577_120229C.1.pep
MTVPDAESRFHVLAVDDSLVDRKLIEMLLKTSSYQVTTVDSGSKALELLGLRDASSPSPSSPDHQEIDVNLIITDYCMPGMTGYDLLKRVKGSSSLKDIPVVIMSSENVPARISRCLQDGAEEFFLKPVKLADMKKLKSHLLKRKQPKEAQAQAQAQAQQGQAVELEPEQQLDPRTQPAHDAEETAAEPPPAASNGTTDGGNKRKAAAMEEEGMLAVMTVAAPESSTKPRLSTTTSSLAVET

SEQ ID NO: 4338 - protein, 238 aa, Zea mays
  Clone ID: PAT_MRT4577_120230C.1.pep
MTVPDAESRFHVLAVDDSLVDRKLIEMLLKTSSYQVTTVDSGSKALELLGLRDASSPSPSSPDHQEIDVNLIITDYCMPGMTGYDLLKRVKGSSSLKDIPVVIMSSENVPARISRCLQDGAEEFFLKPVKLADMKKLKSHLLKRKQPKEAQAQAQQGQAVELEPEQQLDPRAQPAHDAEETAAEPPPAASNGTADGGNKRKAAAMEEEGMLAVMTVAAPESSTKPRLSTTSNSLAVET

SEQ ID NO: 4339 - protein, 318 aa, Zea mays
  Clone ID: PAT_MRT4577_120420C.1.pep
MCIEVLADFDTRPFLKQLNVLGRYEPIKRNVYCTKRYIEDYGISCHCKPSPGSSVVCGRDCYCSMLFSCCSSQCECDIACTNKSFQHRPLTKTKLIKTEKCGHGLVAEDEIKKGEFVIEYVGEVIDDRTCENRLWTMKRLDDTDFYLCEVSSNMVIDATNKGNLSRFINHSCEPNTAMQKWTVDGETRVGIFALRDIKIGEELTYDYNIMYRFVQFGAAQVCHCGSSNCRKMLGTTKYSGSSQNHHAKKKKRKTSCENCIQQFLRLWHPHKKMYVGCWIIDFDQETKMHTLKFNDLHTEKFNLKEEEWHFLEVDFDED

SEQ ID NO: 4340 - protein, 342 aa, Zea mays
  Clone ID: PAT_MRT4577_120422C.1.pep
MVRMSSSSSASGVNLTEQIENVFDQLISKIEQADPDFDPRPFLKQLNVLGRYEPIKRNVYFTKRYIEDYGISCHCKPSPGSSVVCGRDCYCSMLFSCCSSQCECDIACTNKSFQHRPLTKTKLIKTEKCGHGLVAEDEIKKGEFVIEYVGEVIDDRTCENRLWTMKRLDDTDFYLCEVSSNMVIDATNKGNLSRFINHSCEPNTAMQKWTVDGETRVGIFALRDIKIGEELTYDYKFVQFGAAQVCHCGSSKCRKMLGTTKYSGSSQNHRTKKKKRKTSCENCIQQFLRLWHPRQKMYVGCWIVDFDQGTKMHTLQFIDHHTEKFDLKEEEWHFLEVDSDED

SEQ ID NO: 4341 - protein, 162 aa, Zea mays
  Clone ID: PAT_MRT4577_120660C.1.pep
MSAAEGAVVFSEEKEALVLKSWAIMKKDSANLGLRFFLKIFEIAPSARQMFPFLRDSDVPLETNPKLKTHAVSVFVMTCEAAAQLRKAGKITVRETTLKRLGGTHLKYGVADGHFEVTRFALLETIKEALPADMWGPEMRNAWGEAYDQLVAAIKQEMKPSE

SEQ ID NO: 4342 - protein, 169 aa, Zea mays
  unsure (1)..(169): unsure at all Xaa locations
  Clone ID: PAT_MRT4577_120664C.1.pep
MALAEADDGAVVFGEEQEALVLKSWAVMKKDAANLGLRFFLXKVFEXXAPSAXXQCXSFLRXSDVPLXEKNPKLKTHAMSVFVMTCEAAAQLRKAGKVTVRETTLKRLGATHLRYGVADGHFEVTGFALLETIKEALPADMWSLEMKKAWAEAYSQLVAAIKREMKPDA

SEQ ID NO: 4343 - protein, 162 aa, Zea mays; identical to SEQ ID NO: 4341
  Clone ID: PAT_MRT4577_120666C.1.pep

SEQ ID NO: 4344 - protein, 126 aa, Zea mays
  unsure (1)..(126): unsure at all Xaa locations
  Clone ID: PAT_MRT4577_120668C.1.pep
MAARSSSQQLAAAADLAAALLLLAARAETTSAAESCREVTATVAPCLGXQRAARRSPPRACCXGLRSLNSRASSTARTYFTCNCLNSMTGRISGGDSMTNAANIPGKCGGSVSATISPTDNCTKIN

SEQ ID NO: 4345 - protein, 107 aa, Zea mays
  unsure (1)..(107): unsure at all Xaa locations
  Clone ID: PAT_MRT4577_120776C.1.pep
MAAKIFCLLMLLAVSASAATATIFPXCSQAPIASLLPSYLSPAMSSACENPILQPYRIQQAIAPGILPLYPLYVQQSSAILQQHTLXYLLQQNIGSPQIPPLVLANP

SEQ ID NO: 4346 - protein, 140 aa, Zea mays
  unsure (1)..(140): unsure at all Xaa locations
  Clone ID: PAT_MRT4577_120809C.1.pep
YACGEMAPTLGLVGPTSLVPMIETAIGIVDSTGGXSHVLVIXVADGQVTLRVVAQYGQWTPQEPDTIGAVARASQFPLAIDFVGVGDGPWDMMHQVEDNIPVRSFHSFQXVNLTEINDESFTTDRKEAEFALSALVEMPS

SEQ ID NO: 4347 - protein, 104 aa, Zea mays
  unsure (1)..(104): unsure at all Xaa locations
  Clone ID: PAT_MRT4577_12083C.1.pep
GSPAFGFEGERIEMEKTDGEYRXFIGGLCWAKXDHSLQNAFMTYFEGLKSEIILDRXTHRYRGFGFDTFSTEEAMXNAIECMNSEEMYGRNITDNEVQSRGDRG

SEQ ID NO: 4348 - protein, 178 aa, Zea mays
  unsure (1)..(178): unsure at all Xaa locations
  Clone ID: PAT_MRT4577_120886C.1.pep
GSTSCARDMTPLSGVSDIIPTMGICESDCAPCGYFMNAIHGSAFSTVHATPDDGYNYASDEVVGLDATGLTYGDLVXRALECFGPLDYFDAGTIFCVRGLAGTWGKALGAXDYDCNNMVEQELPVCGLLQNHIFCAAENAVATFSKSDVHCFDRENVESAPTAMKKDYTVPNLLCWEE

SEQ ID NO: 4349 - protein, 45 aa, Zea mays
  unsure (1)..(45): unsure at all Xaa locations
  Clone ID: PAT_MRT4577_120955C.1.pep
AASRRGQPARRRRRRRRCYGSGTASSSRNPPLSQGHQQRSGHPLX

SEQ ID NO: 4350 - protein, 53 aa, Zea mays
  Clone ID: PAT_MRT4577_121027C.1.pep
TVNQQHSSLIHTTSKVTHMPTSMGGLVLDLTTVFSPSQCRACPPRGGLPPTAL

SEQ ID NO: 4351 - protein, 355 aa, Zea mays
  Clone ID: PAT_MRT4577_121045C.1.pep
MVGTAEGGAERAVRRWVDAAGGRLVLDGGLATELEANGADLNDPLWSAKCLLSSPHLIRKVHMDYLEAGANIIITASYQATIQGFESKGFSKEQSENLLTKSVQIALEAREMFLKEHLEKSTPIQHPILVAAALGSYGAYLADGSEYSGDYGEAGTKEFLKDFHRRRLQVLAEAGPDLIAFETIPNKLEAQAYVELLEECNINIPSWLSFNSKDGVHVVSGDSLIECATIADKCAKVGAVGINCTPPRFIHGLILSIRKVTDKPILIYPNSGERYDGEKKEWVESTGVSDGDFVSYVNEWCKDGAALIGGCCRTTPNTIRAIHRTLNQGCHKHQLPVGCSIDLCSTPDALLPAVP

SEQ ID NO: 4352 - protein, 521 aa, Zea mays
  unsure (1)..(521): unsure at all Xaa locations
  Clone ID: PAT_MRT4577_121053C.1.pep
MPGAVIVHHHTRYKTYPGEVTGIAIFSCFIASVAGCIFGYDIGLTSGLTSTEPFLVKFFPSIYEEMKRQVVVNQYCKFDSQVLTLFSSSLFLAATVATFFAGPMTRAFGRKWTLFAAASAYVVGACIGGVSVNFPMLLTGRVLVGSGVGISIQAAPLYISEVAPAQQRGMLNILFQLMITVGILTANMTNYLASKVSGGWGWRTPVTFGAIPAAVIALGALAIPDTPASLVERGDTATARKTLSQIRGVGDVREEFDDLAAASEDAKAVQCPWRXLLRRXKYKPQLTFALLIPFFQQLTGINVIMFYAPVLFKTVGFKQNATLVSSVITGLVNVFSTFVAIATADKIGRRALFLQGGTQMIISQILVGTFIGLQFGMSGTGDISEQYAMCIVLFVCVYVAGFAWSWGPMGWLVPSEIYPLAVRSAAMSVTVAVNMFFTAFIGQIFLTLLCHLRFGLFYFFGAWVLLMTLFIAMLLPETKSVPVEEMAHVWKKHWFWRKFVIDTGNDARNAEMRKRIALEMS

SEQ ID NO: 4353 - protein, 119 aa, Zea mays
  unsure (1)..(119): unsure at all Xaa locations
  Clone ID: PAT_MRT4577_121091C.1.pep
LAAAYHQQFIPFSHLKALSFPAYLQQQHMLPFSQLDGVSLAAFLTQPQXLPFYQHAAPNAGTLLQVQQLLPFSQLALTNPTVLYQQPIIGGAFFRFLMSYSSNNKVFVFDVCGFPEIRK

SEQ ID NO: 4354 - protein, 145 aa, Zea mays
  unsure (1)..(145): unsure at all Xaa locations
  Clone ID: PAT_MRT4577_121092C.1.pep
LAQIIKAHVLHQLVLAGLAAYFQEHQFLPFXQLAALIYASYLHHRQMPLTXLAAAYXQQFLPFSHLKALGSPAYLQHQQLLPFSQLVGVSLAAFLTHPQLLPFYQHAAPNAGTLLQLQQLLPFSQLALANPTVLYQQPIIGGAFF

SEQ ID NO: 4355 - protein, 619 aa, Zea mays
  Clone ID: PAT_MRT4577_121097C.1.pep
MPKHYRPAGKKKEGNAAKYITRTKAVNYLQVSLAIFRKLCILKGVFPRQPKKKVEGNHKTYYHTKDIAFLAHDPLIEKFREIKVHRRKVKKAVAKKNRDLADRLLNRPPTYKLDRLVLERYPTFVDALRDLDDCLTMVHLFAALPAVDGERVEVKRIHNCRRLSHEWQAYISRTHSLRKTFISVKGIYYQAEVQGQKITWLTPHALQQVLTDDVDFNVMLSFLEFYETLLGFVNFKLYHSINVNYPPILDPRLEALAAELYALCRYMSAGSRRMIGNSQTDEVMEDKDEKSKAEEVIKEEKVVKNKASSKADESELRLAQLQHQLPTNEPGALMNLVEESTADDADDDDTKDCKGLFKNLKFYLSREVPRESLLFIIPAFGGTVSWEGEGAPFKEIDEDITHQIVDRPTQSHVFLSRDYVQPQWVFDCVNARIILPTEGYLVGRVPPPHLSPFVDNDAEGYMPEYAETIKRLQAAARNEVLPLPGIGDEDLDNSLVAAMMDRTASNEAAEKKRKLEMLEKQYIDELKKEIDGVAFSSLSNKEADKSPNAKDDTQSDREEDASKQEEDDDDDIGTALMSRKQRGLYKAMKMGKEKKKEKVELLKKRKKNADSGASSKKRH

SEQ ID NO: 4356 - protein, 45 aa, Zea mays
  Clone ID: PAT_MRT4577_121167C.1.pep
PFPPHPSTFAFLRWNSRALGIKESFGYILRLNLFYLFCKSNDTYI

SEQ ID NO: 4357 - protein, 86 aa, Zea mays
  Clone ID: PAT_MRT4577_121283C.1.pep
ALRAIPTGTWGGAQEALSLVGTMGGHNREVTAIATPIDNSPFIGSSSRDKSVLVGDATNWVHFTPESGATADYGVPFRRLTGHSHF

SEQ ID NO: 4358 - protein, 90 aa, Zea mays
  unsure (1)..(90): unsure at all Xaa locations
  Clone ID: PAT_MRT4577_121297C.1.pep
MAAADVEYHXLVSGLAWATSNEXMENAFIFYGEILDCKVMTNRETGRYGGIRFITLLFKNYMLDAIDNKNCMELDCRNITVDTTQSPCSC

SEQ ID NO: 4359 - protein, 89 aa, Zea mays
  Clone ID: PAT_MRT4577_121344C.1.pep
QLQLASVFFTFHLGTKTHYYGRTILHGGAKYRATGRGFVVRHAKFAENYRMYSRSHFVKALELLILLVVYLAYGSSYRSSSLYLYVTVS

SEQ ID NO: 4360 - protein, 77 aa, Zea mays
  Clone ID: PAT_MRT4577_121449C.1.pep
TNSSNIFWVRILINLSATATTPTIFPQCSQAPITTLLPPILSPSSSSICQNPILQPYSIHQPIATHILPLSPLLLQQ

SEQ ID NO: 4361 - protein, 161 aa, Zea mays
  Clone ID: PAT_MRT4577_121699C.1.pep
MTSSSSPSRKALSKIACNRLQKELAEWQQNPPAGFKHKVSDNLQRWVIEVTGAAGTLYAGEAYQLQVDFPEHYPMEAPQVIFLNPAPMHPHIYSNGHICLDILYDSWSPAMTVSSVCISILSMLSSSPAKQRPADNDRYVRNCRNGRSPKETRWWFHDDTV

SEQ ID NO: 4362 - protein, 161 aa, Zea mays
  Clone ID: PAT_MRT4577_121701C.1.pep
MTSSSSPSRKALSKIACNRLQKELAEWQQNPPAGFKHKVSDNLQRWVIEVTGAAGTLYAGETYQLQVDFPEHYPMEAPQVIFLNPAPMHPHIYSNGHICLDILYDSWSPAMTVSSVCISILSMLSSSPAKQRPVDNDRYVRNCRNGRSPKETRWWFHDDTV

SEQ ID NO: 4363 - protein, 161 aa, Zea mays
  Clone ID: PAT_MRT4577_121705C.1.pep
MTSSSSPSRKALSKIACNRLQKELAEWQLSPPAGFKHKVSDNLQRWVIEVTGAAGTLYAGETYQLQVDFPEHYPMEAPQVIFLNPAPMHPHIYSNGHICLDILYDSWSPAMTVSSVCISILSMLSSSPAKQRPVDNDRYVRNCRNGRSPKETRWWFHDDTV

SEQ ID NO: 4364 - protein, 92 aa, Zea mays
  unsure (1)..(92): unsure at all Xaa locations
  Clone ID: PAT_MRT4577_121749C.1.pep
DAQPELFIHIIPDKATNTLTIVDSGIGMTKSDLVNNLGTIARSGTKEFMEALAAGADVSMIGQFGVGFYSAYLVAERVVVXTKHNDDEQYVW

SEQ ID NO: 4365 - protein, 244 aa, Zea mays
  Clone ID: PAT_MRT4577_121828C.1.pep
MGRGRVELKRIENKINRQVTFAKRRNGLLKKAYELSVLCDAEVALIVFSNRGKLYEFCSGPSITRTLERYEKNSYAGPDTAVQNKENELVQNSRNEYLKLKAKVDNLQRTQRNLLGEDLGSLGVKELDQLEKQIDSSLSHIRSTRTQHMLDQLTDLQRREQMMCEANKCLRRKLEETSNQVHGQVWEHGANLLLGYERHSSPQQAPSHVGNGLFFHPLEAAAEPTLQIGFAPEHMNNFMPAWLP

SEQ ID NO: 4366 - protein, 339 aa, Zea mays
  Clone ID: PAT_MRT4577_121831C.1.pep
MVGTAAGSAEEAVRRWVDAAGGRLVLDGGLATELEANGADLNDPLWSAKCLLSSPHLIRKVHMDYLEAGANIIITASYQATIQGFESKGFSKEQSENLLTKSVEIALEAREMFLKEHLEKSTPIQHPVLVAASLGSYGAYLADGSEYSGDYGEAGTKEFLKDFHRRRLQVLAEAGPDLIAFETIPNKLEAEAYVELLEECNINIPAWFSFNSKDGVHIVSGDSLIECTTIADKCAKVGAVGINCTPPRFIHGLILSIRKVTDKPILIYPNSGERYDGEKKEWVESTGVSDGDFVSYVNEWCKDGAVLIGGCCRTTPNTIRAIHRTLNKSPNKQQLPAVE

SEQ ID NO: 4367 - protein, 140 aa, Zea mays
  unsure (1)..(140): unsure at all Xaa locations
  Clone ID: PAT_MRT4577_121923C.1.pep
MFCQHVKSHLQKYRTARYRPELSEGSSEKKVASKEDIPSIDLKGSFDLTEALRLQLELQKRLHEQLEIQRSLQLRIEEQGKXFQMMLEQQCIPGGRKRRRMPSTAGQMEFEVTFWRFPESSTVKEVSRKPSKWDPPSQPN

SEQ ID NO: 4368 - protein, 171 aa, Zea mays
  unsure (1)..(171): unsure at all Xaa locations
  Clone ID: PAT_MRT4577_121990C.1.pep
GSPWFGFAGGRIEMAGSDVEYRCFDGGLNWATDDHSVHNAXTTYGXCSHSKIIXLDRETDRSRGLRFVTLXSREEAIPERHLRALNGKELDCLNITINEGQSRGGRXADEAXGGGRGCGGYRGGRRRDGGGDYCGGDGGYGGGGGYGCGGGGYRGGNRGGGYGNSDGNWRN

SEQ ID NO: 4369 - protein, 50 aa, Zea mays
  Clone ID: PAT_MRT4577_122082C.1.pep
CYNSDTPVVERGHSRLQFFLPTHGCLAVSPKSSPKSSDHKLSFSSDWSLT

SEQ ID NO: 4370 - protein, 124 aa, Zea mays
  unsure (1)..(124): unsure at all Xaa locations
  Clone ID: PAT_MRT4577_12220C.1.pep
MAASYVEYRCFVGGLSWATYDHSLHNAFITYGEVLEFXIILDRETQRSRGFGLVTFSTEEAMPNAIDGMNGKDLDGRNITVNEAHSCXGRGGGCGGYGGGRACGGYRGGGRRDGSGSYCGGGCC

SEQ ID NO: 4371 - protein, 132 aa, Zea mays
  Clone ID: PAT_MRT4577_122249C.1.pep
MAQVRGSARGTGSGSSAAALALVLLCALLRGEFAESAVYTVGDRGGWSFNTASWPNGKRFRAGDVLVFRYDARAHNVVPVSAAGYSSCSAPEGARALATGNDRVTLRRGANYFICSFPGHCQAGMKVAVTAA

SEQ ID NO: 4372 - protein, 117 aa, Zea mays
  unsure (1)..(117): unsure at all Xaa locations
  Clone ID: PAT_MRT4577_122255C.1.pep
MAAKILCLXMLLGLFGSAATASILPQCSQAPIAYILPSYLLPAMTSEXENPILVPYKIQHAIGASMLPLSPLFLQQSXALLQQLPLVHXLAQNIRAQHLQQLVLSYLGAYYQQQQIP

SEQ ID NO: 4373 - protein, 234 aa, Zea mays
  Clone ID: PAT_MRT4577_122271C.1.pep
MSANVGESTSGVSSSDAAGGSFECNICFELPQEPIVTLCGHLFCWPCLYRWLHIHAHSPECPVCKALVEEDKLVPLYGRGKDRVDPRSKNMPEGEIPHRPTGQRPATAPRAHANSNFANANANPWFPGAGVPLANARWGNYAFSAAFGGLFPMLSFQVHGFPDAAAYAQPAGFHYGYGHGHGHGFHHGGHMGQAQAHGVHRQAPLGQQQQQADIYLKALLFMIVILVLASLLAF

SEQ ID NO: 4374 - protein, 697 aa, Zea mays
  Clone ID: PAT_MRT4577_122410C.1.pep
MASETETFAFQAEINQLLSLIINTFYSNKEIFLRELISNSSDALDKIRFESLTDKSKLDAQPELFIHIVPDKANNTLTIIDSGIGMTKSDLVNNLGTIARSGTKEFMEALAAGADVSMIGQFGVGFYSAYLVAERVVVTTKHNDDEQYVWESQAGGSFTVTRDTSGEQLGRGTKMTLYLKDDQLEYLEERRLKDLIKKHSEFISYPISLWTEKTTEKEISDDEDEEDKKDEEGKVEDVDEKEEKEKKKKKIKEVSHEWQLVNKQKPIWMRKPEDITKEEYAAFYKSLTNDWEEHLAVKHFSVEGQLEFKAVLFVPKRAPFDLFDTRKKPNNIKLYVRRVFIMDNCEELIPEWLSFVKGIVDSEDLPLNISRETLQQNKILKVIRKNLVKKCIELFFEIAENKEDYNKFYESFSKNLKLGIHEDSTNRNKIAELLRYHSTKSGDELTSLKDYVTRMKEGQNDIYYITGESKKAVENSPFLEKLKKKGYEVLYMVDAIDEYAIGQLKEFEGKKLVSATKEGLKLDESEDEKKRKEELKEKFEGLCKVIKEVLGDKVEKVVVSDRVVDSPCCLVTGEYGWTANMERIMKAQALRDSSMSGYMSSKKTMEINPENAIMEELRKRAEADKNDKSVKDLVMLLFETALLTSGFSLDDPNTFGSRIHRMLKLGLSIDEDEAPEADTDMPPLEDDAGESKMEEVD

SEQ ID NO: 4375 - protein, 698 aa, Zea mays
  unsure (1)..(698): unsure at all Xaa locations
  Clone ID: PAT_MRT4577_122412C.1.pep
MASETETFAFQAEINQLLSLIINTFYSNKEIFLRELISNSSDALDKIRFESLTDKSKLDAQPELFIHIVPDKANNTLTIIDSGIGMTKSDLVNNLGTIARSGTKEFMEALAAGADVSMIGQFGVGFYSAYLVAERVVVTTKHNDDEQYVWESQAGGSFTVTRDTSGEQLGXRGTKMTLYLKDDQLEYLEERRLKDLIKKHSEFISYPISLWIEKTTEKEISDDEDEEDKKDEEGKVEDVDEKEEKEKKKKKIKEVSHEWQLVNKQKPIWMRKPEEITKEEYAAFYKSLTNDWEEHLAVKHFSVEGQLEFKAVLFVPKRAPFDLFDTRKKLNNIKLYVRRVFIMDNCEELIPEWLSFVKGIVDSEDLPLNISRETLQQNKILKVIRKNLVKKCIELFFEIAENKEDYNKFYEAFSKNLKLGIHEDSTNRNKIAELLRYHSTKSGDELTSLKDYVTRMKEGQNDIYYITGESKKAVENSPFLEKLKKKGYEVLYMVDAIDEYAIGQLKEFEGKKLVSATKEGLKLDESEDEKKRKEELKEKFEGLCKVIKEVLGDKVEKVVVSDRVVDSPCCLVTGEYGWTANMERIMKAQALRDSSMSGYMSSKKTMEINPDNAIMEELRKRAEADKNDKSVKDLVMLLFETALLTSGFSLDDPNTFGGRIHRMLKLGLSIDEDEAPEADTDMPPLEDDAGESKMEEVD

SEQ ID NO: 4376 - protein, 48 aa, Zea mays
  Clone ID: PAT_MRT4577_12247C.1.pep
ATRIVSWITRLVVRIRLVPAHVRGSPEEPLDRAISSCSSMTALRKKGV

SEQ ID NO: 4377 - protein, 137 aa, Zea mays
  unsure (1)..(137): unsure at all Xaa locations
  Clone ID: PAT_MRT4577_122615C.1.pep
MGAIISCLAMLPGLSASAVASAIFPQCXRSYRLTFLPPXLSPAVLVVWENPTFXPYMIQQAIEAGILPLSRLFLQQSSAVLQQLPLVHVLAQNIKAQQLQQLVLAYLAAYSKKQQSLPLNQLAVLNSASYLQQQQLP

SEQ ID NO: 4378 - protein, 82 aa, Zea mays
  Clone ID: PAT_MRT4577_122667C.1.pep
FVKQRKQINHRDAKGDTQSDREEDESKQEDDDDDIGTALMSRKQRGLYKAMKMGKEKKKEKVELLKKRKKNADSGASSKKRH

SEQ ID NO: 4379 - protein, 380 aa, Zea mays
  unsure (1)..(380): unsure at all Xaa locations
  Clone ID: PAT_MRT4577_122922C.1.pep
MKVERDLHMSRGDGEDSYASNSRLQEKSILKTRPVLHKAVAAAHALSLSSGGPGGGAMVVADLGCSSGPNTLLVVSEVLAAVAMVAGGSAQPQHVQFFLNDLPGNDFNLVFRSLDLXEQEAGRQGQAGGVAXPPYYVAGLPGSFYTRLFPDHCVHLFHSSYCLMWRSKVPDELAGGAVLNEGHMYIWETTPQAVVALYRRQFQEDMSLFLRLRHRELVPGGHMVLAFLGRKKSKDVLRGEVSYTWGLLAQALQSLVKQGRVKKDKLDSFNLPFYAPSMDEVRDVITRSQAFDITHIQLFESNWDPHDDDXGDEDGXDVAAVQSGVNVARSIRAVIGPLIARHFGEHILDDLFELHAKNVAVHLQKVKTKYPVIVVSLQAK

SEQ ID NO: 4380 - protein, 51 aa, Zea mays
  Clone ID: PAT_MRT4577_122969C.1.pep
LYFPVPIEVKQFQIIEGSVTVSQSEEDPRFLGVYLECFAVGQTLVKACAIR

SEQ ID NO: 4381 - protein, 225 aa, Zea mays
  Clone ID: PAT_MRT4577_122972C.1.pep
MICILEPYFNGPNFFLCQKKKKSQPPSPLLGSTRRPSASLRPRELAEMVAHRFHQYQVVGRALPTPTDEHPKIYRMKLWATNEVRAKSKFWYFLRKLKKVKKSNGQMLAINEIFERNPTTIKNYGIWLRYQSRTGYHNMYKEYRDTTLNGAVEQMYNEMASRHRVRSPCIQIIKTATVHFKLCKRDNTKQFHNSEIKFPLVYRKVRPPTRKLRTTFKASRPNLFM

SEQ ID NO: 4382 - protein, 348 aa, Zea mays
  Clone ID: PAT_MRT4577_12310C.1.pep
MAKYGEGDKRWIVEERADGTNVHNWHWAERDCLEWSRARLSSLLAGLTILDGEGGLSLRTVALDKLDGEAYVNIRKGKVIPGYELSLTLSWEAEAASESGAAKVTGTAEVPYLADENADEDPDLRVTVRGDETPLALRAKDAFLSRGKPMVLEKIREFVAAMAKGGPAKDELDSKKTPTKVAGSAPAKEAVLAPAPAVEKKKAKGKDKEGFKTIEMTEKFYCRSKDIYEILMDENRWKGFTQSNARISREVGGEFSLFDGSITGVNEELQEGKLIAQKWRFGSWPDGLYSSVRLVFDEPESGVTIIKLKQTDVPEEDKYGNSTVVENTERGWRELIFQRIRGVFGFGI

SEQ ID NO: 4383 - protein, 353 aa, Zea mays
  Clone ID: PAT_MRT4577_12313C.1.pep
MAKYGEGDKRWIVEERADGTNVHNWHWAERDCIEWSRARLSSLLAGLTVLDGEDGLTLRTVALDNLDGEAYVNIRKGKVIPGYELSLTLSWEAEAASESGAVKVAGTAEVPYLADENADEDPDLHITVRGDETPLALRAKDAFLSRGKPMVLEKIREFVAAMAKGGPAKDELDSKKTPAKVAAAAPGAAPAKKEEVVAPAPAAGKKKAKGKDKEGFKTIKMTETFYCRSKDIYEILMDENRWKGFTQSNAKISREVGGEFSLFDGCITGVNEDLQEGKLIAQKWRFGSWPDGLYSSVRLMLDEPESGVTVIKLKQTGVPEEDKYGNSTVVENTERGWRDLIFQRIRGMFGFGI

SEQ ID NO: 4384 - protein, 663 aa, Zea mays
  Clone ID: PAT_MRT4577_123163C.1.pep
MSREAQKLDCATGGGGGVGIGVLSLDLLGQVLDRLREPRDRKACRLVSRAFERSEAAHRRALRVLRREPLPRLLRAFPALERLDLSACASLDDASLAAAVAGAGGGLAGLRSVCLARANGVGWRGLEALVAACPKLEAVDLSHCVSAGDREAAALAAAAGLRELRLDKCLAVTDMGLAKVAVGCPRLEKLSLKWCREISDIGIDLLAKKCPELRSLNISYLKVGNGSLRSISSLERLEELAMVCCSCIDDEGLELLSKGSDSLQSVDVSRCDHVTSHGLASLIDGRNFLQKLYAADCLHEIGQRFVSKLATLKETLTTLKLDGLEVSDSLLEAIGESCNKLVEIGLSKCSGVTDEGISSLVARCSDLRTIDLTCCNLSTNNALDSIAGNCKMLECLRLESCSLINEKGLKRIATCCPNLKEIDLTDCGVDDAALEHLAKCSELRVLKLGLCSSISDKGIAFISSNCGKLVELDLYRCSSITDDGLAALANGCKRIKLLNLCYCNKITDTGLGHLGSLEELTNLELRCLVRITGIGISSVAIGCKNLIELDLKRCYSVDDAGLWALARYALNLRQLTISYCQVTGLGLCHLLSSLRCLQDIKMVHLSWVSIEGFEIALRAACGRLKKLKMLCGLKTVLSPELIQMLQACGCRIRWVNKPLVYKD

SEQ ID NO: 4385 - protein, 660 aa, Zea mays
  Clone ID: PAT_MRT4577_123164C.1.pep
MSREAQKLDCTAAGGGIGVLSLDLLGQVLEHLREPRDRKTCRLVSRAFERAEAAHRRALRVLRREPLPRLLRAFPALERLDLSACASLDDASLAAAVADAGGGLAGLRSVCLARTNGVGWRGLEALVAACPKLAAVDLSHCVSAGDREAAALAAATELRELRLDKCLAVTDMGLAKVAVGCPKLEKLSLKWCREISDIGIDLLAKKCPELRSLNISYLKVGNGSLGSISSLERLEELAMVCCSCIDDEGLELLSKGSDSLQSVDVSRCDHVTSQGLASLIDGRNFLQKLYAADCLHEIGQRFLSKLARLKETLTSLKLDGLEVSDSLLQAIGESCNKLVEIGLSKCSGVTDEGISSLVARCSDLRTIDLTCCNLSTNNALDSIAGNCKMLECLRLESCSLINEKGLKRIATCCPNLKEIDLTDCGVDDAALQHLAKCSELRILKLGLCSSISDRGIAFISSNCGKLVELDLYRCNSITDDGLAALANGCKRIKLLNLCYCNKITDTGLGHLGSLEELTNLELRCLVRVTGIGISSVAIGCKNLIELDLKRCYSVDDAGLWALARYALNLRQLTISYCQVTGLGLCHLLSSLRCLQDIKMVHLSWVSIEGFEMALRAACGRLKKLKMLCGLKTVLSPELLQMLQACGCRIRWVNKPLVYKD

SEQ ID NO: 4386 - protein, 524 aa, Zea mays
  unsure (1)..(524): unsure at all Xaa locations
  Clone ID: PAT_MRT4577_12327C.1.pep
MGAFAKEEHQFLAELGLAQRNPGAFACGAWGGSGPTVTSTSPTNNQVIAEVVEASVHDYEEGMRACFDAAKTWMAIPAPKRGEIVRQIGDALRAKLHHLGRLVSLEMGKILPEGIGEVQEIIDMCDYAVGLSRQLNGSIIPSERPNHMMMEVWNPLGVVGVITAFNFPCAVLGWNACIALVCGNCVVWKGAPTTPLITIAMTKIVASVLEKNNLPGAIFTSFCGGTEIGQAIAXDIRIPLVSFTXGSTRAGLMVHSXLGTGGGRPXEVLEVXSLGYSHDDHSEQNAIIVMDATPRKIEGLSVGCTSVFRAGXLQQRTTQRSLILHITPRLRFLDQLVEVYKQVRIGDPLEKGTLLGPLHTPASKENFLKGIQTIKSQGGKILFGGSAIESEGNFVQPTIVEITPSAPVVKEELFGPVLYAMKFQTLKEAIEINNSVPQGLSSSIFTKRPDIIFKWLGPHGSDCGIVNVNIPTNGAEIGGAFGGEKATGGGREAGSDSWKQYMRRATCTINYGSELPLAQGINFG

SEQ ID NO: 4387 - protein, 138 aa, Zea mays
  Clone ID: PAT_MRT4577_123298C.1.pep
MAEEKHHHHHLFHHKKDEEQAAAGGYGESAEYTEATVTEVVSTGENEYDEYKKEEKQHKHKQHLGEAGAIAAGAFALYEKHEAKKDPEHAHRHKIEEEVAAAAAVGSGGFAFHEHHEKKKDHKDAEEAGGEKKHHFFG

SEQ ID NO: 4388 - protein, 145 aa, Zea mays
  Clone ID: PAT_MRT4577_123299C.1.pep
MAEEKHHHHHLFHHKKDEEQLEQPVAGGGYGYGEAAEYTETTVTEVVSTGGEDEYDTYKKEEKEHKHKQHLGEAGAIAAGAFALYEKHEAKKDPEHAHRHKIEEEIAAAAAVGSGGFAFHEHHEKKKDHKEAEEAAGEKKHHFFG

SEQ ID NO: 4389 - protein, 89 aa, Zea mays
  Clone ID: PAT_MRT4577_123323C.1.pep
PQQFLQFIQLKALNFPAYLKKEQLVPFSQLGGVSRDTFLTQQQLFRFYQHVGPNDGTLLQVQQLLPFNQLVLTKPAAFYQEPIIGGALF

SEQ ID NO: 4390 - protein, 66 aa, Zea mays
  Clone ID: PAT_MRT4577_123326C.1.pep
VVLTGRPLAKATQTADHRYARTAATEAHGRRTTRISSASTSARPGSRPAHPAWRSTASSRASSTMG

SEQ ID NO: 4391 - protein, 51 aa, Zea mays
  Clone ID: PAT_MRT4577_123379C.1.pep
KELSTVRKQSRVSSTRYLVVAVTYRVCSLELLTHERDRESLTVYFQKQLYS

SEQ ID NO: 4392 - protein, 744 aa, Zea mays
  Clone ID: PAT_MRT4577_123397C.1.pep
MAGQERRTIDLEEGWAFMQKGITKLKNILEGKPEPQFSSEDYMMLYTTIYNMCTQKPPQDYSQQLYDKYRESFEEYIASMVLPSLREKHDEFMLRELVQRWSNHKVMVRWLSRFFYYLDRYFISRRSLTPLKEVGLTCFRELIYQEIKGQVKDAVIALIDKEREGEQIDRALLKNVLDIFVEIGLGQMECYENDFEDFLLKDTTEYYSVKAQSWILEDSCPDYMIKAEECLKREKERVGHYLHISSEQKLLEKVQNELLAQYATPLLEKEHSGCSALLRDDKVEDLSRMYRLFSKISRGLEPISNMFKTHVTSEGTALVKQAEDSASNKKPEKKDMVGMQEQVFVWKIIELHDKYVAYVTECFQGHTLFHKALKEAFEVFCNKGVSGSSSAELLATFCDNILKKGCSEKLSDEAIEDALEKVVRLLAYISDKDLFAEFYRKKLARRLLFDKSANDEHERSILTKLKQQCGGQFTSKMEGMVTDLTVARDHQTKFEEFVAGHPELNPGIDLAVTVLTTGFWPSYKTFDINLPAEMVKCVEVFKEFYQTRTKHRKLTWIYSLGTCNINAKFDAKPIELIVTTYQAALLLLFNGSDRLSYSEIVTQLNLSDDDVVRLLHSLSCAKYKILNKEPANRSISPNDVFEFNSKFTDRMRRIKIPLPPVDEKKKVVEDVDKDRRYAIDASIVRIMKSRKVMGHQQLVAECVEQLSRMFKPDFKAIKKRIEDLITRDYLERDKDNANTYKYLA

SEQ ID NO: 4393 - protein, 82 aa, Zea mays
  unsure (1)..(82): unsure at all Xaa locations
  Clone ID: PAT_MRT4577_123473C.1.pep
GSPGFGFVGGLIEMAASDVEYRWFVVELGWDTDEQSLHDALSSYGEVLDSKMILDRXMQRSRCFGFVSFSTDEAMRXAIDGM

SEQ ID NO: 4394 - protein, 53 aa, Zea mays
  Clone ID: PAT_MRT4577_123484C.1.pep
LVSVSVADEKHHHHHLFQHKKDEEQLAARGYRESAEYTEATVTEVVSTGQNHF

SEQ ID NO: 4395 - protein, 93 aa, Zea mays
  Clone ID: PAT_MRT4577_123502C.1.pep
MVSGGLAAASEVAVVFLIRPVLAIAFVFTLILLSWYVAWRTVLVHVPLVQEIAGLRPKKPSKPKPANRGRFAKFYQNQAEAAQRNSKSEGASS

SEQ ID NO: 4396 - protein, 72 aa, Zea mays
  unsure (1)..(72): unsure at all Xaa locations
  Clone ID: PAT_MRT4577_123508C.1.pep
MAAADVEYRCLVGGLAWATMNESVENAFASYGEILDYKVITDRKTGRSHGFGFVTLYYXNLMLDAIQNMNGK

SEQ ID NO: 4397 - protein, 545 aa, Zea mays
  Clone ID: PAT_MRT4577_12375C.1.pep
MPIKFALENMSTQASNRSYRYPDRTQLPYHNGNPMHVGGNGNYCVQQNHDDVNYISSDDGSQSSSSRVQDFQAQFCTLDSSSANCVYPAHSSTSSQSISGSPLSQQESHSDHAYGSSPSASCITQVPTWTLKDLENVMLGPDSDIGSPDSSFLLDTALHGNNWRELLGIQTGDLRQVIVACGKAVDENAVYMDALMSELREMVSVSGEPMQRLGAYMLEGLIARLSFTGHALYKSLKCKEPVATSSELLSYMHLLYEICPFFKFGYMSANGAIAEAVKGEDIIHIIDFQIAQGSQWMTMIQALASRPGRRPYLRITGIDDSNSAHARGGGLDMVGQRLHRMAQSCGLPFEFNAVPAASHEVVFEDLCLRSGEAIVVNFAYQLHHTPDESVGIENHRDRILRMVKSLSPKVVTLVEQEANTNTAPFFLRYMETLDYYTAMFEAIDVACPRDDKKRISTEQHCVARDIVNLIACEGAERIERHEPFGKWRARLVMAGFRPYPLSPVVNRTIKTLLDSYHSHYRLEERDGILYLGWKNRKLVVSSAWC

SEQ ID NO: 4398 - protein, 44 aa, Zea mays
  Clone ID: PAT_MRT4577_123928C.1.pep
VENDDLIAYGLIPEFIGRLPITVGLTNLSEEQLVQVVNFFDFII

SEQ ID NO: 4399 - protein, 235 aa, Zea mays
  unsure (1)..(235): unsure at all Xaa locations
  Clone ID: PAT_MRT4577_124010C.1.pep
MAKDEVMETGGGGDFAAKDYTDPPPAPLIDAAELASWSLYRAVIAEFIATLLFLYITVATVIGYKHQTDPAVNTAADAACGGVGVLGIAWAFGGMIFVLVYCTAGISGGHINPAVTFGLFLARKVSLVRALLYMVAQCLGAMCGVGLVKAFXRAPTSSGXTAAAPTRSPPATPRAPASPRRSXGTFVLVYTVFSATDPKRSARDSHVPGLAPLPIGFAVFMGHLXTIPITGTGIN

SEQ ID NO: 4400 - protein, 285 aa, Zea mays
  Clone ID: PAT_MRT4577_124012C.1.pep
MAKDIEAAAAHEGKDYSDPPPAPLVDAEELTKWSLYRAVIAEFVATLLFLYITVATVIGYKHQTDAAASGPDAACGGVGVLGIAWAFGGMIFILVYCTAGVSGGHINPAVTFGLFLARKVSLVRALLYIVAQCLGAICGVGLVKGFQSAFYVRYGGGANELSAGYSKGTGLAAEIIGTFVLVYTVFSATDPKRNARDSHVPVLAPLPIGFAVFMVHLATIPITGTGINPARSLGAAVIYNNDKAWDDHWIFWVGPFIGAAIAAAYHQYVLRASAAKLGSSASFSR

SEQ ID NO: 4401 - protein, 290 aa, Zea mays
  Clone ID: PAT_MRT4577_124015C.1.pep
MGKDDVVESGAGGGEFAAKDYTDPPPAPLVDAAELGSWSLYRAVIAEFIATLLFLYITVATVIGYKHQTDASASGADAACGGVGVLGIAWAFGGMIFVLVYCTAGISGGHINPAVTFGLFLARKVSLVRALLYIVAQCLGAICGVGLVKAFQSAYFDRYGGGANSLASGYSRGTGLGAEIIGTFVLVYTVFSATDPKRNARDSHVPVLAPLPIGFAVFMVHLATIPVTGTGINPARSLGAAVVYNKDKPWDDHWIFWVGPLLGAAIAAFYHQYILRAGAIKALGSFRSNA

SEQ ID NO: 4402 - protein, 547 aa, Zea mays
  Clone ID: PAT_MRT4577_124085C.1.pep
TITTVIKKMMRCAATGGGCVASWSGDRRLPAVNPCSVRMPTGNDGWCAGLRSRAADLAGLEMANLRGGVGGLFRASPRYGRLQATAAVDPEDIPLEKVQVKSSGHVLPYVGVACLGAILFGYHLGVVNGALEYLAKDLGIAENAVLQGWVVSTSLAGATLGSFTGGSLADKFGRTRTFILDAVPLALGAFLSATAQDIRTMIIGRLLAGIGIGVSSALVPLYISEISPTEIRGTLGTVNQLFICIGILAALLAGLPLAGNPAWWRTMFGIAVVPSILLAVGMAFSPESPRWLFQQGKVTQAELAVKRLYGKEMVTEIMFDLRASGQSSSESEAGWFDLFSKRYWKVVSVGAALFLFQQLAGINAVVYYSTSVFRSAGIASDVAASALVGAANVFGTMVASSLMDKQGRKSLLITSFSGMGASMLLLALSFTWKALAPYSGTLAVVGTVLYVLSFALGAGPVPALLLPEIFASRIRAKAVALSLGMHWVSNFFIGLYFLSVVSKFGISNVYLGFASVCALAVLYIAGNVVETKGRSLEEIERELSVAE

SEQ ID NO: 4403 - protein, 64 aa, Zea mays
  Clone ID: PAT_MRT4577_124209C.1.pep
LSLVGTRNGSFWSPVSMITPSLGKPKRCQRTSLMHLTWLMGPRSSLKPGRAPRYLIPFGRAPSC

SEQ ID NO: 4404 - protein, 103 aa, Zea mays; identical to SEQ ID NO: 3995
  Clone ID: PAT_MRT4577_124368C.1.pep

SEQ ID NO: 4405 - protein, 103 aa, Zea mays; identical to SEQ ID NO: 3995
  Clone ID: PAT_MRT4577_124370C.1.pep

SEQ ID NO: 4406 - protein, 103 aa, Zea mays
  Clone ID: PAT_MRT4577_1243C.1.pep
TLRYVSTTRIRMKGAKFKGAAKADAKLAVKSKGAVNPAKARMGKAGMDPNKPKRAPSACFVIMEELRKESKEKNPMNKTVAAAGKAAGDRWQSLGEWDMAPYV

SEQ ID NO: 4407 - protein, 54 aa, Zea mays
  Clone ID: PAT_MRT4577_124450C.1.pep
RRRRECFMSNTGFGGRFAFELFILNRHNFVVVVWLLCEPAKPGYCYENLSSVRM

SEQ ID NO: 4408 - protein, 122 aa, Zea mays
  unsure (1)..(122): unsure at all Xaa locations
  Clone ID: PAT_MRT4577_12447C.1.pep
RLVRSGLSYHYGSGSDSGGSSSFGFVGERIEMAXASDVEYRCYICGLSWATDDHCVHNAFSTYGEVLEYKIILDRXTQTSSSFGFVTFFTDEAMRNAIAGMNGKDLDGRTITANDAQSRCGL

SEQ ID NO: 4409 - protein, 446 aa, Zea mays
  Clone ID: PAT_MRT4577_12449C.1.pep
MGAGAQEDEEEITTVAEGGVGEEEQAAAEGAGEEEQLEQGAGGEGEGGEEKAPAVMLCSICLDTVVAGGEERSTARLQCGHEFHLDCIGSAFNAKGIMQCPNCRTIEMGNWLYANGSRSSQDVNNDEWGYDDLYDHGHSELATFVPLRIQWCPMGRLELQSLFDDGESPPPSTFHDFTGQFNSEPMVPVPATPHPGPYLAYFQPALPPVSSSSLVAERTMDGAAYHDHWNTLAGLSDGRRPWAYYPQPNSDNGIAEQQGLPLGAMAVGGVDSESQQRGSLSLFYGNGSGRPRIPGVPPMAPQFTRAHGNINDQFQQTASLFAGSQQSGGMRPLGAVGPSVPPPPENTSFCLFPPASSVPSTMEAEDVNRANQFYAWERDRLAPYPLMPVNSEGTWWSSSQQQPPPEPAASASRRLSGQWIGRLPLPPPENRSPDGSSFRPLHIPRM

SEQ ID NO: 4410 - protein, 151 aa, Zea mays
  Clone ID: PAT_MRT4577_124572C.1.pep
VPFSPEEAIGNALQGINGKELDGPNIPVKEAQSPPAPENGGGGGYGGGRGGGGYGGGGPRDGGGGFGGGGGYGGGGGGSGGGGGGFGGGNRGGGFGNSDGNWRKLTVGPARPSYPVCYRVVSPSPKGLFSFVPGLVLPLCVFDLRSLCVSC

SEQ ID NO: 4411 - protein, 181 aa, Zea mays
  Clone ID: PAT_MRT4577_124601C.1.pep
MANDSLTRGHIIGDVLDPFTSSVSLSVLYDGRPVFDGMEFRASAVSVKPRVEIEGDDFRVAYTLVMVDPDAPNPSNPSLREYLHWMVTDIPASTDDSFGRELIPYESPSPTMGIHRLVLVLYQQLGRGTVFAPQVRQNFNLRNFARRFNLGKPVAATYFNCQRQTGTGWEKVHLSNGPTYP

SEQ ID NO: 4412 - protein, 123 aa, Zea mays
  Clone ID: PAT_MRT4577_124603C.1.pep
VMVDPDAPNPSNPSLREYLHWMVTDIPASTDDSFGRELIPYESPSPTMGIHRLVLVLYQQLGRGTVFAPQVRQNFNLRNFARRFNLGKPVAATYFNCQRQTGTGGRRFTCVFDHVVQGEGRQA

SEQ ID NO: 4413 - protein, 64 aa, Zea mays
  unsure (1)..(64): unsure at all Xaa locations
  Clone ID: PAT_MRT4577_124769C.1.pep
MAVAQESLSVVGTMRGHNGEVTAIATPIDNXPFIVSSSRDKCLLVWDLTNPVHYTPEFGATVYY

SEQ ID NO: 4414 - protein, 430 aa, Zea mays
  Clone ID: PAT_MRT4577_124783C.1.pep
MRSTMKAQHANGRGSRSPFLTSYALTLAFITFVSVLYFKDFSSTLHRPFLHRPRRHAAPDKSQAGRRAAAERLPFAVGAAPAGCDVGRGEWVYDDAARPWYQEEECPYIQPQLTCQAHGRPDRAYQHWRWQPRGCSLPSFNATLMLEMLRGKRMLFVGDSLNRGQYVSLVCLLHRIIPESSKSMETVDSLTVFKAKDYNATIEFYWAPFLAESNSDDAVVHRIADRIVRGTSIEKHAKFWKGADILVFNTYLWWMTGQKMKILRNSFEDKSKDIIEMETEEAYEMVLNAVLKWVESNMNPRTSRTFFVTMSPTHTRSRDWGDDTDGNCYNQTAPIEDLSYWGPDTSKGLMRVIGEVFSASKSRIPVGVVNITQLSEYRKDAHTQIYKKQWNPLTPEQVADPKSYADCTHWCLPGLQDTWNELLYSKLFFP

SEQ ID NO: 4415 - protein, 526 aa, Zea mays
  Clone ID: PAT_MRT4577_124848C.1.pep
MICAISGEVPDEPVVSKKSGLLFERRLIERYIEDHGKCPITKDELTMDDIVPVNTNKVVKPRPLQAASIPGLLGIFQNEWDALMLSNFALEQQLHTARQELSHALYQHDAACRVIARLKKERDEARALLAQAERQIPASVAGAAPAAVVSNGKRAMEDEIGPDGKKIRPGINPVMIDELTECNTMLSAQRKKRQVPPTLAPLDALERYTQISSHPLHKTNKPGILSMDVHPSKDVVATGGIDTNAVIFDRSSGQILCTLTGHSKKITTLKFVPRDQLFVTGSADKTVRIWQENENGNYNCVHTLKDHTAEVEAVTVHATQKYFVSASKDNSWCFYDISTGSCLTQVGEASGQEGYTSASFHPDGLILGTGTTDAVVKIWDVKTQSNVAKFEGHVGPVTAMSFSENGYFLATAAHDGVKLWDLRKLRNFRTFSPYDSDTPTNTVEFDFSGNYLAIGGSDIRVYQVANVKAEWNLIKTLPDLSGTGKVTSVKFGADAKYIAVGSMDRNLRIFGLPGDDQMEESTTAAE

SEQ ID NO: 4416 - protein, 588 aa, Zea mays
  Clone ID: PAT_MRT4577_124849C.1.pep
MRGVKFLLSKNPSGKTFAPSRRRLLPSRRRRCHPHLPRGSPPGRLLAVPRSLPRPTLALPSSMICAISGEVPDEPVVSKKSGLLFERRLIERYIEDHGKCPVTKEDLTMDDIVPVKTNKIVKPRPLQAASIPGLLGIFQNEWDALMLSNFALEQQLHTARQELSHALYQHDAACRVIARLKKERDDARALLAQAERQIPASVAGAAPAAVVSNGKRAIEDEIGPDGKKIRPGINPVMIDELTECNAMLSAQRKKRQVPPTLAPIDALERYTQISSHPLHKTNKPGILSMDIHPSKDIVATGGIDTNAVIFDRSSGQILCTLTGHSKKITTLKFVPRDQLFVTGSADKTVRIWQENENGNYNCVHTLKDHTAEVEAVTVHATQKYFVSASKDNSWCFYDISTGSCLTQVGEASGQEGYTSASFHPDGLILGTGTTDAVVKIWDVKAQSNVAKFEGHVGPVTAMSFSENGYFLATAAHDGVKLWDLRKLRNFRTFSPYDSDTPTNTVEFDFSGNYLAIGGSDIRVYQVANVKAEWNLIKTLPDLSGTGKVTSVKFGVDAKYIAIGSMDRNLRIFGLPGDDQMEESNTAAE

SEQ ID NO: 4417 - protein, 250 aa, Zea mays
  Clone ID: PAT_MRT4577_124955C.1.pep
LRRKSSGFSRGASIYRGVTRHHQHGRWQARIGRVSGNKDLYLGTFSTQEEAAEAYDVAAIKFRGLSAVTNFDITRYDVDKIMESSTLLPGEQVRRRKEGADAAVSEAAAALVQAGNCMTDTWKIQAALPAAARADERGAGQQQRQDLLSSEAFSLLHDIVSVDAAAGTGTGTGGMSNASSSLAPSVSNSREQSPDRGGASLAMLFAKPVAAPKLACPLPLGSWVSPSAVSARPPGVSIAHLPVFAAWTDA

SEQ ID NO: 4418 - protein, 310 aa, Zea mays
  Clone ID: PAT_MRT4577_124970C.1.pep
MSCEGLLSLSSLKPSSARRHHTKIYVRINRSKSSPAPAAPKSGNPLLRMDSGYNPRTVEEVFRDFKGRRAGIIRALTTDAEDFFKQCDPEKENLCLYGFPNESWEVNLPAEEVPPDLPEPALGINFARDGMQEKEWLSMVAAHSDAWLLSVAFYFGARFGFNKNDRKRLYSLIDDLPMAFEIVSGKSETKAPAPPSSSNHSNIKPKSNNKKKPPEPKVKQPKPRAPAEEGEEEDGSASEGEHGETLCGACKESYGPDEFWICCDLCEKWFHGKCVKITAAKAEHIKQYKCPSCTGGGGVGNSGTKRARPS

SEQ ID NO: 4419 - protein, 179 aa, Zea mays
  unsure (1)..(179): unsure at all Xaa locations
  Clone ID: PAT_MRT4577_124977C.1.pep
AILFAHCTSHTIGYTTRAQSSQVSQRRLLANGAAPRQPLXRSAASAPXVELDDDGHAARTGNLWTCFAHIITAVIGCGVLALSWSVAQLGWVGGPVAMLCFAFVTYLSAFLLSHCYRSPASDDGSLKRQRNYTYMDAVRTHLXYLNMYGTAIAYTITTATCLRAIVRANCYHSQGHSAP

SEQ ID NO: 4420 - protein, 539 aa, Zea mays
  unsure (1)..(539): unsure at all Xaa locations
  Clone ID: PAT_MRT4577_124979C.1.pep
AILFAHCTSHTIGYTTRAQSSQVSQRRLLANGAAPRQPLXRSAASAPXVELDDDGHAARTGNLWTCFAHIITAVIGCGVLALSWSVAQLGWVGGPVAMLCFAFVTYLSAFLLSHCYRSPGSDDGSLKRQRNYTYMDAVRTHLGXLLLHPCSCSYPTYRXRISLWWRLHLRELARATRAGEKRTWLCGLFQYLNMYGTAIAYTITTATCLRAIVRANCYHSQGHSAPCGAGGDHLYMLLFGAAQAVLSLIPNFHSMAWLSAVAAVMSFTYATIGLGLGLAKTIENGAIKGSVAGVPMSTAPQKVWRVAQAIGDIAFAYPYTIVLLEIQDTLKSPPPESETMQKGNVLAVLATTFFYLAVGCFGYAAFGNAAPGNLLTGFGFYEPYWLIDFANACIVLHLLGGYQMFSQQIFTFADRSLAARFPNSAFVNKSYAVKVPGAPASWSYSLNLQRLCFRTAYVASTTGLALLFPYFNEVLGVLGAVVFWPLAIYLPVEMYCVQRGVLPWTRTWVALQAFSVVCFVVGTFAFVGSVEGVIRKRLG

SEQ ID NO: 4421 - protein, 511 aa, Zea mays
  unsure (1)..(511): unsure at all Xaa locations
  Clone ID: PAT_MRT4577_124982C.1.pep
AILFAHCTSHTIGYTTRAQSSQVSQRRLLANGAAPRQPLXRSAASAPXVELDDDGHAARTGNLWTCFAHIITAVIGCGVLALSWSVAQLGWVGGPVAMLCFAFVTYLSAFLLSHCYRSPASDDGSLKRQRNYTYMDAVRTHLARATRPGEKRTWLCGLFQYLNMYGTAIAYTITTATCLRAIVRANCYHSQGHSAPCGAGGDHLYMLLFGAAXQAVLSLIPNFHSMAWXLSVVAAVMSFTYATIGLGLGLAKTIENGAIKGSVAGVPMSTAPQKVWRVAQAIGDIAFAYPYTIVLLEIQDTLKSPPPESETMQKGNVLAVLATTFFYLAVGCFGYAAFGNAAPGNLLTGFGFYEPYWLIDFANACIVLHLLGGYQMFSQQIFTFADRSLAARFPNSAFVNKSYAVKVPGAPASWSYSLNLQRLCFRTAYVASTTGLALLFPYFNEVLGVLGAVVFWPLAIYLPVEMYCVQRGVLPWTRTWVALQAFSVVCFVVGTFAFVGSVEGVIRKRLG

SEQ ID NO: 4422 - protein, 122 aa, Zea mays
  unsure (1)..(122): unsure at all Xaa locations
  Clone ID: PAT_MRT4577_125022C.1.pep
GFSCPYGSGSGSRGSTLFGSGVERIEMAASDVEYRCFAGGLTWATDDHFVHNALSTYGEVLXSNIILDRETHRSERSCFITFSTDEARHNAINGMNSTELDGRNITVNDAHARGVRGGGCGG

SEQ ID NO: 4423 - protein, 95 aa, Zea mays
  unsure (1)..(95): unsure at all Xaa locations
  Clone ID: PAT_MRT4577_12507C.1.pep
GSPGFGFVGERIEMAASDVEYRCFHGGLHXTTDDHSLHNAFSTYGEVLEFKIILDRETQKLHGYCFTTFSTEDAMQNAIKGMNSEELDRRNITVN

SEQ ID NO: 4424 - protein, 152 aa, Zea mays
  Clone ID: PAT_MRT4577_125103C.1.pep
MEYSNLQQQAASLKKNLFDQGYLDEQFCQIEDLQDEASPNFTEEVVSLFFKNSTRLMTNIEQAMDRNPRDFSKWDVNMQQLKGTCSSIGACRMKNECTSFRNRCGDENVEGCMRSFQNLKREHGVLRQKLESYFQLLRQAGPAVTATRPRGM

SEQ ID NO: 4425 - protein, 204 aa, Zea mays
  Clone ID: PAT_MRT4577_125324C.1.pep
MSFTGTQDKCKACDKTVHIIDLLTADGVSYHKTCFKCSHCKGVLSISSYSSMDGVLYCKTHFEQLFKETGTFSKNFQGGASSNKNDQAKAPSKLSSAFSGTQDKCAACQKTVYPLEKMTLEGESYHKSCFKCSHGGCILTTSSYAALNGVLYCKIHFSQLFKEKGSYNHLIETAQTKKNEAAEAGPEPPADAGAGEPEAPAQSA

SEQ ID NO: 4426 - protein, 207 aa, Zea mays
  Clone ID: PAT_MRT4577_125327C.1.pep
MSFTGTQDKCKACDKTVHFIDLLTADGVSYHKTCFKCSHCKGVLSISSYSSMDGVLYCKTHFEQLFKETGNFSKKFQGGGGASSNKNDPAKAPSKLSSAFSGTQDKCAACQKTVYPLEKMTLEGESYHKGCFKCSHGGCILTTSSYAALNGILYCKIHFSQLFKEKGSYNHLIETAQTKKNEGAEAAEEPSVDAGAAAEAEAPAESA

SEQ ID NO: 4427 - protein, 79 aa, Zea mays
  Clone ID: PAT_MRT4577_125341C.1.pep
TVTTTTTVVVPASTTVTSVTSNPAALSGSEQTDRSGPNDRVILFATVMFTRVHRLYLRSCRVCCCPFVFLTARSHCGSC

SEQ ID NO: 4428 - protein, 160 aa, Zea mays
  unsure (1)..(160): unsure at all Xaa locations
  Clone ID: PAT_MRT4577_125744C.1.pep
MSRHPEEKWAQMIDRVYITEQXLMPXDAKAYLDTHYGDYTFSGRAGTNLYELKLDVNDEVNDEASDNNCGXGTLLWIEQKAEAKWRNKLGPHDQRAPHFEKVDWDXWDDEDDDGVDDYLDGMDFSNFDAMGGMRGMVDMAGLXGLAGMSVMGMDDSEDDS

SEQ ID NO: 4429 - protein, 286 aa, Zea mays
  Clone ID: PAT_MRT4577_125748C.1.pep
MGAPKQRWTSEEEAALRAGVARHGVGNWRMILNDPELSSTLRYRSNVDLKDKWRNMNVIVTSSSTRDRGRTSTRRTRAAPKNNDQLLAMSTITSEVDDEIVDVKPIVSMSVEGWNTSNSKKSHSRLDNIIMEAIKNLNEPTGSHRTTIANYIEEQYWPPSDFDHLLSAKLKYLATSGKLLKVNRKYRIAPSLLEDVQREPLKLGSDASRTLTRSQVDAELVRMATMTVEAAAAAAAHAVAEAEAIMAEAEAAAREAEAAEAEARAAQAFAEAAVLTLKNRNAAKLV

SEQ ID NO: 4430 - protein, 872 aa, Zea mays
  unsure (1)..(872): unsure at all Xaa locations
  Clone ID: PAT_MRT4577_125772C.1.pep
LRIASLLTHGQVKQLRPWACLLLRHCRCGRRRDAVHGRRRQWLERAHRRRRALQHLGGEDEVSDRRLPSVRVPQGPGLGAAGGAGGLQRLRHVVVREEVRRRRHRGHARPLRPALLHQRRRGQLPRQREAHRHGPRRPQQRQRHRRRRAGSEHGAAAGVTGGIAPSRQLDPAPAVVARSQGRVAAPGLCSHNVTGYDAAPCSERVVACSGGERDADEETRNQMMQNLFGDQSEDEDDADDDDGQQQQLQSPPHHHHEIEDDADEDGDDARSDAPARHGGYHSEEVDGEAENGGEGEGESEGQVEMEEESEGEAHRADLDQGESDGDKVHSSPERELHDQRMESDAKGXLDSEDEGYQQRTVSGRRRGVIASESEGSEDSYYAAGAQEDEEPRQTRKQSSPLEEERDHEVVRDVFGDSDEDEPAPYRVRHEIDEDSHRSHMEDEGHYEKDMQPDEVVADEDMRYESDDNRELKPKEKPVGPPLGSAAPFGRPPARPRRGLVCVGPDILGVDPKPFDPKTYVEEDVFVTDESGTKKRIRLEDNIVRWRTIRNADGTTSCESNARFVKWKDGTMQLLIGNEVLDISVHEAHHDQSHLFLRHGKGILQSQGRLLHKMRFMPSSLSSKSHRLLTALVDSQNKKTVKMQKWFETKDPEKAKMEKERVLGQNIRAHSILQRKREKVNRKYTQPARPRRQLSPGFLEDALDEDDEPGYDSRRMPGRRRFEDELEAEALAERRIINAKKSNMSRNVPHKPPYPPARPPRRQADEYSGSEREESEYETDGEDIEHSPPRGRREDELDEEEEYEEDVEEEEAPLSDEEMEAPKRKRESGGGGQRREELVSEEEDEDHDDSPPRKQPAVSHRRKAVVFDDSDED

SEQ ID NO: 4431 - protein, 106 aa, Zea mays
  Clone ID: PAT_MRT4577_125823C.1.pep
FPCQLNTVLACVRILLVNNSVYMLLLFYSSCHYYIIFGSSCLITVKGRTQCRRLPALCGVWRRVSLSAKPYPHNMQRLGLKPGTFRLQTVDSTTAPGPPFILFNNS

SEQ ID NO: 4432 - protein, 159 aa, Zea mays
  unsure (1)..(159): unsure at all Xaa locations
  Clone ID: PAT_MRT4577_125903C.1.pep
MAAKXFCFLMLLGLSASVATATIFPQCSQAPIASFFSPYLSPAVSSVCETPIVEPCRIQQALATGILPFSPLFLQQPSVLLQQFPLVHLVAHNIRAQQLHQLVLAYLAAYCXLLHFLSFNQLAALXSVVYLLQQLPFHPXLVAASPPLFLPFXLLAAFN

SEQ ID NO: 4433 - protein, 103 aa, Zea mays
  unsure (1)..(103): unsure at all Xaa locations
  Clone ID: PAT_MRT4577_126100C.1.pep
MAXADVEYRCFVGGLAWATNNETLEQAFANFGQVIDSKVITDRETGRSRGSGLVTFSSEQSMINAIENMNGKELDGRNITVNQAQSRGGGGGGGGYGGGGGGY

SEQ ID NO: 4434 - protein, 79 aa, Zea mays
  Clone ID: PAT_MRT4577_126197C.1.pep
LSASAATATIFPQCSQAPISFLLSPYLSTGGSSGCENPILQPYRVQQGITAGILTLLTLVLPTLLALLHQVPLGDLLGQ

SEQ ID NO: 4435 - protein, 436 aa, Zea mays
  unsure (1)..(436): unsure at all Xaa locations
  Clone ID: PAT_MRT4577_126268C.1.pep
MRGRGSSGARMSXGXAAEAAXGAVGCGYDLTGXLRLGRAKPGGRLVDLDGAGKWAGTSPSPRELAFPGGAAVAGVPAGVVAGKGERARFRSDVLPFAQMAEEVNRSLSLPASKIPSGAFNAMFDYRGCWHRDAAATRSLCFDARLVELYSVEAVRASLALRDHVRRDLPPVWDPAALAEFIDKYGTHVIVGVKMGGKDVVCVKQLKGSSLTQSDVQARLKELADDRFSEDSTASSNSSTAGGGRLSQGLNVGPGSAAWQSFRSPVVSHKDDMVCIHVRRGGVDSGQGHGKWLSTITGFPDVISMSFVPITSLLTGVRGSGFLNHAVNLYLRYKPPIEELQQFLEFQVPRLWAPEFGQLPLSLQRRKNILPSLQFTLMGPKLHVNTAKVDSCLRPVTGIRLFLEGKKSDQLGVHLQHLSATPSAITVLSEAASSADD

SEQ ID NO: 4436 - protein, 96 aa, Zea mays
  unsure (1)..(96): unsure at all Xaa locations
  Clone ID: PAT_MRT4577_126272C.1.pep
TLHSVSSLEYDMKGAKYKGAVKVDAKLAVKSKGAEKPAMGRKGKAGXDPNKPKRASSAFFVFMREYRKEFKXEKNPNNKSVAWVGKADGDRLKSLN

SEQ ID NO: 4437 - protein, 73 aa, Zea mays
  unsure (1)..(73): unsure at all Xaa locations
  Clone ID: PAT_MRT4577_126415C.1.pep
QLFNELQKYYLRRPRTGARAXKQEKRDLFPMNREGYHAGFQDFQYLLTTFTQYRRLLVIAELKHGDLFNFANI

SEQ ID NO: 4438 - protein, 561 aa, Zea mays
  Clone ID: PAT_MRT4577_126568C.1.pep
MSFVRQADPSASCAETTYIHKFVPPGPVFPAQRFVSGTDLLHHGPQPYNAEGYKQSGFNGTAPHAFQSFYNTDSYAESHFNEAPYSPAIFDISQQNSQSLSDNQASDLVEFDEDEMRVKLQELEHALLDDGDEIFFDLSGSINDEWNDNIKTNNEWVNTMKNIVSPDSPKEASPESSICCLDNNVGEARNPKQLLFDCAEAISENSIDEAQSIIAELRQKVAIQGEPSQRLAAYLVEGLAATLQSSGKGIYRALRCKEAPTLYQLSAMQILFEICPCFRLGFMAANYAILEACKGEDVVHIIDFDINQGSQYITLIQFLKNNSNKPRLLRITGVDDPESVHRAVGGLNVVGQRLEKLAEDCEVRFEFRAVAANIEDLTAGMLGRRPGEALIVNFAFLLHHLPDESVSIMNQRDRLLRMVKGLRPKLVTLVEQDANTNTTPFPSRFREVYDYYSALFDSLDATLPRESPDRMNVERQCLAREIVNILACEGPDRVERYEVAGKWRARMAMAGFVSSPFNSGAIDGIRSLLKSYCDKYRFEKVQDGLHFGWGDKTLVFSSAWQ

SEQ ID NO: 4439 - protein, 28 aa, Zea mays
  Clone ID: PAT_MRT4577_126700C.1.pep
AHLCGISKKWFNGPINGVSHCFIPTSMC

SEQ ID NO: 4440 - protein, 132 aa, Zea mays
  unsure (1)..(132): unsure at all Xaa locations
  Clone ID: PAT_MRT4577_126775C.1.pep
MAGEIFSLLMLPGLSASAATETIFPKCSHASIASLFPPYLXPAESLCCENPILQPYRIQQAITAGILPLSPLFLQQLXSLLHQVPLLHLLAQNIRAQXLHQLVLANLTSYSHXHVFLPFNQLAELNFCFYLQ

SEQ ID NO: 4441 - protein, 609 aa, Zea mays
  unsure (1)..(609): unsure at all Xaa locations
  Clone ID: PAT_MRT4577_12685C.1.pep
MRLWEEEDDDEDEEGMEVDGEAEDEPGWPCGAPEAGPGETRPAAILVADAAEVDFPVIYVNAAFEAATGYRAHEVLGRNCRFLQFRDPHAQRRHPLVDPMVVSEIRRCLSEGIEFQGELLNFRKDGAPLHNRLRLVPMHGDDGYVTHVIGIQLFSEANIDLSSVSYPVYKQKXQQQAQHSRSELISPRARXKIQSADHCGMLQLSDEVLAHNILSRLSPRDVASIGSVCTRMHELTKNDHLRKMVCQNAWGRDVTVRLEMSTKMVGWGRLARELTTLEAASWRKFTVGGRVEPSRCNFSACAVGNRLVLFGGEGVNMQPMDDTFVLNLEAATPEWRRVKVSASPPGRWGHTLSWLNGSWLVVFGGCGQQGLLNDVFVLDLDAQQPTWREVASEGPPLPRSWHSSCTLDGSKLVVSGGCAESGVLLSDTFLLDLTKEKPAWREIPTSWSPPSRLGHTTSVYGATKLFMFGGLAKSGSLRLRSSDAYTVDVSEDSPQWRQLATTTGFPNVSPPPRLDHVAVSLPCGRIIIFGGSIAGLHSPAQLFLIDPAEEKPIWRILNVPGQPPKFAWGHSTCVVGGTRVLVLGGHTGEEWILNELHELCLASRPDEDG

SEQ ID NO: 4442 - protein, 117 aa, Zea mays
  unsure (1)..(117): unsure at all Xaa locations
  Clone ID: PAT_MRT4577_126890C.1.pep
REIGREEVFGPVLWXKEXSPEEEAXXLANDTQYGLXGAVISGDRERCQRLSEEIDAGIIWVNCSQPCFCQAPWGGNKRSGFGRELGEGGIDNYLSVKQVTEYISDEPWGWYRSPSKL

SEQ ID NO: 4443 - protein, 143 aa, Zea mays
  unsure (1)..(143): unsure at all Xaa locations
  Clone ID: PAT_MRT4577_126925C.1.pep
IHYSWGESKHHHHHLFHHKKDEEQLAPRRYXKSAEYTAATVTEGVPTADNXYNEYKKEEKEHKHKQHLGEAGAIAAGAFALYXEKHEANKDLEHAHRHKIHDEVSAAAARCSGGFAFHEHHXKKKDHKEAEEAXGEKKHHFFG

SEQ ID NO: 4444 - protein, 311 aa, Zea mays
  Clone ID: PAT_MRT4577_126939C.1.pep
MNHDSAPRPSKPRTRSAARAEAEAEAAMKRRKAGDAARWPMDTRQPDAEAAVAPYVGDIDRYLRSLEVEPLRRPSHSYFQDIQKNICPKMRAILVDWLVEVAEEFKLHAETLHLAVSYVDRFLTMNVVARNKLQLLGVTTLLVAAKYEEIESSKMKVVKMETDLLKSLSFQIGGPTVTTFLRQFIASCRGGNSASRGKLEFVCSYLAELSLLDYDCISYLPSVVAAACLFVARFIIHPKTRPWNLSLEQSTGYRVFDLQKSIYVIHELQLTIRCPNQVAIREKYKDPKFGCVSTMVSPREIPTSFLEGCHK

SEQ ID NO: 4445 - protein, 83 aa, Zea mays
  unsure (1)..(83): unsure at all Xaa locations
  Clone ID: PAT_MRT4577_126959C.1.pep
MADVHXPLVRXTRKKDLEDYLVKFRWILTIFGVLTISTLIYFNIVLGDMWSVMNSEKKRSNQHDKNVHKVGNRLKQMNPKNDG

SEQ ID NO: 4446 - protein, 270 aa, Zea mays
  unsure (1)..(270): unsure at all Xaa locations
  Clone ID: PAT_MRT4577_127009C.1.pep
SILGALVLILREKRFSSQKLGSFMELAFGGRYVILLMAIFXIYCGLIYNEFFSVPFHIFGKSAYECRDKSCSDAHTFGLIKVREPYPFGVDPSWRGSRSELPFLNSLKMKMSILMGVAQMNLGIVLSYFDARYHGNALDIRYQFIPQMIFLNSLFGYLALLILIKWCTGSQADLYHVMIYMFLDPAGDLGENQLFWGQKELQILLLLLAXIAVPMLFPKPFIXEKLHRRDSGHTYRSRTSEMDPDSDLIRRARMMISIQRVLCINDTSIE

SEQ ID NO: 4447 - protein, 61 aa, Zea mays
  unsure (1)..(61): unsure at all Xaa locations
  Clone ID: PAT_MRT4577_127074C.1.pep
GSPGFGCVGERIEMTASRVEYRCFVGSLSCTTDDHSLHNAFSTYGEVXLESKNNTLSGDAY

SEQ ID NO: 4448 - protein, 103 aa, Zea mays
  unsure (1)..(103): unsure at all Xaa locations
  Clone ID: PAT_MRT4577_127114C.1.pep
MGLSEEKTWSGREYKVKDLSKADLGRLEIELDEEEMPGLMVCRAEFGPYKPFDGTRISGALHMTIQTVDLIETLTALGHQVLWRSXCNMFFTQEHAGVAIARD

SEQ ID NO: 4449 - protein, 60 aa, Zea mays
  Clone ID: PAT_MRT4577_127137C.1.pep
GSAPLTTSPVCSSQLGRCLGRRRQQHQLRCQYLSGCDQLRLVGVGASGHSCSRERVASWC

SEQ ID NO: 4450 - protein, 89 aa, Zea mays
  unsure (1)..(89): unsure at all Xaa locations
  Clone ID: PAT_MRT4577_12720C.1.pep
LPSRGRVHTNAVTGPPTATERKGAVYPPRPXPITDEGRVDKQTQRPQPPVHLIPFLALLLPCLDSLPYPQLQLLLSPIASNCTRAYYSQ

SEQ ID NO: 4451 - protein, 95 aa, Zea mays
  Clone ID: PAT_MRT4577_127230C.1.pep
MAAADVEYRCFVGGLASATNNKWLENAFTSYGEILDSKVITDRETGRSRGFGLDTFFYENSMLDAIENMNCKELHSRNITVKQAQSRGGGRCSRR

SEQ ID NO: 4452 - protein, 117 aa, Zea mays
  unsure (1)..(117): unsure at all Xaa locations
  Clone ID: PAT_MRT4577_127244C.1.pep
GGFSFPSGSGSGSRGSAEWEFVGERIEMAAYDGEYRCFVSGLIWATDDHFLHNAFSTYGEVLESKIILDRETHRSRCFSSNNLYTDEAMQNAIEGMNGXELDSRNITVNEDQSRYGR

SEQ ID NO: 4453 - protein, 170 aa, Zea mays
  Clone ID: PAT_MRT4577_127500C.1.pep
GKISYIAPAGQYNLQDTVLELEFQGIKKKFTMLQTWPVRSPRPVASKLAADTPLLTGQRVLDALFPSVLGGTCAIPGAFGCGKTVISQALSKYSNSEAVVYVGCGERGNEMAEVLMDFPQLTMTLPDGREESVMKRTTLVANTSVLDGHPVYFDVPFIASIVISDGHACS

SEQ ID NO: 4454 - protein, 502 aa, Zea mays
  Clone ID: PAT_MRT4577_127502C.1.pep
HCVLKVVLTSWCNVTYFPPKKLGVGDVITGGDLYATVFENTLMQHHVALPPGSMGKISYIAPAGQYNLQDTVLELEFQGIKKNFTMLQTWPVRSPRPVASKLAADTPLLTGQRVLDALFPSVLGGTCAIPGAFGCGKTVISQALSKNSNSEAVVYVGCGERGNEMAEVLMDFPQLTMTLPDGREESVMKRTTLVANTSNMPVAAREASIYTGITIAEYFRDMGYNVSMMADSTSRWAEALREISGRLAEMPADSGYPAYLAARLASFYERAGKVKCLGSPDRTGSVTIVGAVSPPGGDFSDPVTSATLSIVQVFWGLDKKLAQRKHFPSVNWLISYSKYSKALESFYEKFDPDFIDIRTKAREVLQREDDLNEIVQLVGKDALAESDKITLETAKLLREDYLAQNAFTPYDKFCPFYKSVWMMRNIIHFNTLANQAVERAAGTDGQKITYGVIKHRLGDLFYRLVSQKFEDPAEGEEALVGKFKKLYDDLTTGFRNLEDEAR

SEQ ID NO: 4455 - protein, 659 aa, Zea mays
  unsure (1)..(659): unsure at all Xaa locations
  Clone ID: PAT_MRT4577_127503C.1.pep
MALLPIASVRYPSPTRSLRDAARSDPGRRRRPLSPPAAMAYGDRXTTFEDSEKESEYGYVRKVSGPVVVADGMGGAAMYELVRVGHDNLIGEIIRLEGDSATIQVYEETAGLMVNDPVLRTRKPLSVELGPGILGNIFDGIQRPLKTIAIKSGDVYIPRGVSVPALDKDVLWEFQPTKLGVGDVITGGDLYATVFENTLMQHHVALPPGSMGKISYIAPAGQYNLQDTVLELEFQGIKKKFTMLQTWPVRSPRPVASKLAADTPLLTGQRVLDALFPSVLGGTCAIPGAFGCGKTVISQALSKYSNSEAVVYVGCGERGNEMAEVLMDFPQLTMTLPDGREESVMKRTTLVANTSNMPVAAREASIYTGITIAEYFRDMGYNVSMMADSTSRWAEALREISGRLAEMPADSGYPAYLAARLASFYERAGKVKCLGSPDRNGSVTIVGAVSPPGGDFSDPVTSATLSIVQVFWGLDKKLAQRKHFPSVNWLISYSKYSKALESFYEKFDPDFIDIRTKAREVLQREDDLNEIVQLVGKDALAESDKITLETAKLLREDYLAQNAFTPYDKFCPFYKSVWMMRNIIHFNTLANQAVERAAGTDGHKITYSVIKHRLGDLFYRLVSQKFEDPAEGEEALVGKFKKLYDDLTTGFRNLEDEAR

SEQ ID NO: 4456 - protein, 499 aa, Zea mays
  Clone ID: PAT_MRT4577_127724C.1.pep
MTATPAVIGLSARGNRLLATSFGSAELAPPDAYPSRQFAAAAPKLTVVAHRASASASSPADIGGAGHARAHAIRALRNHSAPALAPPPPADPAPELDSKFEFEFESSLEAIVLLQRSMLEKQWELPFEDDISSTEDEDEDERSTVVVARSGVSARQRRMSGRRRGAVVGRKSVTVSPELMQSRNRIYLRGTVSKDLLTHKQVVQLSRKIKDGIWLQHQRSKLKEKLGNEPSYKQLAQSLRIPAPELRARMRESFLAREMLAMSNTRLVISIAQKYDNLGVELPDLIQGGLIGLLRGIEKFDASRGFRISTYVYWWIRQGVSRALADNSRSFRLPTYLHERLVAIRGAKYALEDQGIAPTIENIAESLNISEKKVHNATEAVNKVLSLDQQAFPSLNGLPGDTLHSYIEDQNVANDPWHGFEEMYLKEEVNSLINSTLNERERDIIRLYHGIGKQCHTWEDISRQFGLSRERVRQVGLVAMEKLKHAARREHLDALLEEY

SEQ ID NO: 4457 - protein, 63 aa, Zea mays
  Clone ID: PAT_MRT4577_127949C.1.pep
YIASSSVRKKKKKKKKKKKKKKKKKKKKKKKKKKKKKKKKKKKKKKKKKKKKKKKGGFKGNKF

SEQ ID NO: 4458 - protein, 165 aa, Zea mays
  Clone ID: PAT_MRT4577_127956C.1.pep
AAARNSSDTQPPVPLSRHPAPRRRETVRRRSLVSIAALAGLVRAALVFLDLQAALPPGDDGGDRLAAPGLAERFLRAFRPALYEVLASTATTCEADGGADGDDCSVCLAGFRARAVVNRLPCGHLFHRACLETWLRYERATCPFCRAHVPLPADETPLLRYPEFE

SEQ ID NO: 4459 - protein, 157 aa, Zea mays
  unsure (1)..(157): unsure at all Xaa locations
  Clone ID: PAT_MRT4577_127957C.1.pep
MGISSMPEPRDSLLGYLVYNTVISIAALAGLVRAALVFLDLQAALPPGDDGGDRLAASAPGTXERFLRAFRPALYEVLASTATTCEADGGGGGDDCSVCLAGFRARAVVNRLPCGHLFHRACLETWLRYERATCPLCRAHVPLPADETPLLRYPEFE

SEQ ID NO: 4460 - protein, 197 aa, Zea mays
  unsure (1)..(197): unsure at all Xaa locations
  Clone ID: PAT_MRT4577_128071C.1.pep
MAAKIFCLLMLLGLSASAATATIFPQWLQASIGFLLSPYLLPAGVLGWENPIFXPFWIQQGIGGGILPLLPLVLQQLLTLLQELPLVHLLAQNIRAQQLPQLGLANLGGFFXQQQVLSFNQLAVLNSGSYLQQQQLPFKQVSGGYPQQFLSFNQLTGLNSSVFLHGQQLLPFSQVAGVSPASSLSQPQLLAFYQDAV

SEQ ID NO: 4461 - protein, 223 aa, Zea mays
  Clone ID: PAT_MRT4577_128099C.1.pep
MPDSDNDSGGPSNAGGELSSPREQDRFLPIANVSRIMKKALPANAKISKDAKETVQECVSEFISFITGEASDKCQREKRKTINGDDLLWAMTTLGFEDYVEPLKHYLHKFREIEGERAAASAGASGSQQQQQQGELPRGAANAAGYAGYGAPGSGGMMMMMMGQPMYGGSQPQQQPPQPQPPQQQQQQHQQHHMAMGGRGGFGQQGGGGGSSSSSGLGRQDRA

SEQ ID NO: 4462 - protein, 561 aa, Zea mays
  Clone ID: PAT_MRT4577_12812C.1.pep
IMAVALANGGNKPPDWQDFVGIITLLIINSTISFIEENNAGNAAAALMARLAPKAKVLRNGRWTEEESAILVPGDIISVKLGDIIPADARLLEGDPLKIDQSALTGESLPVTKGPGDGVYSGSTCKQGEIEAVVIATGVHTFFGKAAHLVDSTNQVGHFQKVLTAIGNFCICSIAVGMLVELVVMYAIQHRAYRPGIDNLLVLLIGGIPIAMPTVLSVTMAIGAHRLAQQGAITKRMTAIEEMAGMDVLCSDKTGTLTLNKLTVDKSLVEVFQRGVDQDTVILMAARASRTENQDAIDATIVGMLADPKEARAGVQEIHFLPFNPTDKRTALTYLDGEGKMHRVSKGAPEQILHLAHNKSDIERRVRAVIDKFAERGLRALGVAYQEVPDGRKESPGGPWQFIGLLPLFDPPRHDSAETIRRALNLGVNVKMITGDQLAIGKETARRLGMGTNMYPSSALLGQNKDESIASLPIDDLIEKADGFAGVFPEHKYEIVKRLQARKHICGMTGDGVNDAPALKKADIGIAVADSTDAARSASDIVLTEPGLSVIISAGLTSRAI

SEQ ID NO: 4463 - protein, 53 aa, Zea mays
  Clone ID: PAT_MRT4577_128163C.1.pep
ARSIGTDHCYRPYHGAGCNIVQESPSPSQELLKNAWVIQKIQELVSAGIAHMR

SEQ ID NO: 4464 - protein, 166 aa, Zea mays
  Clone ID: PAT_MRT4577_128306C.1.pep
MASEHAAGGEAKHDQKQSLMDKAKGFVAEKIAHIPKPEATLDGVTFKGLSRECITLHSSVNVSNPYDHRLPICEVTYTLRCAGKEVASGTMPDPGWIAASGSTALEIPAKVPYDFLVSLVRDVGRDWDIDYELQVGLTVDLPIVGNFTIPLSTSGEFKLPTLKDLF

SEQ ID NO: 4465 - protein, 151 aa, Zea mays
  unsure (1)..(151): unsure at all Xaa locations
  Clone ID: PAT_MRT4577_128341C.1.pep
DVEYRCFVGGLAWATADHXQHNAFSTYGEVLESKIILDRETQRARGLGYHTFSTAEAMXNAIQGMNRKELDRRNITVNXAQSRCGTXGGRSGYSGGRGGGGYCXGGRPDGGGRYWGGSGYRGNAXYRGGGXGYGGGNRGGGYRNSDXNWKN

SEQ ID NO: 4466 - protein, 261 aa, Zea mays; identical to SEQ ID NO: 4116
  Clone ID: PAT_MRT4577_128747C.1.pep

SEQ ID NO: 4467 - protein, 261 aa, Zea mays; identical to SEQ ID NO: 4116
  Clone ID: PAT_MRT4577_128748C.1.pep

SEQ ID NO: 4468 - protein, 261 aa, Zea mays; identical to SEQ ID NO: 4116
  Clone ID: PAT_MRT4577_128750C.1.pep

SEQ ID NO: 4469 - protein, 261 aa, Zea mays
  Clone ID: PAT_MRT4577_128751C.1.pep
MASAELSREENVYMAKLAEQAERYEEMVEFMEKVAKTVDSEELTVEERNLLSVAYKNVIGARRASWRIISSIEQKEEGRGNEDRVTLIKDYRGKIETELTKICDGILKLLESHLVPSSTAPESKVFYLKMKGDYYRYLAEFKTGAERKDAAENTMVAYKAAQDIALAELAPTHPIRLGLALNFSVFYYEILNSPDRACSLAKQAFDEAISELDTLSEESYKDSTLIMQLLRDNLTLWTSDISEDPAEEIREAPKHDSSEGQ

SEQ ID NO: 4470 - protein, 348 aa, Zea mays
  Clone ID: PAT_MRT4577_128794C.1.pep
MENGGGKGDVPNDANEHCPGTQSEEAGKADACAGCPNQQICATAPKGPDPDVVAIVERLATVKHKLLVLSGKGGVGKSTFSAQLSFALAEMDHQVGLLDIDICGPSIPKMLGLEGQDIHQSNLGWSPVYVESNLGVMSIGFMLPNPDDAVIWRGPRKNGLIKQFLKDVDWGEIDYLVVDAPPGTSDEHISIVQYLQATGIDGAIIVTTPQQVSLIDVRKEINFCKKVGVPVLGVVENMSGLRQPLSDLSFVKPGEAGETDATEWALNYIKEKAPELLSVMACSEVFDSSKGGAEKMCREMGVPFLGKVPMDPQLCKAAEEGRSCFSDQKCGASAPALQSIVKKLIKTG

SEQ ID NO: 4471 - protein, 348 aa, Zea mays
  Clone ID: PAT_MRT4577_128796C.1.pep
MENGGAKGDVPDDANEHCPGTQSEEAGKADACAGCPNQQICATAPKGPDPDVVAIVERLATVKHKLLVLSGKGGVGKSTFSAQLSFALAEMDHQVGLLDIDICGPSIPKMLGLEGQDIHQSNLGWSPVYVESNLGVMSIGFMLPNPDDAVIWRGPRKNGLIKQFLKDVDWGEIDYLVVDAPPGTSDEHISIVQYLQATGIDGAIIVTTPQQVSLIDVRKEINFCKKVGVPVLGVVENMSGLRQPLSDLRFIKSDEAGETDATEWALNYIKEKAPELLSVVACSEVFDSSKGGAEKMCHEMGVPFLGKVPMDPQLCKAAEEGRSCFADQKCSASAPALRNIVKKLIKAE

SEQ ID NO: 4472 - protein, 67 aa, Zea mays
  Clone ID: PAT_MRT4577_128800C.1.pep
VVLTGVTGHRLTSSGPRSLKEYVPRAHHSAPGEGSSRTAAFLQRTSIPCAWRRPAPTRLNGGRLAPI

SEQ ID NO: 4473 - protein, 480 aa, Zea mays
  Clone ID: PAT_MRT4577_128868C.1.pep
MSFRSIVRDVRDGFGSLSRRSFEVTLASIYGLTGHHKGKTQSSSHVLDDSPSIICESRWANLPPELIRDIIRRLEADESTWPARKHVVCFAAVCRTWREMCKEIVLSPEFCGKLTFPVSLKQPGPRDGNTMVQCFIKRNKSKSTYHLYLCLSNVVTSESGKFLLSAKRHRKTTCTEYTISMDSGNISRSKRTYIGKIRSNFLGTRFLIYDTQPPYNGAVVPPAGRTSRRFNSTKVSPKLPSVSYNIAQVSYELNVLGTRGPRRMRCIMHSIPASSVEPGGTVPGQPEQIVPRALEDSFRSTASFSQSFRSTASFSKSIMDSSMDFNSARFSDIAGSSARFTGVPGSSARFAGVPGSSARFSGIAGARLDNDEESETKERPLVLRNKPPRWHEQLQCWCLNFRGRVTIASVKNFQLIAAATPPPAGAPTPSQPAPSDPDKVILQFGKVARDMFTMDYRYPLSAFQAFAICLSSFDTKLACE

SEQ ID NO: 4474 - protein, 480 aa, Zea mays
  Clone ID: PAT_MRT4577_128869C.1.pep
MSFRSIVRDVRDGFGSLSRRSFEVTLASIYGLTGHHKGKTQSSSHVLDDSPSIIRESRWANLPPELIRDIIRRLEADESTWPARKHVVCFAAVCRTWREMCKEIVLSPEFCGKLTFPVSLKQPGPRDGNTMVQCFIKRNKSKSTYHLYLCPLACCTSESGEFLLSAKRHRKTTCTEYTISMDSGNISRSKRTYIGKIRSNFLGTRFLIYDTQAPYNGAVVPPAGRTSRRFNSTKVSPKLPSVSYNIAQVSYELNVLGTRGPRRMRCIMHSIPASSVEPGGTVPPRVRQIVPRALEDSFRSTASFSQSFRSTASFSKSIMDSSMDFNSARFSDIAGSSARFTGVPGSSSRFAGVPGSSARFSGIAGARLDNDEESETKERPLVLRNKPPRWHEQLQCWCLNFRGRVTIASVKNFQLIAAATPPPAGAPTPSQPAPSDPDKVILQFGKVARDMFTMDYRYPLSAFQAFAICLSSFDTKLACE

SEQ ID NO: 4475 - protein, 480 aa, Zea mays
  Clone ID: PAT_MRT4577_128873C.1.pep
MSFRSIVRDVRDGFGSLSRRSFEVTLASIYGLTGHHKGKTQSSSHVLDDSPSIIRESRWANLPPELIRDIIRRLEADESTWPARKHVVCFAAVCRTWREMCKEIVLSPEFCGKLTFPVSLKQPGPRDGNTMVQCFIKRNKSKSTYHLYLCLSNVVTSESGKFLLSAKRHRKTTCTEYTISMDSGNISRSKRTYIGKIRSNFLGTRFLIYDTQPPYNGAVVPPAGRTSRRFNSTKVSPKLPSVSYNIAQVSYELNVLGTRGPRRMRCIMHSIPASSVEPGGTVPGQPEQIVPRALEDSFRSTASFSQSFRSTASFSKSIMDSSMDFNSARFSDIAGSSARFTGVPGSSARFAGVPGSSARFSGIAGARLDNDEESETKERPLVLRNKPPRWHEQLQCWCLNFRGRVTIASVKNFQLIAAATPPPAGAPTPSQPAPSDPDKVILQFGKVARDMFTMDYRYPLSAFQAFAICLSSFDTKLACE

SEQ ID NO: 4476 - protein, 347 aa, Zea mays
  Clone ID: PAT_MRT4577_128883C.1.pep
MADNSIEQALIENPPNALKWKPSERAKRFRRCRSTPSDPTDQKPAENGSVLKAKELFKEKRPSFMLVGLLLFAYLLVGVIIFYLFMDQLSGKTTDRVLDALYFVIVTMTSVGYGDLFPNSDTTKLLACAFVFTGMAIIALFISKAADYLVEKQEVLFFKALHMNMKGSEAKMLGAMETNRIKYKFYTVALLLAMVIVAGTVFLWKVEKLSLVDSFYCVCATITTLGYGDKSFSSKLGRVFAVFWITTSTLIMAQFFMYLAELYTERRQKILTKWVINRRITTMDLEAADIDDDRQVGAAEFVLYKLKELGKISQEEISCFLEEFDKLDVDQSGTLSTYDLTLGQTSQ

SEQ ID NO: 4477 - protein, 348 aa, Zea mays
  unsure (1)..(348): unsure at all Xaa locations
  Clone ID: PAT_MRT4577_128885C.1.pep
MADNSIEQALIENPPNVLKWKPSERAKRFRRCRSTPSDPTDQKPAENGSVLKAKELFKEKRPSFMLVGLLLFAYLLVGVIIFYLFMDQLSGKTTNRVLDALYFVIVTMTSVGYGDLFPNSDTTKLLACAFVFTGMAIIALFISKAADYLVEKQEVLFFKALHMNMKGSEAKMLGAMETNRIKYKFYTVALLLATVIVAGTVFLWKVEKLSLVDSFYCVCATITTLGYGDKSFSSQLGRTFAVFWIITSTIILALFFMYLAEIYTERRQKMLAKWVLTRRVTTMDLEAADLDSDRKVGAXAEFVVYKLKELGKISQEDISSFLEEFDKLDIDQSGTLSTYDLTQAQSGQ

SEQ ID NO: 4478 - protein, 134 aa, Zea mays
  Clone ID: PAT_MRT4577_128901C.1.pep
MAGRGKAIGSGAAKKAISRSSKAGLQFPVGRIARFLKAGKYAERVGAGAPVYLAAVLEYLAAEVLELAGNAARDNKKTRIVPRHIQLAVRNDEELSRLLGMVTIASGGVMPNIHNLLLPKKAGGSKAVAADDDS

SEQ ID NO: 4479 - protein, 409 aa, Zea mays
  unsure (1)..(409): unsure at all Xaa locations
  Clone ID: PAT_MRT4577_129094C.1.pep
GRESPALPPGAYRGVSFLSSKPALGARLRRPPPAFLLYLRRGDPRQPSTPLTLPKPELSRSQDADPNQRPLPALYSPTTPQPTAMSATATDEAAVEARLQELRGRLGKKQHFEEAVNELAAAVRDRYAGASPALRKAMYSTVCRVATVLQTRYTAPGFWHVGLNLFVGIEKLVSNPAEKEHLKTCISRAREHLDEKENEDSVPSNREADTRFLFEGHLTVGQEPPPPAWLXVAQNLTRELSILTESSGDQDXPTTRTVPRAEEITPAIMNLLETISGDRDLETALEESLQGIIEYPQRAPPASKEVVANLPVIAVTEEVMSRLGSETECAVCRENLVVDDKMQELPCKHLFHPLCLKPWLDENNSCPICRHELRTDDHVYESRKEREREEEEDRRGAANAVRGGEFIYI

SEQ ID NO: 4480 - protein, 128 aa, Zea mays
  unsure (1)..(128): unsure at all Xaa locations
  Clone ID: PAT_MRT4577_12910C.1.pep
MSDSDEHHFELDGRAGSSKTYPAHAGTVRMNCFIVIKNRPCTAVEVSTLKTDKHGHAKCYFVAIDISNGKKFEYIGPSXHTAXITAVNRTEYHMIDISDYGLASFLTSDGNTNDDLKLPTDYTLVAQI

SEQ ID NO: 4481 - protein, 383 aa, Zea mays
  Clone ID: PAT_MRT4577_129308C.1.pep
MIGFPPWNCLPTGIAKIAAAAAVVVAALASSGIALPRPRAAPPPSGFGLLMSKAKVYTDVNVLRPKEYWDYEALTVQWGEQDDYEVVRKVGRGKYSEVFEGINVNNNEKCIIKILKPVKKKKIKREIKILQNLCGGPNIVKLLDIVRDQHSKTPSLIFEFVNNTDFKVLYPTLTDYDIRYYIYELLKALDYCHSQGIMHRDVKPHNVMIDHELRKLRLIDWGLAEFYHPGKEYNVRVASRYFKGPELLVDLQDYDYSLDMWSLGCMFAGMIFRKEPFFYGHDNHDQLVKIAKVLGTDGLNSYLNKYHIELDPQLEALVGRHSRKPWLKFMNGDNQHLVSPEAIDFLDKLLRYDHQDRLTAREAMAHPYFLQVRAVENSRTRAQ

SEQ ID NO: 4482 - protein, 383 aa, Zea mays
  Clone ID: PAT_MRT4577_129310C.1.pep
MIGASPWNRLPSGIAKPAAAAAVVVAALASSFLALPRPRAAPPPAGSGPLMSKAKVYTDVNVLRPKEYWDYEALTVQWGEQDDYEVVRKVGRGKYSEVFEGINVNNNEKCIIKILKPVKKKKIKREIKILQNLCGGPNIVKLLDIVRDQHSKTPSLIFEFVNNTDFKVLYPTLTDYDIRYYIYELLKALDYCHSQGIMHRDVKPHNVMIDHELRKLRLIDWGLAEFYHPGKEYNVRVASRYFKGPELLVDLQDYDYSLDMWSLGCMFAGMIFRKEPFFYGHDNHDQLVKIAKVLGTDGLNAYLNKYHIELDPQLEALVGRHSRKPWSKFMNADNQHLVSPEAIDFLDKLLRYDHQDRLTAREAMAHPYFLQVRAVENSRTRPQ

SEQ ID NO: 4483 - protein, 381 aa, Zea mays
  Clone ID: PAT_MRT4577_12935C.1.pep
MASSTQGQVITCKAAVAYEANKPLVVEDVQVAPPQAGEVRIKILSTALCHTDYYTWSGKDPEGLFPCILGHEAAGIVESVGEGVTDVQPGDHVIPCYQAECRDCKMCNSGKTNLCGKVRGATGVGVMMSDRKSRFSVNGKPIYHFMGTSTFSQYTVVHDVSVAKINPQAPLDKVCLLGCGVSTGLGAVWNTAKVEAGSIVAVFGLGTVGLAVAEGAKSAGASRIIGIDIDTKKFDVAKNFGVTEFVDPKEHDNPIQQVLVDLTDGGVDYSFECIGNVSVMRAALECCHKGWGTSVIVGVAASGQEIATRPFQLVTGRVWKGTAFGGFKSRTQVPWLVDKYMKKEIKVDEYITHNMNLADINDAFHLLHEGGCLRCVLAMQI

SEQ ID NO: 4484 - protein, 222 aa, Zea mays
  Clone ID: PAT_MRT4577_129407C.1.pep
GADGVMIDVWWGLVEGKGPKAYDWSAYKQVFGLVHEAGLKLQAIMSFHQCGGNVGDVVNIPIPQWVRDVGATDPDIFYTNRGGTRNIEYLTLGVDDQPLFHGRTAVQMYADYMASFRENMKKFLDAGTIVDIEVGLGPAGEMRYPSYPQSQGWVFPGIGEFICYDKYLEADFKAAAAKAGHPEWELPDDAGEYNDTPEKTQFFKDNGTYLTEKGKFFLSCYS

SEQ ID NO: 4485 - protein, 95 aa, Zea mays
  Clone ID: PAT_MRT4577_129427C.1.pep
GPSRPAGRCLAGERGPALARRDTITATMEGVTSLLTTGWKTSQGAMEMPLMIQGYEKGLIEYPHHHLSQVLETRRRRPMYAPATSTSTGVPSAIT

SEQ ID NO: 4486 - protein, 73 aa, Zea mays
  unsure (1)..(73): unsure at all Xaa locations
  Clone ID: PAT_MRT4577_129440C.1.pep
LNELDHLLVSLRMLCQLGHVHALLPGRLRRGHTCQXRVRCGGTGRVGGSGSPAARTVARLWVAHRLLWSASYE

SEQ ID NO: 4487 - protein, 175 aa, Zea mays
  unsure (1)..(175): unsure at all Xaa locations
  Clone ID: PAT_MRT4577_129576C.1.pep
KDSIGPPVANARSRPPVACQAYYPLQAVTARXNGFIGIKNRPCKVVEGATXRTGHHGHAXCHFAAIDXFNGXKAPQILVLXHNCNILHGNRTEYXQLNDISEDGLASLLTSDGNTNDDLTLPTDETVAAQIKEGVESGKDLVVTVQTAMAEEQIXALKDVGPKQLACLEILYLRN

SEQ ID NO: 4488 - protein, 89 aa, Zea mays
  unsure (1)..(89): unsure at all Xaa locations
  Clone ID: PAT_MRT4577_129683C.1.pep
MAGEIFCLLMLLALSASAATATIFPQCSQAPISFLLPPYLSPAVXSVCENPNLXPYMIHQAISSCIXPLSPIFLQQTSVLXQYFPLEHL

SEQ ID NO: 4489 - protein, 77 aa, Zea mays
  unsure (1)..(77): unsure at all Xaa locations
  Clone ID: PAT_MRT4577_129823C.1.pep
MAANIFGFLMLLGLFVSAASSTIFPHCSQASIAFFLSPYLLPAVFSVCXNPILQPYRIQQVIAVCILPLSPLFPPTF

SEQ ID NO: 4490 - protein, 518 aa, Zea mays
  Clone ID: PAT_MRT4577_129850C.1.pep
MEYERIEKPFPVQGGGFSPKRLRAMLLGVDKRRKGQDGAAEEDEDGGGGGDYGALPKAHARSGAGDGGGATCEEYKDVDVVSTTSEFSSSLETAGGHRPRDAHPVATGSRTRVPPEEDSCDSESVASNFEFHKERRAAAAASVVPPFSKPAPSKWDDAQKWIASPTANCPGRGGAAPAPKKTEKPGSGIGRLPLPATKVVVEATEEIDTKRMDPSQEKREIGWQKAARWAPPDPCPEAEPCPTKTTLLAVETTVAAASAAAVNFNRHDASTTLQSAATCIPPPTTVRSVSMRDMGTEMTPIASQEPSRTGTPVRATSPNCSQPTTPRRTLGGPSAVGSFISHGGECSSSELSEQELQTKTRREIMLLGTQLGKTSIAAWASKKEEEKDASLSLKPVPMDQSTQNITAIRAAAWEEAEKAKYLARFKREEIKIQAWEDHQKAQIEAEMRKIEVEVERMRARAQDKLMTKLASARHSADEKRAAAELKRNRAAARTAEQAEHIRRTGRVPPSFGCWNWCS

SEQ ID NO: 4491 - protein, 251 aa, Zea mays
  Clone ID: PAT_MRT4577_129994C.1.pep
MGRGPVQLRRIENKINRQVTFSKRRNGLLKKAHEISVLCDAEVALIVFSTKGKLYEYSSHSSMEGILERYQRYSFEERAVLNPSIEDQANWGDEYVRLKSKLDALQKSQRQLLGEQLSSLTIKELQQLEQQLDSSLKHIRSRKNQLMFDSISALQKKEKALTDQNGVLQKFMEAEKEKNKALMNAQLREQQNGASTSSPSLSPPIVPDSMPTLNIGPCQHRGAAESESEPSPAPAQANRGNLPPWMLRTVK

SEQ ID NO: 4492 - protein, 88 aa, Zea mays
  Clone ID: PAT_MRT4577_130243C.1.pep
WGWGSSCKCGKKSPSLEETSPPAQAPVVLGVAPEKKAAPEFFKPPGESGEAPPGCSLGGNCKCAPCNCCSHRSPPMDMIFFYLAWGGG

SEQ ID NO: 4493 - protein, 227 aa, Zea mays
  Clone ID: PAT_MRT4577_130373C.1.pep
MADSPVELPNRLAILPFRNKVLLPGAIVRIRCTNPSSVKLVEQELWQKEDKGLIGVLPVRDSEATAIGSLLSPGVGSDSGGGGSKAVGSAGESSKQHLKNGKEPIQWHTKGVAARALHLSRGVEKPSGRVTYIVVLEGLCRFSVQELNAGGPYHFARVSRLDMTKTELEHAEQDADLIALSRQFKATAMELISVLEQKQKTVGRTKVLLDTSLFSTRKVRADPAVSG

SEQ ID NO: 4494 - protein, 885 aa, Zea mays
  Clone ID: PAT_MRT4577_130377C.1.pep
MSDSPVELPSRLAVLPFRNKVLLPGAIVRIRCTNPSSVKLVEQELWQKEEKGLIGVLPVRDSEATAVGSLLSPGVGSDSGEGGSKVGGSAVESSKQDTKNGKEPIHWHSKGVAARALHLSRGVEKPSGRVTYIVVLEGLCRFSVQELSARGPYHVARVSRLDMTKTELEQAEQDPDLIALSRQFKATAMELISVLEQKQKTVGRTKVLLDTVPVYRLADIFVASFEISFEEQLSMLDSVHLKVRLSKATELVDRHLQSILVAEKITQKVEGQLSKSQKEFLLRQQMRAIKEELGDNDDDEDDVAALERKMQNAGMPANIWKHAQREMRRLRKMQPQQPGYSSSRAYLELLADLPWQKVSEERELDLRVAKESLDQDHYGLTKVKQRIIEYLAVRKLKPDARGPVLCFVGPPGVGKTSLASSIAKALNRKFIRISLGGVKDEADIRGHRRTYIGSMPGRLIDGLKRVSVSNPVMLLDEIDKTGSDVRGDPASALLEVLDPEQNKAFNDHYLNVPFDLSKVIFVATANRMQPIPPPLLDRMEIIELPGYTPEEKLKIAMKHLIPRVLEQHGLSTTNLQIPEAMVKLVIERYTREAGVRNLERNLAALARAAAVKVAEQVKTLRLGKEIQPITTTLLDSRLADGGEVEMEVIPMEHDISNTYENPSPMIVDEAMLEKVLGPPRFDDREAADRVASPGVSVGLVWTSVGGEVQFVEATAMVGKGDLHLTGQLGDVIKESAQLALTWVRARAADLNLSPTSDINLLESRDIHIHFPAGAVPKDGPSAGVTLVTALVSLFSNRKVRADTAMTGEMTLRGLVLPVGGVKDKVLAAHRYGIKRVILPERNLKDLSEVPLPILSDMEILLVKRIEEVLDHAFEGRCPLRSRSKL

SEQ ID NO: 4495 - protein, 47 aa, Zea mays
  Clone ID: PAT_MRT4577_130728C.1.pep
VDRGRDHRHLAVVAAHGAHEREVFLSAPHRCCEGLGLKGCVGGGAGK

SEQ ID NO: 4496 - protein, 208 aa, Zea mays
  Clone ID: PAT_MRT4577_130815C.1.pep
MSRRAAALLLACLVAVTAAALADGALLPWFGDGRRGLDEAAVTDVGLLAADPFRILEHVPFGFDRDDVAMVSMARVDWRETPDAHEIVVDVPGMRREDLRIEVEDNRVLRVSGERRRAEERKGDHWHREERSYGRFWRRFRLPENADLDSVAASLDSGVLTVRFRKLAPEQIKGPRVVGIAGGDGGAEAKESIGTGAGDGHQTKKVEL

SEQ ID NO: 4497 - protein, 208 aa, Zea mays
  Clone ID: PAT_MRT4577_130817C.1.pep
MSRRAAALLLACLVAVTAAALADGALLPWFGGGRRGLDEAAVSDVGLLAADPFRILEHVPFGFDRDDVAMVSMARVDWRETPDAHEIVVDVPGMRREDLRIEVEDNRVLRVSGERRRAEERKGDHWHREERSYGRFWRRFRLPENADLDSVAASLDSGVLTVRFRKLAPEQIKGPRVVGIAGGDGGAEAKESIGTGAGDGHQTKKVEL

SEQ ID NO: 4498 - protein, 106 aa, Zea mays
  Clone ID: PAT_MRT4577_130847C.1.pep
GGVRATPTGIGGIKRWGPPGQVILFATVMFTLVQRVYFRSGRVCFCPSVFFIPRSICVNCKDCVYPRFKRTHASNSMDWGSMDFVTPGRVFFKLILRKKWCFLVLP

SEQ ID NO: 4499 - protein, 57 aa, Zea mays
  unsure (1)..(57): unsure at all Xaa locations
  Clone ID: PAT_MRT4577_131110C.1.pep
MASATALKSSFLPKKSEWGATRQAAAPRPSTVSMVXRAFGYADELVKTAKTIALPGR

SEQ ID NO: 4500 - protein, 243 aa, Zea mays
  Clone ID: PAT_MRT4577_13125C.1.pep
MASLFKDPSKLSAYRDRRFKGTQEEYEATLHASTTLYIGNMSFYTTEEQAYELFSRAGEIKKIIMGLDKNSKTPCGFCFVLYYSREDAEDAVKYISGTMLDDRPIRVDFDWGFEEGRQWGRGRSGGQVRDEYRTDYDPGRGGYGKMVQRELEAQRELVDYGGSFQPNAPPPYERGERKRGYGDSHRNARGDYQRKRYRSSDDRSAPEESKRAPDSDPADKNPRFREKGDSDEEDDDYDKRRRR

SEQ ID NO: 4501 - protein, 242 aa, Zea mays
  Clone ID: PAT_MRT4577_13127C.1.pep
MASLFKDPSKLSAYRDRRFKGTQEEYEAALLASTTLYIGNMSFYTTEEQAYELFSRAGEIKKIIMGLDKNSKTPCGFCFVLYYSREDAEDAVKYISGTMLDDRPIRVDFDWGFEEGRQWGRGRSGGQVRDEYRTDYDPGRGGYGKMVLRELEAQRELVDYGGSFQPNAPPPYERSERKRGHGDSHRNDRGDYQRKRYRNDDRSAPEESKRAPDSDPAEKNPRFREKGDSDEEEDDYDGKRRR

SEQ ID NO: 4502 - protein, 58 aa, Zea mays
  Clone ID: PAT_MRT4577_131301C.1.pep
AFLKLTLLLTKKKKKKKKKKKGKKKKKKKKKKKKKKKKKKKKKKKKKKKKKKKKGRPF

SEQ ID NO: 4503 - protein, 47 aa, Zea mays
  Clone ID: PAT_MRT4577_131328C.1.pep
NRVPVRICHRVSVRSTFGLGVGTPVVPIVCSRYKTRREKNEQGFCSQ

SEQ ID NO: 4504 - protein, 81 aa, Zea mays
  Clone ID: PAT_MRT4577_131498C.1.pep
AKMGARGMQAFGKHCKSLARLRRVMHPIALADRACQHDDAHTIAWSMSMLQHLEMGYMLVATEAVAEILRRCRELRFLGVR

SEQ ID NO: 4505 - protein, 313 aa, Zea mays
  unsure (1)..(313): unsure at all Xaa locations
  Clone ID: PAT_MRT4577_131516C.1.pep
GRKPCNLKPLPGANRLIKHLKTNGVPTALASNSPRCNIEAKIFFQQGWKESFSAIVGGDEVEKGKPSPNIFLEAAKRMNCAPSNCLVIEDSLXCYRWKSCRNACXIAVPSIPKKTAEFSSADEVINSLLDVRPEKWGLPPFNDWIEGTLPIEPWFIGGPVIKGFGRGSKVLGIPTANLPAENFSDVVSEHTSGVYFGWAGLSTRGIYKMVMSIGWNPYFDNTEKTVEPWLLHDFGEDFYGEEVRLAIVGYIRPEANFPSLESLIERIHEDGRVAEKALDLPMYAKYKDSPYLRNPSKHGSSTTGGTQSEMDSK

SEQ ID NO: 4506 - protein, 767 aa, Zea mays
  Clone ID: PAT_MRT4577_131643C.1.pep
MKISALLTSAGINIGLCVLFLSLYSVLRKQPANVRVYFGRRIAEEHDRLRGAFILERFVPSTGWIVKALQCTEEEILAAAGLDAVVFNRILVFSIRIFSLAAVLCVFGILPLNYFGQDIHHVRIPSESLDIFTIGNVEVKSRWLWVHCVTLYIISAVACILLYIEYKHIARLKLLHLTSATPKPNHFTVLVRGIPKADKESCSDVVDNFFTKYHSSSYLFHQVVYKVGKVQKIMTGAKKAYKKFKHFTDETVDQGCRTVTYRCCLCGASSNSFKLLNTECEQNKGKADNKSILDLDDEECTTAFVFFKTRYAALIASEILQTSNPMNWVANLAPEPEDVYWSNLWLPYKQLWARRIATLLGSIFFMFIFLIPVTFIQGLSQLEQLQQRLPFLRGILKKKYYMTQLVTGYLPSVILQIFLYIVAPIMMLFSTLEGPTSHSERKRSACCKVLYFTVWNIFFANVLSGTVISQLNVLSSPKDIPVQLAKAVPGQATFFITYVLTSGWASLSSEVMQLFGLIWNFIIKYVLRMREDTEFVPSFPYHTEVPKVLLFGLLGFTFSVLAPLILPFLLVYFCLGYVVYRNQLLNVYRTRYDTGGLYWPIAYNTVIFSLVLTQIICLGVFGLKESPVAAGFTVPLIILTLLFNQYCRNRLLPLFKTFPAQDLIDMDREDERSGRMDEIHHGLHSAYCQFADTVDVPLDKIEIVGGDEEQGSSSGQSSVKETCEDPKKHLAHPTLKGLPVNRLRHAVRSVTFLIRLQKRGLSEQKIG

SEQ ID NO: 4507 - protein, 542 aa, Zea mays
  Clone ID: PAT_MRT4577_131768C.1.pep
MSARDSNHSYKCSDDSQMPYYNNSAPVGENGRIHMAENSLGHHYSSSDIGSQRINNSNPQVFEAQYCTLESSSANGVYPAQSSTSSHSISPLSGSPLSQHDSHSDHTYSSPPSASCLTEVADLLIQQKELENSIVGPGLDISSDCSRSLLQAHVPVRPDNWRQLLGINGGDLMQVVIACGKAVAENDVFATELLISELGHLVSVSGDPMQRLGAYMLEGIVARLSSSGSMLYKSLKCKEPTSSELMSYMHLLYEICPFYKFGYMSANGAIAEAIKGENFVHIIDFQIAQGSQWVTLLQALAARPGGPPYIRITGIDDSNSAYARGGGLDIVGRTLCDVANSCGLPFEFNAVPAASHEVELQHLAIRHGEIIAVNFAYQLHHVPDESVSTENHRDRIIRMIKSINPRVVTLVEQESNTNTAPFFPRYMETLNYYTAMFESIDVALPRDDRRRMSAEQHCVARDIVNLIACEGAERVERHELFGKWKSRFAMAGFRPYPLSSVVNNTINTLLHTYNSYYRLEERDGVLYLGWKNRVLVVSSAWC

SEQ ID NO: 4508 - protein, 493 aa, Zea mays
  Clone ID: PAT_MRT4577_132012C.1.pep
MVLSHGVGGSDESVHSTFASRYVRTSLPRYRMPEQSIPKEAAYQIINDELMLDGNPRLNLASFVTTWMEPECDKLIQASVNKNYVDMDEYPVTTELQNRCVNMIAHLFNAPLGDAETAVGVGTVGSSEAIMLAGLAFKRRWQNKMKAAGKPCDKPNIVTGANVQVCWEKFARYFEVELKEVKLSDGYYVMDPQKAVDMVDENTICVAAILGSTLNGEFEDVKLLNDLLTKKNAETGWDTPIHVDAASGGFIAPFLYPELEWDFRLPLVKSINVSGHKYGLVYAGIGWCIWRTKADLPEELIFHINYLGADQPTFTLNFSKGSSQVIAQYYQLIRLGFEGYKNIMENCQENATVLKQGLEKTGKFNIVSKDNGVPLVAFSLKDSSRHNEFEISDFLRRFGWIVPAYTMPPDAQHVTVLRVVIREDFSRTLAERLVLDIEKVLHELDALPARVPSGDLAALAAAESSEREMEKQRQVISLWKRAVLAKKKTNGVC

SEQ ID NO: 4509 - protein, 402 aa, Zea mays
  unsure (1)..(402): unsure at all Xaa locations
  Clone ID: PAT_MRT4577_132084C.1.pep
MSFRSLIQDMKDEFGSISRHSLGXVRSHRSAGNAARAVAAGPSEAMDQSCWSQLPPELLREVLVRIEASESWWPARKDVVSGAGVCRTWRGIMKEAVRVPEVSGKLTFPISLKQPGPRDGTLKCFIRRNRTTQTYYLYIGLTEALADDGKFLLAARKCRKPTCTDYLISLDKVDMSKGSSTYIGKLRSNFLGTKFTVYDAHPPYDGAAVSKSRSARVVGLKQVSPRVPAGNYPVSHISYELNVLGSRGPRRMNCVMDSIPASAVKEGGKTPTQTEFPLSSLDSFPSFPFFRSKSARIDSSTSQSSSQREDRLVLKNKSPRWHEQLQCWCLNFRGRVTVASVKNFQLVASEDNGPESQESDKVILQFGKIGKDLFTMDYGYPISAFQAFAICLSSFDTKIACE

SEQ ID NO: 4510 - protein, 344 aa, Zea mays
  Clone ID: PAT_MRT4577_132172C.1.pep
MGILCLGASSTLLCGEDRNNVLGLGCGNELVEVGSGHDGLDSVVGAVFPVDTDEAVRALLEKETDHKPQDGYAERLERGGLEYSWRRDAMDWICKVHSYYRFGPLSLYLAVNYLDRFLSSYDLPHDKPWMRQLLSVACLALAVKMEETVLPLPVDLQVCDVKFEFEARTIGRMELLVLATLKWRMQAVTPFTFISYFLDKFNGGKPPSLALASRCTDIIIGTLKGSTFLSFRPSEIAAASALAAVSENQVVGSSSALSASEVPINKEMIARCYELLQEQALVRKTGHINGSPSVPQSPIGVLDATCFSFRSEDVRLGSSQSNNISSSSNDNQVSKRRRLSISPI

SEQ ID NO: 4511 - protein, 60 aa, Zea mays
  Clone ID: PAT_MRT4577_132351C.1.pep
EKHEAKKAPEHAHLHKIEEEVPAAPPLGSRGFAFHEHHEKKKARKHPEEAGGEKKHHFFG

SEQ ID NO: 4512 - protein, 114 aa, Zea mays
  unsure (1)..(114): unsure at all Xaa locations
  Clone ID: PAT_MRT4577_13259C.1.pep
DPRVXGILPLSFLFFQQSSXLLHQXPLFHLLSQNIMSQQLQQLVLANLAAYSHXLLFFTFNQLTALNSTSYLLQQQLPFSQLPAAYLHLFLSFNHLPILNSPVYSQHQQLLPFI

SEQ ID NO: 4513 - protein, 206 aa, Zea mays
  Clone ID: PAT_MRT4577_132612C.1.pep
MRTICDVCESAPAVLFCAADEAALCRPCDEKVHMCNKLASRHVRVGLADPNKLVRCDICENSPAFFYCEIDGTSLCLSCDMTVHVGGKRTHGRYLLLRQRVEFPGDKPGHMDDVPMEIQDPENQRDQKKPPKEQTANHHNGDDPATDGNCDDQGNIDSKMIDLNMRPVRTHGQESNSQTQGVGLSVNNHDSPGVVPTSNSERDTSK

SEQ ID NO: 4514 - protein, 206 aa, Zea mays; identical to SEQ ID NO: 4513
  Clone ID: PAT_MRT4577_132613C.1.pep

SEQ ID NO: 4515 - protein, 205 aa, Zea mays
  Clone ID: PAT_MRT4577_132614C.1.pep
MRTICDVCESAPAVLFCAADEAALCRPCDEKVHMCNKLASRHVRVGLADPNKLARCDICENSPAFFYCEIDGTSLCLSCDMTVHVGGKRTHGRYLLLRQRVEFPGDKPGHMDDVPMEIKDPENQREQNTPKEQMANHHNVNDPVSDGNCDGQGNIDSKMIDLNMRPARTHGQGSNSQTQGVDLSVNNHDSPGVVPTSNSERDAIK

SEQ ID NO: 4516 - protein, 127 aa, Zea mays
  unsure (1)..(127): unsure at all Xaa locations
  Clone ID: PAT_MRT4577_132616C.1.pep
RSCPSSHNYDSAVDKLDNTQWYVVWNKDMNTRILPEYVVSFKCSKLQLTQELSEATSKLKKPXEWLAXFPTLLAEIEKIVPDKCDLLQESYSRFKMGRIKKDQFIRFLRNYVGDKVLTTVAKKLRGC

SEQ ID NO: 4517 - protein, 103 aa, Zea mays
  Clone ID: PAT_MRT4577_13264C.1.pep
SDETTTGVKRLHQTQETGALLFPAINVNDSVTKSKFDNPHGCRHSLPDGPTRATDVTIAGQVAVVCGHGDVGKGRAAALKQAGARVTVTDTDPICGLQALTEG

SEQ ID NO: 4518 - protein, 51 aa, Zea mays
  unsure (1)..(51): unsure at all Xaa locations
  Clone ID: PAT_MRT4577_132703C.1.pep
QQCHSNSFWHXGTNYPGNRLQLCPQNPVLFTRSKRALGPPQHPFLANPVNH

SEQ ID NO: 4519 - protein, 167 aa, Zea mays
  Clone ID: PAT_MRT4577_132831C.1.pep
TIIYNQESYLCSCFLHKVKLHFADNALRMIAKKALAKETGARGLRSIMEDILTEAMFEIPDGRHGKEKVIAVLVDEESVGPLHSRGCRAKIFRDDGALELYVYQNNIKLPGLDTEQPQTQTHFPALPSSRIIGNKALDLPDKFLVFHRCMNGLHGYYARSTILHNKI

SEQ ID NO: 4520 - protein, 727 aa, Zea mays
  Clone ID: PAT_MRT4577_132874C.1.pep
MKSAQATRKPSKASSTAGLKRGRRAVFESSESSISETDSDGEVEIPKHGPAENSAGPGQQTRRSSRQKQEVKYNEDSDDDNDDVEDDDNTVEDDFVDSPALKRLRKGGMFHGDHSTKTAKLNEDTAGHNSVNSWGNIKDKKNGGMPCEEKTSNGVEQMKRETMHVGENSDGKEELFHSVSNNGLGLNDDDASDDNKFTFPDPEFFDFDKLRDASQFRANQVWAVYDDQGCMPRFYARITRVKMVPKFMLQFVWLEFNPANKAEEAWSYRGLPVACGHFTHGLSETTSETGMFSRIISLERSKTKNFYEIYPRKGEVWALFKGWDIGWSSDAGIHKKMNHRYEVVQVLSDLTTSTSIIVMPLVKLKGYVSLFVQSGEAAPYVIPQVDTLRFSHCVPHYLTSGTEKEGIPEGSLELDPAALPSNLEEAFPSANPECSSARSQESDSKNAGLSSGNRKGSMNVGQGQHKIAANGRVCTKTTKVENIKHNIDLSEVGDVDDDSICQTEYVCAESEFYDFSRIRFLQKFSSGQIWALYSDIDKFPNYYAFIQKVDLKNDKVQVRWLDVCPQGEVEKRLSQDRTIGIGTFRVGYIHDMMTYTGTDAFSHLVEARPTGRKGEYEILPRLGEIWAVYKNWSAGWTAQDFEKCEYELVEIFGYTDSSIQVQLVRKVDGYKMVFMSYRAGGVKTIRRDEYPKFSHQIPCFHLTHEKGGKLRGYLELDPLSLPEEFLC

SEQ ID NO: 4521 - protein, 196 aa, Zea mays
  unsure (1)..(196): unsure at all Xaa locations
  Clone ID: PAT_MRT4577_132927C.1.pep
MSKTALLTPYKMGRFDLSHRVVLAPLTRERSFGNVPQPHAILYYQQRTTKGGLLIAEATGVSDTAQGYKDTPGIWTKEQVEAWKPIVNGVHAKGGIFFCQIWHVGRVSNHTFQPNGQAPISSTDKPLKPVVRADGIDVPTISTPRRLQTNEIPLVINDFRAAARNAIEAGFDGVEIHGAHGYLIDQXLKDQVNDRT

SEQ ID NO: 4522 - protein, 98 aa, Zea mays
  Clone ID: PAT_MRT4577_132953C.1.pep
SSPNGAAKQGPVAFPKKNLISMYQNYSVSLPIVMFNFYFCGANTESAPRWRPCRVVPPLVWCVWVWSPLPASKGARLYLKPCFHCGHHRQTLSKCQFG

SEQ ID NO: 4523 - protein, 428 aa, Zea mays
  Clone ID: PAT_MRT4577_132954C.1.pep
MSSSAPAPAAMAVDDAEDDQLASMSTEEITRASRLLDNEIRVHKDELQRSNLELESIKEKTKENQEKIKLNKQLPYLVGNIVEILEMNPEDEAEEDGANIDLDSQRKGKCVVLKTSTRQTIFLPVIGLVDPDKLKPGDLVGVNKDSYLILDTLPSEYDSRVKAMEVDEKPTEDYNDIGGLEKQIQELVEAIVLPMTHKDRFQKLGIRPPKGVLLYGPPGTGKTLMARACAAQTNATFLKLAGPQLVQMFIGDGAKLVRDAFQLAKEKAPCIIFIDEIDAIGTKRFDSEVSGDREVQRTMLELLNQLDGFSSDERIKVIAATNRADILDPALMRSGRLDRKIEFPHPSEEARARILQIHSRKMNVNPDVNFEELARSTDDFNGAQLKAVCVEAGMLALRRDATEVTHEDFNEGIIQVQAKKKSSLNYYA

SEQ ID NO: 4524 - protein, 428 aa, Zea mays
  Clone ID: PAT_MRT4577_132956C.1.pep
MSSSAPAPAAMAVDDAEDDQLASMSTEEIIRASRLLDNEIRVHKDELQRSNLELESIKEKTKENQEKIKLNKQLPYLVGNIVEILEMNPEDEAEEDGANIDLDSQRKGKCVVLKTSTRQTIFLPVIGLVDPDKLKPGDLVGVNKDSYLILDTLPSEYDSRVKAMEVDEKPTEDYNDIGGLEKQIQELVEAIVLPMTHKDRFQKLGIRPPKGVLLYGPPGTGKTLMARACAAQTNAPFLKLAGPQLVQMFIGDGAKLVRDAFQLAKEKAPCIIFIDEIDAIGTKRFDSEVSGDREVQRTMLELLNQLDGFSSDERIKVIAATNRADILDPALMRSGRLDRKIEFPHPSEEARARILQIHSRKMNVNPDVNFEELARSTDDFNGAQLKAVCVEAGMLALRRDATEVTHEDFNEGIIQVQAKKKSSLNYYA

SEQ ID NO: 4525 - protein, 99 aa, Zea mays
  unsure (1)..(99): unsure at all Xaa locations
  Clone ID: PAT_MRT4577_133024C.1.pep
MAAKIFSLLMLLGLSASAATVTICPQCSQAPIASXLLPPYLXIGVLRMXEIPIFQPYRIQQAFAAGILPLSPXLLLQHSLAPLQXVPLVDLLAQNIRAQ

SEQ ID NO: 4526 - protein, 264 aa, Zea mays
  Clone ID: PAT_MRT4577_133069C.1.pep
GLWRGRKDAKGGHCMVAWEKVCRPLHMGGLGISNLTKLCWALRMRWLWLQKTDSSRPWVDLPIQVPSIARSFFSAVLMSEVGNGANTLFWVDKWINGKKVADIAPRLFCTISKRIANKRTVQEAMDNRRWRGDIRGALSAGALIDFLHLWEALTDFQLHPDIEDRHIFTIAPDGNYSAKVAHEGLFQGSCSFLHHKRIWKSWMPPKCHFFLWLVAHDKCWTADRLQKRGMNHPARCPLCDQEPESINHLLGSCVFSRVFWYRLL

SEQ ID NO: 4527 - protein, 348 aa, Zea mays
  Clone ID: PAT_MRT4577_133091C.1.pep
MAPPAHDRLRRLVLLLVVATAAAALLLAPTTADAALPRVQHTPTKADGSLAILVVGDWGRRGQFNQTLVAQQMGVVGQKLDIDFVISTGDNIYDDGIANTSDPLFKESFSNIYTANSLQKPWYLVLGNHDYTGNALAQLDPAIRKVDSRYTAIAKSFIVNSGVADFFLVDTTPFIVHYWNNTKFDWRGVAPRDTYIANLLKDLKCALTASKAPWKIVVGHHPISSACGHGNNTELEELLLPVLRTHGVDMYLNGHDHCLQRVSSRDSRLQLLTSGGGSKAWAGKFKPTLDKVEFLYDGQGFMSMRLSRTEARLAFFDVAGSVLHCWTMHAQKLKTTTTTTAAAAAAGH

SEQ ID NO: 4528 - protein, 446 aa, Zea mays
  Clone ID: PAT_MRT4577_133158C.1.pep
MQEQDVDDGGGRTTQQQEKSIDDWLPINSSRKAKWWYSAFHNVTAMVGAGVLGLPYAMSELGWGPGIAVMILSWIITLYTLWQMVEMHEMVPGKRFDRYHELGQHVFGDRLGLWIVVPQQLAVEVSLNIIYMVTGGQSLKKFHDVICDGGRCGGDLKLSYFIMIFASVHLVLSQLPNFNSISAVSLAAAVMSLSYSTIAWGASLHRGRREDVDYHLRATTTPGKVFGFLGGLGDVAFAYSGHNVVLEIQATIPSTPDKPSKKAMWKGAFVAYVVVAICYFPVTFVGYWAFGSGVDENILITLSKPKWLIALANMMVVVHVIGSYQVYAMPVFDMIETVLVKKMRFAPSLTLRLIARSVYVAFTMFLGITFPFFGGLLSFFGGLAFAPTTYFLPCIMWLKVYKPKRFGLSWFINWICIVIGVLLLILGPIGGLRQIILSATTYKFYQ

SEQ ID NO: 4529 - protein, 159 aa, Zea mays
  Clone ID: PAT_MRT4577_133328C.1.pep
MDSTGTGAAGKGKKGAAGRKVGGPRKKSVSRSVKAGLQFPVGRIGRYLKKGRYAQRVGTGAPVYLAAVLEYLAAEVLELAGNAARDNKKTRIIPRHVLLAIRNDEELGKLLGGVTIAHGGVLPNINPVLLPKKTAEKASSGGSKEAKSPKKAAKSPKKA

SEQ ID NO: 4530 - protein, 159 aa, Zea mays
  Clone ID: PAT_MRT4577_133332C.1.pep
MDSTGTGAGGKGKKGAAGRKVGGPRKKSVSRSVKAGLQFPVGRIGRYLKKGRYAQRVGTGAPVYLAAVLEYLAAEVLELAGNAARDNKKTRIIPRHVLLAIRNDEELGKLLGGVTIAHGGVLPNINPVLLPKKTAEKASSVGSKEAKSPKKAAKSPKKA

SEQ ID NO: 4531 - protein, 159 aa, Zea mays; identical to SEQ ID NO: 4530
  Clone ID: PAT_MRT4577_133333C.1.pep

SEQ ID NO: 4532 - protein, 159 aa, Zea mays
  Clone ID: PAT_MRT4577_133334C.1.pep
MDSTGTGAGGKGKKGAAGRKVGGPRKKSVSRSVKAGLQFPVGRIGRYLKKGRYAQRVGTGAPVYLAAVLEYLAAEVLELAGNAARDNKKTRIIPRHVLLAIRNDEELGKLLGGVTIAHGGVLPNINPVLLPKKTAEKASSGGSKEAKSPKKAAKSPKKA

SEQ ID NO: 4533 - protein, 104 aa, Zea mays
  unsure (1)..(104): unsure at all Xaa locations
  Clone ID: PAT_MRT4577_133459C.1.pep
GSTAFGFVGERIEMAGSDGEYRWFRGGLAWGTDDHSVHNALRNYREVLESKIILXRETHRSRGLGLGTLCTEEAMRNAIEGMNGKELDGRNITVNEGQSRGGRG

SEQ ID NO: 4534 - protein, 96 aa, Zea mays
  unsure (1)..(96): unsure at all Xaa locations
  Clone ID: PAT_MRT4577_133550C.1.pep
GKXETELTKICDGIPKLLECEVVPSSTGPESKGLYFKKKGDYYRYLAEFKTGAERKDAAENTMVAYKAAQDIALAELAPTHPIRLGLALNFSGVYY

SEQ ID NO: 4535 - protein, 106 aa, Zea mays
  unsure (1)..(106): unsure at all Xaa locations
  Clone ID: PAT_MRT4577_133579C.1.pep
NMVSPMILPSMMLSLMTPSIISPIMMPSMIPPMMMPSMVSSMIMPNMMTVPLCYSDSISLIILQQLXLFMFSPTIVVIAPMFLXRPPLGAAILDISICGELLVVFY

SEQ ID NO: 4536 - protein, 69 aa, Zea mays
  Clone ID: PAT_MRT4577_133649C.1.pep
HGEEPSFGAFFPKDGLDYVSCSPFRVPIGRQPQSQGLSQAASSLATGVPFDGGCGDPQYYSKAMIGEHS

SEQ ID NO: 4537 - protein, 391 aa, Zea mays
  Clone ID: PAT_MRT4577_133839C.1.pep
MLSSPLPPSFRLSLPTRPRAAPIFFPLDGAHKSAPNRQTKTRPRPPRQSSVLTFGPSSGYPAAAMAAEASAVQQLAGLLDQVDAPLKKTFENVHQGYPTETLLRFLKAREWHVNKAHRMLEDSLNWRMQNEIDSILEKPIIPVDLYRSIRDTQLIGLSGYSKEGIPVFAVGVGLSTYDKASVNYYVQSHIQINEYRDRFILPTVTKKYGRPITTCIKVLDMTGLKLSALHQMKIVTAISTVDDLNYPEKTETYYIVNAPYIFSACWKVVKPLLQERTRKKVHVLRGCGRDELLQIMDYSSLPHFCRQEGSGSSKHSSGDADNCFSLDHPFHQELYSFIQEQALNQELIKQGSLHVKIPEQDPEDAKIVEVIEAEFHKLGVQNGSANGIDQA

SEQ ID NO: 4538 - protein, 161 aa, Zea mays
  Clone ID: PAT_MRT4577_133893C.1.pep
MAAAATAIATPSVAPEAGDRKAVAPPVDAVDLELELELEEKHVLAVDDSSVDRAVIAKILRSSKYRVTTVDSATRALELLALGLVPDVNMIITDYWMPGMTGYELLKHVKESSALRAIPVVIMSSENVPTRISRCLEEGAEDFLLKPVRPADVSRLCSRIR

SEQ ID NO: 4539 - protein, 86 aa, Zea mays
  unsure (1)..(86): unsure at all Xaa locations
  Clone ID: PAT_MRT4577_133896C.1.pep
CTERCLDWGEAGEPDLIVDDGSDXTLLIHDGVKAAVDYEQTGKIPDPASTDNAAFKIVLTIVRDGLNADPKKYRKLNERLVGVSEE

SEQ ID NO: 4540 - protein, 552 aa, Zea mays
  unsure (1)..(552): unsure at all Xaa locations
  Clone ID: PAT_MRT4577_133990C.1.pep
MNSSRSLLSSPLFASSSPNFRSSASVSSSPSPSRTTAVPMIHDTSSSRASTACHYSPSLVAEEQLHGSKDTLTLKGEKALLELLLGMALDQHVDGRKLITQQEAEDSDFESYLREATSRVLYQPTFMYGASEFISSEEDDDDSVSESSSASLAKPAGTLDLGKLTEEPQLDVPQPHRRSVDPNHSYDQVFIRSTRLLERRSKKRNGGHRALDNGVACSGVNSKRKDKFGRVLXIQTSLFRLFLRDRETTEFLTAKEEKQMFSQIQNLMKLEGAQRNLQAQCGREPTVEEWAQAVGMSCRELQSCVRTGRRCREKMARSNFRLVIHVARKYEGCGLDIQDLVQDGCCGLMKTFEKFNPSKGCRFPTYAYWWIRQSIKKSIFKNSRLIRLPXESVYALLRKVGKARMECIMDGEQPTNEVVARRAGITIEKLAKLRAKTRKVRSMQDRVWSDDGVTYQEITEDPNIEGPEVSVDRLMMRQQVRSFLAGILSPREKEIIEHRFGIHDGQPKTLHVIGDMYGLSKERIRQVQNKALDKLRNSISAQGFHVYFDLLT

SEQ ID NO: 4541 - protein, 42 aa, Zea mays
  Clone ID: PAT_MRT4577_134019C.1.pep
TLRSVSPIECAMNGGKSKGAAKADAKLAGKSKGAENPTKGTK

SEQ ID NO: 4542 - protein, 88 aa, Zea mays
  unsure (1)..(88): unsure at all Xaa locations
  Clone ID: PAT_MRT4577_134122C.1.pep
VTVLHMPSLRYIWVQGSRASWTGQNLMLMARPXWYILFAPPFPEGAYRVMADFXPCVDPHAQVLAYYPPAVCRPACPQWLVALPPVSM

SEQ ID NO: 4543 - protein, 51 aa, Zea mays
  Clone ID: PAT_MRT4577_134246C.1.pep
MTMEQTFIMIKPDGVQRGLIGDIISRFEKKGFYLKGMKFMNVQRSFSRRIR

SEQ ID NO: 4544 - protein, 578 aa, Zea mays
  Clone ID: PAT_MRT4577_134280C.1.pep
MWVENRLSTSWGFKCSKLSIVRNALPSKTPKASVSWKSKDDSNAIPRHLEQSHCKKTSRATRTHFKAMPNLIHKAKNVDTSNLNDGTSGSSWRGQADAYKGEDINIGKECTKTSELLKSREASRKSNILVVDRKDPNKDEPDKVKGIQDEVMTKEEGVKGHTCEGRATCWSCLKQANTTKTNDAPNLGSLLVGNEHMQGLMSNLRDNSSHLFEKNHSRHQRDDPCEYRETNLKFPNRIQSVGGNGKTNDVTSRRKRLLLEEKASAHVQNDLTYGPMKRRRYIEANEDEEEQNDLTYGPMKRRRYIEANEDEEDYVGDHHPVHIEDATTELTPQDSISKHCVERQCYCCSKPIDIPRWSGTFKIDGKEHISLAGHLSSKSCEKVWKLSSLPKVVQVTKVPRMAVWPKIFKASEPSGDNIGLYFFPPEMRHDEELDQLVNEVMDKDLILRAIIGEAEMLIFPSVLLPERYQTFQTKHYLWAAFKAKEDKGDAIVEEEVEKGNCVSNQPDKVQSDNASFPSNHGLDRPSMEAPPQSSSSVFGIVVRQAPNLEPEVKRFIQEMERKGALVTVMRGEAIGGGP

SEQ ID NO: 4545 - protein, 92 aa, Zea mays
  Clone ID: PAT_MRT4577_134332C.1.pep
MAGAACTEAVTVSIFYTVTARPTAAGLLGGAAADPRQPHVALGPGAGGGHDAPPPAGRRRRCRGRRRQAQADDIAPVRGQHERLLHVHLNHG

SEQ ID NO: 4546 - protein, 449 aa, Zea mays
  Clone ID: PAT_MRT4577_134409C.1.pep
MYRAKRAALSPKVKRRVGKYELGRTIGEGTFAKVRFAKNTENGEPVAIKILDKEKVKRHRLVEQIKREICIMKLVRHPNVVRLFEVMGSKARIFIVLEYVTGGELFEIIATNGRLKEDEARKYFQQLINAVDYCHSRGVYHRDLKLENLLLDAAGNLKVSDFGLSALTEQVKADGLLHTTCGTPNYVAPEVIEDGGYDGATADIWSCGVILFVLLAGYLPFEDDNIIALYKKISEAQFSCPSWFSAGAKNMITRILDPNPTTRITISQILEHPWFKKGYKPPVFDEKYQTSLDDVDAAFGDSEDRHVKEETEDQPTSMNAFELISLNQALNLENLFEAKEEYKRETRFTSQCPPKEIITKIEEAAKPLGFDVQKKKYKMRMENPKAGRKGNLNVATEVFQIAPSLHVVELKKAKGDTLEFQKFYRSLSTQLKDVVWKCDGEVDGNSAAA

SEQ ID NO: 4547 - protein, 449 aa, Zea mays; identical to SEQ ID NO: 4546
  Clone ID: PAT_MRT4577_134410C.1.pep

SEQ ID NO: 4548 - protein, 120 aa, Zea mays
  Clone ID: PAT_MRT4577_134413C.1.pep
MAGRGKAIGSGAAKKAMSRSSKAGLQFPVGRIARFLKAGKYAERVGAGAPVYLAAVLEYLAAEVLELAGNAARDNKKTRIVPRHIQLAVRNDEELSRLLGTVTIASGGVMPNIQCQGCGW

SEQ ID NO: 4549 - protein, 323 aa, Zea mays
  Clone ID: PAT_MRT4577_134423C.1.pep
MGVLEDLVARAGGCAVIDGGFATQLEALGADINDPLWSAACLITRPHLVKEVHMQYLEAGADVIISSSYQATIPGFIARGMSVAEAEDLLRTSVKLANEARDEFWKSTLRKSKPIYNRALVAASIGSYGAYLADGSEYSGSYGADITAEKLKDFHRRRLQVLASAGPDLIAFEAIPNQMEAQALVELLEEEKVQIPSWICFSSVDGKNLCSGESFADCLKILNASEKVAVVGVNCTPPQFIEGIICEFRKQTKKAIAVYPNSGEVWDGRAKRWLPVECLGHKSFDALAKRWQEAGASLIGGCCRTTPSTIRAVSKILKGRTGH

SEQ ID NO: 4550 - protein, 617 aa, Zea mays
  unsure (1)..(617): unsure at all Xaa locations
  Clone ID: PAT_MRT4577_13464C.1.pep
MFDDAGAVAVKRMRLWEEDEVEVEEEGMEVDAEPGWPWGTPAAGLSRAAAIVVADAAEPDFPVIYVNAAFESATGYRAHEVLGRNCRFLQFRDPRAQRRHPLVDPMVVSEIRRCLNEGIEFQGELLNFRKDGAPLYNRLSLIPMHGDDGYVTHVIGIQLFSEANIDLSSVSYPVYKQQXQQAHHSRSELSFPXHAPKVQSADHCGMLQLSDEVLAHNILSRLSPRDVASIGSVCTRMHELTKNDHLRKMVCQNAWGRDATVKLEMSTKMVGWGRLARELTTLEAASWRKFTVGGRVEPSRCNFSACAVGNRLVLFGGEGVNMQPMDDTFVLNMEAARPEWRRVKVSASPPGRWGHTLSWLNGSWLVVFGGCGQQGLLNDVFVLDLDAQQPTWREVASEGPPLPRSWHSSCTLDGSKLVVSGGCTESGVLLSDTFLLDLTKEKPAWREIPTSWSPPSRLGHTMSVYGTTKLLMFGGLAKSGSLRLRSSDAYTMDVGEDSPQWRQLATTGFPNVGPPPRLDHVAVSLPCGRIIIFGGSIAGLHSPAQLFLVDPAEEKPTWRILNVPGKPPKFAWGHSTCVVGGTRVLVLGGHTGEEWILNELHELCLASRPDDDDDDRY

SEQ ID NO: 4551 - protein, 216 aa, Zea mays
  unsure (1)..(216): unsure at all Xaa locations
  Clone ID: PAT_MRT4577_134651C.1.pep
LQMLLRLSASAATATIXPECSQAPIACLLPPYLAEPVASVCASGSLQPYRIQHASAAGILPLSPLVLQQSSALLQRLPXLVHLLXAQNIRAQQVQQLVLPNLAXAYSQEQQCLPFNRLGSLNSASYLQQQQLPFSQLPGAYPQQFLAFNQTSSIGTSPAYLQQXQLLPFSPLAGGSPATFLTHPRWWPVYQHVGXPNAGTLLQLQQLVAFNQLALT

SEQ ID NO: 4552 - protein, 144 aa, Zea mays
  unsure (1)..(144): unsure at all Xaa locations
  Clone ID: PAT_MRT4577_13487C.1.pep
NIRAHQLRQLVLPNLADYSQQQQLLPFNQLARLXNSVSYSQHQQLPFRRLPVAYPQQCLPCNQLAGLNSPAYLQQQHLLPFSQIAGVSPATFLTQPQMMPFYQHAEPNAGTLLQLHPXLPFNQLASTNLAAFYQQPMIXGGALF

SEQ ID NO: 4553 - protein, 96 aa, Zea mays
  Clone ID: PAT_MRT4577_135032C.1.pep
MDTDIGSVDGAASNQTVGCPASAPGCPMASTPAQPAATLSAGEASLRRHSSRCLVQVGVNDVFAVSGDLNLTLVDHLIDEPGLLLDGCCNELNAGY

SEQ ID NO: 4554 - protein, 55 aa, Zea mays
  Clone ID: PAT_MRT4577_135057C.1.pep
NFPHSPVAAAPVAAIDASGAGSKVYKGAAVRKAVGPRNKSVTRSVKAGLQFPVGR

SEQ ID NO: 4555 - protein, 97 aa, Zea mays
  Clone ID: PAT_MRT4577_135079C.1.pep
RFQVAQSNYNAQLLIIQQTRDTTFRPPGTFDLEPKLTRSYHVLNKREHSVAGTRFTFKRTRTLTRRSTLKQTFGKSKTIPDPQANARYVLIAQGPAT

SEQ ID NO: 4556 - protein, 115 aa, Zea mays
  Clone ID: PAT_MRT4577_135081C.1.pep
LPPPKKRFFLMGGPFMAATFFPPVYKLPPPMDPFGGPSHRRAVGVYFSVAGQGHFFGIFVPDSPRVGRSMKGLSKACSSPGKLLLISPWRLVIKGDLWNFNPGCLIRQTAPCLYN

SEQ ID NO: 4557 - protein, 611 aa, Zea mays
  Clone ID: PAT_MRT4577_135170C.1.pep
MATMESLIGLVNRIQRACTVLGDHGGGGGEGSLWEALPSVAVVGGQSSGKSSVLESIVGRDFLPRGSGIVTRRPLVLQLHKTDGGHEYAEFLHAPRKRFTDFAAVRKEIADETDRITGKTKAISNVPIHLSIYSPHVVNLTLIDLPGLTKVAVEGQAESIVQDIENMVRAYVDKPNCIILAISPANQDIATSDAIKLARDVDPSGDRTFGVLTKLDLMDKGTNAVDVLEGRQYRLQHPWVGIVNRSQADINKNVDMLSARRKEKEYFESSPEYGHLAHKMGAEYLAKLLSQHLEAVIRAKIPSIIALINKTIDEIEAQLDRLGRPIGGDAGAQLYTILDMCRAFDRVFKEHLDGGRPGGDRIYGVFDNQLPAALKKLPFDRHLSMQNVRKVISEADGYQPHLIAPEQGYRRLIDSSLSYFKGPAEASVDAVHLVLKELVRRSIAATEELKRFPTLQSDIAAAANDSLERFREDGRKTVLRLVEMEASYLTVEFFRKLPTEPEKAADKNTPVSDRYQDNHLRRIGSNVSSYINMVCETLRNTVPKAIVHCQVKEAKRNLLNRFYAHVGSKEKKQLSAMLDEDPALMEKRDALVKRLELYKSARNEIDSVAWK

SEQ ID NO: 4558 - protein, 119 aa, Zea mays
  unsure (1)..(119): unsure at all Xaa locations
  Clone ID: PAT_MRT4577_135239C.1.pep
LSPAVSPVCENPRLLSYRIQXAISAGILPXHPXFLQQSSALXQQLPLVHLLAQNIRAQQLQQLVLANLAVYSKQQQFLSFNQLAALNSAYYLTQQTPFSQLAAVFTQQFLPFNQLEVFN

SEQ ID NO: 4559 - protein, 52 aa, Zea mays
  unsure (1)..(52): unsure at all Xaa locations
  Clone ID: PAT_MRT4577_135272C.1.pep
MAAADVEYRRLVXGLAWATSNESLENAFTSYGEILDCKVITDRETVRYRGFK

SEQ ID NO: 4560 - protein, 240 aa, Zea mays
  Clone ID: PAT_MRT4577_135567C.1.pep
MAAAPFAIAGRLSPVARLPVRAWRPAHGFASSGRARSLAVASAAQENRDNSVDVQVSQNGGNRQQGNAVQRRPRRATALDISPSPFGLVDPMSPMRTMRQMLDTMDRLFDDAVGFPMGTRRSPATTGDVRLPWDIVEDEKEVKMRIDMPGLARDEVKVMVEDDTLVIRGEHKKEEGAEGGSGGDGDGWWKQRSVSSYDMRLALPDECDKSKVRAELKNGVLLVTVPKTEVERKVIDVQVQ

SEQ ID NO: 4561 - protein, 123 aa, Zea mays
  Clone ID: PAT_MRT4577_135894C.1.pep
LPPVMPLGPMNPCMQFCMMHQGLASLMGGPSLMLQQLLAFPLQPMPVMMPPMMTPNPMSPLMMPGMMSPMVLPGMMSQMMMPQCPCDPVSQILLPQRFPFMFPPRALAIPPMFFQQPFVGGAF

SEQ ID NO: 4562 - protein, 609 aa, Zea mays
  Clone ID: PAT_MRT4577_1358C.1.pep
METLLAGNPANGVAKPTCNGVGALPVANSHAIIATPPAAATLAPAGATLGRHLARRLVQIGASDVFAVPGDFNLTLLDYLIAEPGLTLVGCCNELNAGYAADGYARSRGVGACAVTFTVGGLSVLNAIAGAYSENLPVVCIVGGPNSNDYGTNRILHHTIGLPDFSQELRCFQTITCYQAIINNLDDAHEQIDTAIATALRESKPVYISVSCNLAGLSHPTFSRDPVPMFISPRLSNKANLEYAVEAAADFLNKAVKPVMVGGPKIRVAKAREAFAAVADASGYPFAVMPAAKGLVPEHHPRFIGTYWGAVSTTFCAEIVESADAYLFAGPIFNDYSSVGYSLLLKREKAVIVQPDRMVVGDGPAFGCILMPEFLRALAKRLRRNTTAYDNYRRIFVPDREPPNGKPNEPLRVNVLFKHIKGMLSGDSAVVAETGDSWFNCQKLRLPEGCGYEFQMQYGSIGWSVGATLGYAQAAKDKRVIACIGDGSFQVTAQDVSTMLRCGQKSIIFLINNGGYTIEVEIHDGPYNVIKNWDYTGLVNAIHNSEGNCWTMKVRTEEQLKEAIAMATGDKKDCLCFIEVIVHKDDTSKELLEWGSRVSAANSRPPNPQ

SEQ ID NO: 4563 - protein, 592 aa, Zea mays
  unsure (1)..(592): unsure at all Xaa locations
  Clone ID: PAT_MRT4577_135914C.1.pep
MGLCHGKPTQIPEAEAEEDPHVAXGAGDSGDGATSPSAAAPTAKPGTPKQPKFPFYLPSPLPPSSYKGSPANSSVSSTPARGGLKRPFPPPSPAKHIRALLARRHGSVKPNEVSIPEGGEPELGLDKSFGFSKHFFAKYDLGEEIGRGHFGYTCSAKAKKGEHKGQDVAVKVIPKAKMTTAIAIEDVRREVRILSSLTGHSNLVQFYDAFEDEDNVYIVMELCKGGELLDRILARGGKYSEEDAKVVMVQILSVVSFCHLQGVVHRDLKPENFLFSSKDENSPLKVIDFGLSDFVKPDERLNDIVGSAYYVAPEVLHRSYGTEADMWSIGVIAYILLCGSRPFWARTESGIFRAVLKAEPSFDEAPWPTLTAEAKDFVKRLLNKDYRKRMTAAQALSHPWIRNSQQVKVPLDMIIYKLMRAYISSSSLRKSALRALAKTLTTDQLFYVREQFELLGPNKNGYISLQNLKSALAKNSTDAMKDSRVVDFVNTVCALQYRKLDFEEFAASAISVYQMEALETWEQHARRAYELFDKEGNRPIVIEELASELGLGPSVPLHVVLQDWVRHADGKLSFLGFIKLLHGVSSRSIPKA

SEQ ID NO: 4564 - protein, 301 aa, Zea mays
  Clone ID: PAT_MRT4577_135917C.1.pep
ENSPLKVIDFGLSDFVKPDERLNDIVGSAYYVAPEVLHRSYAYILLCGSRPFWARTESGIFRAVLKAEPSFDEAPWPTLTAEAKDFVKRLLNKDYRKRMTAAQALSHPWIRNSQQVKVPLDMIIYKLMRAYISSSSLRKSALRALAKTLTTDQLFYVREQFELLGPNKNGYISLQNLKSALAKNSTDAMKDSRVVDFVNTVCALQYRKLDFEEFAASAISVYQMEALETWEQHARRAYELFDKEGNRPIVIEEVWSELGLGPSVPLHVVLQDWVRHADGKLSFLGFIKLLHGVSSRSIPKA

SEQ ID NO: 4565 - protein, 59 aa, Zea mays
  Clone ID: PAT_MRT4577_135919C.1.pep
MGLCHGKPTQIPEAEAEEDPHVASGAGDGGDGATSPSAAAPAAKPGTPKQPKFPFYLPS

SEQ ID NO: 4566 - protein, 51 aa, Zea mays
  Clone ID: PAT_MRT4577_135990C.1.pep
SSVLAPTCGSDSKVAMCQLLVMCSSPATADPCVKQHGLWIDVWCYSCQYLF

SEQ ID NO: 4567 - protein, 514 aa, Zea mays
  Clone ID: PAT_MRT4577_136067C.1.pep
MASPRGRMSFPLRSFLMICLMAQLGASNVVLMANNTTLSFDDVEAIFTPAVKGSGVNGVLYAVEPMDACSPLRTKAIGGSVSTFALVIRGGCHFDDKVRNAQNAGFKAAVVYDTEDNGILVSMAGSSSGVHIYAVFVSKASGEELKKYSGQTDAELWIIPTYANSAWSIMAISFISLLVMSAILAACFFARRHQIRRDRARLPQTREFHGMNSRLVKAMPSLIFTKVQEDDCTSATCAICLEDYSAGEKIRVLPCRHKFHAACVDLWLTSWRTFCPVCKRDANAGTPEPPVSESTPLLSSSAIRLPEPTASVSFWSTVAAAAAASPPRPISRHPSPSRSISRKHSVSGSSIPGTPIPRFHASSSSPTCTSGSSLDLANMPSSPWPRASHLASAHSSCGGRLSPPIHIRNTSAAHVSRSAYGSPSRYVGSSHMSRGSPSCYYLGSSSGQQHPYLRHCTLSGTSLFTMVPQSPQQNQLQHGGDSEKDLSAAAPFRQLYYLQHCPDSGTSSQSLPGC

SEQ ID NO: 4568 - protein, 514 aa, Zea mays
  Clone ID: PAT_MRT4577_136069C.1.pep
MASPRGRMSFPLRSFLMICLMAQLGASNVVLMANNTTLSFDDVEAIFTPAVKGSGVNGVLYAVEPMDACSPLKTKAIGGSVSPFALVIRGGCHFDDKVRNAQNAGFKAAVVYDTEDNGVLVSMAGSSSGVHIYAVFVSKASGEELKKYSGQTDAELWIIPTYENSAWSIMAISFVSLLVMSAILAACFFARRHQIRRDRARLPRARESHGMNSQLVKAIPSLIFTKVQEDDCTSATCAICLEDYSAGEKIRVLPCRHKFHAACVDLWLTSWRTFCPVCKRDANAGTPEPPVSESTPLLSSSAIRLPEPTASVSFRSTVAEAAAASPPRPISRHPSPSRSISRKHSVSGSSIPGTPIPRFHASSSSPTCTSGSSLDLANMSSSPWPRASHLASAHYSCSGRLSPPIHIRNTSAAHVSRSAYGSPSRYVGSSHMSRGSPSCYYLGSSSGQQHPYLRHCTLSGTSLFTMVPQSPQQNQLQHGGDSEKDLSAAAPFRQLYYLQHCPDSGTSSQSLPGC

SEQ ID NO: 4569 - protein, 42 aa, Zea mays
  Clone ID: PAT_MRT4577_136187C.1.pep
RVTVGFCPRVSVRSTFELGVGTPVVPFVCSRYETSPDNNAPN

SEQ ID NO: 4570 - protein, 160 aa, Zea mays
  Clone ID: PAT_MRT4577_136269C.1.pep
MASTNSWTVEIASPVAAPRLFRAAVMDWHTLAPKVASHVVASAHPVEGEGGVGSVRQFNFTSAMPFGFVKERLEFLDVDKCECKSTLVEGGGIGVAIETAASHVKVESAAGGGCVVKVDSTYKLLPGVEVQDEITKAKESVTNIFKAAEAYLVANPEAYN

SEQ ID NO: 4571 - protein, 134 aa, Zea mays
  unsure (1)..(134): unsure at all Xaa locations
  Clone ID: PAT_MRT4577_136321C.1.pep
LANLTAYSKIHXFVPFTELVALSFVYYLQXQQLPLSQIVAANPQQFLPFHHLAALNSRAYSQQQQLIPFSQLAGVSPAAFLTQPQLLPFYQHAAPNAGTLLQLQQSPPLNQLALTNPAVLYQHPIIGGAHFSFL

SEQ ID NO: 4572 - protein, 83 aa, Zea mays
  unsure (1)..(83): unsure at all Xaa locations
  Clone ID: PAT_MRT4577_136356C.1.pep
GSPGFRFVRERIEMAASDVDYRXFSDRLAWATDDHSLHNALSTYGEVLQSKIILDRXETQRLRCFSYVTFYTDDAMLNAHRRH

SEQ ID NO: 4573 - protein, 493 aa, Zea mays
  Clone ID: PAT_MRT4577_136542C.1.pep
IQSPHFHNSPRLPLRPSQISTTHRGHGRAMPPSADAMPAPGDAACAGDVRLISSKELREHASAADLWISISGDVYDVTPWLPHHPGGDLPLITLAGQDATDAFAAYHPPSARPLLRRFFVGRLSDYTVSPASADYRRLLAQLSSAGLFERVGPTPRVQLALMAVLFYAALYLVLACASASAHMLAGGLIGFVWIQSGWMGHDSGHHRITGHPLLDRVVQVLSGNCLTGLSIAWWKCNHNTHHIACNSLDHDPDLQHMPLFAVSPKLFGNIWSYFYQRTLAFDAASKFLISYQHWTFYPVMCIARINLLAQSAVFVLTEKRVPQRLLEIAGVAAFWAWYPLLVACLPNWWERVAFVLLSFTICGIQHVQFCLNHFSSDVYVGPPKGNDWFEKQTAGTLDILCPPWMDWFHGGLQFQIEHHLFPRLPRCHLRKVAPAVRDLCKKHGLTYSAASFWDANVLTWKTLRAAALQARSATGGGGGAPKNLVWEALNTHG

SEQ ID NO: 4574 - protein, 89 aa, Zea mays
  unsure (1)..(89): unsure at all Xaa locations
  Clone ID: PAT_MRT4577_136598C.1.pep
LIYVYNPLQSRDVPSNSRVTFAEDHDYRSHMEYLWGGEGLTNYLVKWAPXVVERMRRTEKXVLFEDIVHSTTYXLACRVANANHMPPLK

SEQ ID NO: 4575 - protein, 374 aa, Zea mays
  unsure (1)..(374): unsure at all Xaa locations
  Clone ID: PAT_MRT4577_136624C.1.pep
MASLPNGGGAAASGSCGARPVDKEVDFANYFCTYAYLYHQKEMLCDRVRMDAYHSAVFRNAPHFQGKVVLDVGTGSGILAIWSAQAGARKVYAVEATNMAEHARELARANGVTDIVEVIQGTVEDVDLPEKVDVIISEWMGYFLLRESMFDSVICARDRWLKPDGVMYPSHARMWLAPIRTGLGDKKREDFDIAMDDWSLFVQDTQTYYGVNMNALXRAEHEKYYLKSSIWNNLHPNQVIGQPAAIKEIDCLTATVDEIREVRAQVTLPIRMEARLSALAGWFDVHFRGSAQNPGVEEVELTTAPDEHGGTHWGQQVFLLTPPLSVTKGDNVNVSFSMVRSKENHRLMDMEFTYELHELSGRKHPAVKTKMYLE

SEQ ID NO: 4576 - protein, 486 aa, Zea mays
  Clone ID: PAT_MRT4577_136625C.1.pep
TNRSGMAGGDEGSLVPREVPGSYGMPFVSAIRDRLDFYYFQGQDKYFESRVDKYGSTVVRINVPPGPFMARDPRVVAVLDAKSFPVLFDVDKVEKKNLFTGTYMPSTSLTGGFRVCSYLDPSEPTHTKVKQLLFSLLASRKDAFIPAFRSHFSSLLATVESQPVLSKKSNFNTLNDATSFEFIGDAYFGVLPSASDLGTTGPTKAAKWLIFQLHPLVTLGLPMVLEEPLLHTVHLPPILVSGDYGTLYKYFSTVAKQALDTAEGLGLSREEACHNLLFATTFNSYGGLKVLFPGILANVASAGEKLHERLVAEIRGAVAEAGGKVTLAAVEKMELAKSVVWESLRLDPPVKFQYGHAKKDLQVQSHDAVFQVKKGEMLFGYQPCATKDPRVFGATAKEFVPGRFLGEEGSKLLQYVYWSNGRETENPTVDNKQCPGKNFVVLVGRLFLVELFLRYDTFTADIGKDLLGSSVVFTSVTKATSGPGSE

SEQ ID NO: 4577 - protein, 483 aa, Zea mays
  Clone ID: PAT_MRT4577_136626C.1.pep
MATSVRGFSSAPCRDVPGSYGLPLVGAVRDRLDFYYFQGQDKYFESRVERYGSTVVRMNVPPGPFMARDPRVVAVLDAKSFPVLFDMDKVEKKDLFTGTYMPSTSLTGGYRVCAYLDPSEPTHTKVKQLLFSLLLSRKDDVIPTFRSNFSSLLATVESELAKGGKAEFNKLNDVTSFDFIGEAYFGVRPSATELGKGGPSKAAKWLIWQLHPLVTLGLPMVLEEPLLHTFHLPPFLVKGDYRALYKYFSTVAKQALDTAEGLGLSREEACHNLLFATTFNSYGGLKVLFPGLLANVASGGEKLHERLVAEIRGAVADAGGKVTLAAVERMELAKSVVWESLRLDPPVKFQYGHAKKDLLVESHDAVFQVRKGEMLFGYQPCATKDPRVFGDTAGDFVPDRFLGEEGSKLLQYVYWSNGRETENPSVDNKQCPGKNFVVLVGRLLLVELFLRYDTFTAEVGKELLGTSVIFTGVTKATSGPGSE

SEQ ID NO: 4578 - protein, 439 aa, Zea mays
  unsure (1)..(439): unsure at all Xaa locations
  Clone ID: PAT_MRT4577_136628C.1.pep
MAMANRLRLPLPQCLFLLHCYVVVAIVAHPSSPEQASPKANQHPLSYNNLRPEDFPNDRLYRAYHAIQSFKSTITSDPKNITGTWAGNDICGEKSYVGFYCATPTSRAKELTVTAVVLNGFGLRAPKLQGFVDQLPDVALFHAASNNFGNGGIPRLTGLEYSYDLSVDDNXLTSKFRTILKLLGELEPTFXVAGMIELRFRLGTGPDKGGGIIPGVADGKALLLNYNDLSGQLPADLGFSKLSFLALANNRLTGPIPPSVAQLKDSLLEVLLLNNQLSGCLAPELGMLAKAAVIDAGMNQLTGPIPSSFSCLISVEQLNLAGNRLYGHVPDALCRLAGPAGRLANLTLSGNYFTSVGPACAALIKDGVLNVKSNCIPGLANQRRPEECAAFIQSRPKTCPAAATTETTCPAPAANDAVAQGVRKVRDYFSYVTYATLHE

SEQ ID NO: 4579 - protein, 68 aa, Zea mays
  Clone ID: PAT_MRT4577_136636C.1.pep
MASSTMGLSSTDFSGKGVNVTSSSDFGEVRATMRKTSLKAKPAGASGSPRYGPDRALYLWPLSGEPTT

SEQ ID NO: 4580 - protein, 214 aa, Zea mays
  unsure (1)..(214): unsure at all Xaa locations
  Clone ID: PAT_MRT4577_136696C.1.pep
RGWLQQVFVQTSGNVTFVADLCCSSNSYLELKRKTLKALCRAFPASIFSMRWQLYLDSWPMXVLTNTCCSHPLYRESELIEENCAGVRNAAQRKLFDELGIVADELPVDQFIPLGRMLYKAPSDGKWGEHELDYLLFMVRDVKLDPNPEEVADVKYMNRHQLKELLRKADAGEDGVKLSPWFRLVVDNFLMGWWDHVEQGTLQGAADMKTIHKL

SEQ ID NO: 4581 - protein, 131 aa, Zea mays
  unsure (1)..(131): unsure at all Xaa locations
  Clone ID: PAT_MRT4577_136782C.1.pep
MAPIAVGDALPDGQLGWVDENDQLQQVSVHALAAGKKGMVXGVPGAFTPTWRNQHVPGFITQAEQLKAKGVDKIPLIRGNDPLVMKAGAKTYPENKHVKFLAGGSGGDTKAAXLKLDFTDKGLGVGSKKVG

SEQ ID NO: 4582 - protein, 905 aa, Zea mays
  Clone ID: PAT_MRT4577_136850C.1.pep
MRSWRARSAAPRRPTSSPCRSTTRRATPSSPSSRRSSSTCTPPPPLLLLPSPSTSSPLPRPPPPSPSPANSAPGSDEAKGTHQRARTRSVRRASPPPVLLPPAPIRPPRRSPHPMSAADPSAAPAAAADPDGPDSVRLTWNTWPRSKVEASRCVVPLAATISPTRVPDPSAASPPPLPYPPLRCKPPCSALLNPFARVDFAAKIWICPLCFSRNHFPPHYAAISESNVPAELFPQCSTVDYIVGGAGIPGVGGAPPPPPPVFLFVIDTCVIEEELEYVKMAMRKAVALLPEHALVGLVTFGTQVHLHELGFSDLSKIYVFRGTKEISKDQILDQLGLAGAGRPGFPKMPQQPGGPQVNGMHPPSTAGVNRFLLPVSDCEIALSTLLDELQPDQWPVEAGNRAIRCTGVALSVAAGLLGACMPGTGARIIALLGGPCTEGPGMIVSKDLSEPVRSHKDLDKDAAPHFQKAVKFYDGLAKQLVSQGHVLDVFASALDQVGLAEMKVAIERTGGLVVLSESFGHSVFKDSFKRIFEGGEQSLGLSFNGIIEINCSKDIKVQGIIGPCTSLEKKGAMCSDTVVGQGNTSAWKMCGLDRNTSLTVFFDVSPSERSSQPGNQNPHLYIQFVTSYQHPEGQMRIRVTTICRKWVDGSTNTEELVEGFDQETAAVVLARYISLKMEMEEEFDATRWLDRSLIRLCSRFGDYRKDDPSSFSLHSNFSLFPQFMFNLRRSQFVQVFNNSPDETAYFRMLLNRESITNSVAMIQPSLISFSFDSPPSPVFLDVASIAADRILLLDAYFSVVIFHGMTIAQWRNMGYQNQPEHEQFAQLLQAPHEEAQMIIKGRFPVPRLVVCDQHGSQARFLLAKLNPSATYNSAHDVAPGSDIIFTDDVSFQVFCEHLQRLAVQS

SEQ ID NO: 4583 - protein, 77 aa, Zea mays
  Clone ID: PAT_MRT4577_136888C.1.pep
ELFRVRRASSAITSCTHSLCRSEFDVLLEARGGKKAISLRSMMYEAPLGYSIEDVPPDVGVKKFQAAADSNCAKNLS

SEQ ID NO: 4584 - protein, 55 aa, Zea mays
  unsure (1)..(55): unsure at all Xaa locations
  Clone ID: PAT_MRT4577_137243C.1.pep
AAIEKAGYTGQVVIGMDVAASEFCGEVDKTYDLNVXVANNDGSNKISGDSCIDLD

SEQ ID NO: 4585 - protein, 205 aa, Zea mays
  unsure (1)..(205): unsure at all Xaa locations
  Clone ID: PAT_MRT4577_137379C.1.pep
MSPAEPTRDESVYMAKLAEQAERYEEMVEFMERVAKATGGAGPGEELSVEERNLLSVAYKNVIGARRASWRIISSIEQKEEGRGNDAHAATIRSYRSKIEAELAKICDGILALLDSHLVPSAGAAESKVFYLKMKGDYHRYLAEFKSGGXERKEAAESTMNAYKAAQDIALADLAPTHPIRLGLAFNFSVFYYEILNSPDRACNL

SEQ ID NO: 4586 - protein, 606 aa, Zea mays
  Clone ID: PAT_MRT4577_137423C.1.pep
MDTHIGSVNGAASNQTVGCPASAPGCPMASTPAQPAATLSAGEASLGRHLARRLVQVGVNDVFAVPGDFNLTLLDHLIAEPGLRLVGCCNELNAGYAADGYARARGVGACAVTFTVGGLSVLNAIAGAYSENLPVICIAGGPNSNDYGTNRILHHTIGLPDFSQELRCFQTVTCHQAVVNNLDDAHEQIDTAIATALRESKPVYLSISCNLPGLPHPTFSRDPVPFFLTPRTSNKMGLEAAVEATVEFLNKAVKPVLVAGPKLRVAKAGKAFVDMVDASGYAYAVMPSAKGLVPETHPHFIGTYWGAVSTAFCAEIVESADAYLFAGPIFNDYSSVGYSFLLKKEKAIIVQPERVIVGNGPAFGCVMMKEFLSELAKRVNKNTTAYENYKRIFVPEGQPLESEPNEPLRVNVLFKHVQKMLTGDSAVIAETGDSWFNCQKLKLPEGCGYEFQMQYGSIGWSVGALLGYAQGANHKRVIAFIGDGSFQVTAQDVSTMLRCEQNSIIFLINNGGYTIEVEIHDGPYNVIKNWNYTGFVDAIHNGLGKCWTSKVKSEEELTAAIETALGEKKDCLCFIEVIAHKDDTSKELLEWGSRVSAANSRPPNPQ

SEQ ID NO: 4587 - protein, 168 aa, Zea mays
  unsure (1)..(168): unsure at all Xaa locations
  Clone ID: PAT_MRT4577_137441C.1.pep
MDAIGAGSKGNKGXGGRKGGGPMKKWGTRAVKAGLQFPVGRXIGRYLKRGRDAHRVGTGAPVYLAAVLEYLAAEGLEVAGNAGKDNKKTRIIPRHGLLGIRNDEELGKRLGGVTIGHGGVLPNIHSVLLRKKAAGEAGSGGSEEPKAPKKXAKAPKKGKWGLHLRCVL

SEQ ID NO: 4588 - protein, 94 aa, Zea mays
  unsure (1)..(94): unsure at all Xaa locations
  Clone ID: PAT_MRT4577_137459C.1.pep
YGLGQLPHAFARLSAVVRGTYMLSQAXCKVEFGGIGKSYGVTSERETARCMKIICDPSYLPCKVKKVGRVAHAICITKHPIPDTIDSHSVQIIL

SEQ ID NO: 4589 - protein, 47 aa, Zea mays
  Clone ID: PAT_MRT4577_137464C.1.pep
MAANKGMVAGSHNRNEFVMIRHDGDAPVPAKPTKSANGQVCQICGDT

SEQ ID NO: 4590 - protein, 1074 aa, Zea mays
  Clone ID: PAT_MRT4577_137469C.1.pep
MAANKGMVAGSHNRNEFVMIRHDGDAPVPAKPTKSANGQVCQICGDTVGVSATGDVFVACNECAFPVCRPCYEYERKEGNQCCPQCKTRYKRQKGSPRVHGDDEEEDVDDLDNEFNYKQGNGKGPEWQLQGDDADLSSSARHDPHHRIPRLTSGQQISGEIPDASPDRHSIRSPTSSYVDPSVPVPVRIVDPSKDLNSYGLNSVDWKERVESWRVKQDKNMLQVTNKYPEARGDMEGTGSNGEDMQMVDDARLPLSRIVPISSNQLNLYRIVIILRLIILCFFFQYRISHPVRNAYGLWLVSVICEVWFALSWLLDQFPKWYPINRETYLDRLALRYDREGEPSQLAPIDVFVSTVDPLKEPPLITANTVLSILAVDYPVDKVSCYVSDDGSAMLTFESLSETAEFARKWVPFCKKHNIEPRAPEFYFAQKIDYLKDKIQPSFVKERRAMKREYEEFKIRINALVAKAQKVPEEGWTMADGTAWPGNNPRDHPGMIQVFLGHSGGLDTDGNELPRLVYVSREKRPGFQHHKKAGAMNALIRVSAVLTNGAYLLNVDCDHYFNSSKALREAMCFMMDPALGRKTCYVQFPQRFDGIDLHDRYANRNIVFFDINMKGLDGIQGPVYVGTGCCFNRQALYGYDPVLTEADLEPNIVVKSCCGRRKRKNKSYMDSQSRIMKRTESSAPIFNMEDIEEGIEGYEDERSVLMSQRKLEKRFGQSPIFIASTFMTQGGIPPSTNPASLLKEAIHVISCGYEDKTEWGKEIGWIYGSVTEDILTGFKMHARGWQSIYCMPPRPCFKGSAPINLSDRLNQVLRWALGSVEILLSRHCPIWYGYNGRLKLLERLAYINTIVYPITSVPLIAYCVLPAICLLTNKFIIPEISNYAGMFFILLFASIFATGILELRWSGVGIEDWWRNEQFWVIGGTSAHLFAVFQGLLKVLAGIDTNFTVTSKASDEDGDFAELYVFKWTSLLIPPTTVLVINLVGMVAGISYAINSGYQSWGPLFGKLFFSIWVILHLYPFLKGLMGRQNRTPTIVIVWSILLASIFSLLWVKIDPFISPTQKAAALGQCGVNC

SEQ ID NO: 4591 - protein, 1075 aa, Zea mays
  Clone ID: PAT_MRT4577_137470C.1.pep
MAANKGMVAGSHNRNEFVMIRHDGDAPGSAKPTKSANGQVCQICGDSVGVSATGDVFVACNECAFPVCRPCYEYERKEGNQCCPQCKTRYKRQKGSPRVHGDEDEEDVDDLDNEFNYKQGNGKGPEWQLQGDDADLSSSARHEPHHRIPRLTSGQQISGEIPDASPDRHSIRSPTSSYVDPSVPVPVRIVDPSKDLNSYGLNSVDWKERVESWRVKQDKNMMQVTNKYPEARGGDMEGTGSNGEDMQMVDDARLPLSRIVPISSNQLNLYRVVIILRLIILCFFFQYRVSHPVRNAYGLWLVSVICEVWFALSWLLDQFPKWYPINRETYLDRLALRYDREGEPSQLAPIDVFVSTVDPLKEPPLITANTVLSILSVDYPVDKVSCYVSDDGSAMLTFESLSETAEFARKWVPFCKKHNIEPRAPEFYFAQKIDYLKDKIQPSFVKERRAMKREYEEFKVRINALVAKAQKVPEEGWTMADGTAWPGNNPRDHPGMIQVFLGHSGGLDTDGNELPRLVYVSREKRPGFQHHKKAGAMNALIRVSAVLTNGAYLLNVDCDHYFNSSKALREAMCFMMDPALGRKTCYVQFPQRFDGIDLHDRYANRNIVFFDINMKGLDGIQGPVYVGTGCCFNRQALYGYDPVLTEADLEPNIVIKSCCGRRKKKNKSYMDSQSRIMKRTESSAPIFNMEDIEEGIEGYEDERSVLMSQRKLEKRFGQSPIFIASTFMTQGGIPPSTNPASLLKEAIHVISCGYEDKTEWGKEIGWIYGSVTEDILTGFKMHARGWQSIYCMPPRPCFKGSAPINLSDRLNQVLRWALGSVEILLSRHCPIWYGYNGRLKLLERLAYINTIVYPITSIPLIAYCVLPAICLLTNKFIIPEISNYAGMFFILLFASIFATGILELRWSGVGIEDWWRNEQFWVIGGTSAHLFAVFQGLLKVLAGIDTNFTVTSKASDEDGDFAELYVFKWTSLLIPPTTVLVINLVGMVAGISYAINSGYQSWGPLFGKLFFSIWVILHLYPFLKGLMGRQNRTPTIVIVWSILLASIFSLLWVKIDPFISPTQKAAALGQCGVNC

SEQ ID NO: 4592 - protein, 240 aa, Zea mays
  unsure (1)..(240): unsure at all Xaa locations
  Clone ID: PAT_MRT4577_137504C.1.pep
MSTAEATREENVYMAKLAEQAERYEEMVEFMEKVAKTADVGELTVEERNLLSVAYKNVIGARRASWRIISSIEQKEESRGNEAYVASIKEYRTRIETELSKICDGILKLLDSHLVPSATAAESKVFYLKMKGDYHRYLAEFKAGAERKEAAENTLVAYKSAQDIALADLPTTHPIRLGLALNFSVFYYEILNSPDRACNLAKQAFDEAIAELDSLGEESYXDSTLIMQLLRDNLTLWTLI

SEQ ID NO: 4593 - protein, 377 aa, Zea mays
  unsure (1)..(377): unsure at all Xaa locations
  Clone ID: PAT_MRT4577_137832C.1.pep
MDVDRTGGLELPPGFRFHPSDFEIVNDYLTKKVHDRDYSCIAIADADLNKTEPWDLPKVAKMGEKEWYFFYQKDRKYPTGLRANRATEAGYWKATGKDKEVYDPLAAEGLLLVGMKKTLVFYKGRAPRGDKTNWVMHEYRLEGSGRLPASPXPHPAQPPTXAAMMKASASACKDEWVVCRVFNKTTGIKKTAAPAYQVAMAGAEMDQNQNNIPAIPIPMPLQLPLPVPMQMQFPILPDFAMDPVAPYYPNPNAGAGMMPPMALAGMGGAGGLQINGALFGNPVPAPLPMNFYHHQMGMGAAAGQVDMGAAAGQMDMGAAGAGAGGFDVAAPESRPSSMVSQKDEQANAAEISSMMSVTGPGSATTTIEMDGIWKYKY

SEQ ID NO: 4594 - protein, 530 aa, Zea mays
  Clone ID: PAT_MRT4577_137888C.1.pep
MAAAPPPKADELQPFPPKEQLPGVAFCITSPPPWPEAILLGFQHFVVMLGTTVIIPSALVPQMGGGNEEKARVVQTILFVAGINTLFQTLFGTRLPVVMGGSYVFVGPTISIVLAGRYSNEADPHEKFLRTMRGTQGALLVASTIQIILGFSGLWRNVVKLLSPLAAVPLVSLVGFGLYELGFPGVAKCVEVGLPELLLLVVFSQYLPQVLDFGKSVFSRFSVLFTVAIVWLYAYILTIGGAYKNSPPKTQVHCRVDRSGLISGAPWISVPYPFQWGAPTFDAGEAFAMMMTSFIALVESTGAFIGASRYASATMIPPSIISRGVGWQGIGLLLDSFFGTANGTSVSVENIGLLALTRIGSRRVVQISAGFMIFFSVLGKFGALFASIPLPVFAGMYCLFFGYVGGVGLSLLQFCNLNSFRTKFIMGFAFFMGLSVPQYFNEYTAVASYGPVHTGARWFNDMINVPFTSKPFVAGLVAYILDNTLQVKESAVRKDRGNHWWEKFRSFKKDARSQEFYSLPFNLNKFFPSV

SEQ ID NO: 4595 - protein, 447 aa, Zea mays
  unsure (1)..(447): unsure at all Xaa locations
  Clone ID: PAT_MRT4577_138175C.1.pep
EQTRRNKPSWAASPFRSPWRRTTSRSPPPPDPPPPPPRRLASTPPRPSLPPDPXQHHGNNAHRRGPHHHHQPHHHPHYHPHQHYQPRHQHHQAQAEDEGSAAATAEDREGPAGAVQAQHRLPEPEARKLVKQVEFYFSDINLATTEHLMKFIAKDPDGFVPISVVASFRKIREIVYDRSLLVAALRTSSELVVSEDGKHVKRLQPFNAEEVQSRIVVAENLPEDQKHQTLMKIFSAVGNVKSIRTCYPQDISPAAANRTSRIEMIFANKLHSFVEYSAVEDAEKAVAEFGGGGNWREGIRVRSLLGCLKHGLGQGRKGGDEEYAADEDGPDTTDHPRDFGTDVTAQISEAHFDHQAEDGTHDKGGMRQQGRGRGRGGRGRGRGQHYGHNSRDGHHPIGTPPSEHPAVPKPPPGPRMPDGTKGFTMGRGKPLSITIDAAANPTTTDAA

SEQ ID NO: 4596 - protein, 103 aa, Zea mays; identical to SEQ ID NO: 3555
  Clone ID: PAT_MRT4577_138176C.1.pep

SEQ ID NO: 4597 - protein, 103 aa, Zea mays; identical to SEQ ID NO: 3555
  Clone ID: PAT_MRT4577_138178C.1.pep

SEQ ID NO: 4598 - protein, 81 aa, Zea mays
  unsure (1)..(81): unsure at all Xaa locations
  Clone ID: PAT_MRT4577_138415C.1.pep
MASIAVCDXLSDGXLGWFDENDQLQQVSVHALVCGKKVILFCVLGAFXPTCSNQHVPGFITQAEQLIAKGVDEILLISVND

SEQ ID NO: 4599 - protein, 83 aa, Zea mays
  Clone ID: PAT_MRT4577_138453C.1.pep
GTGGIHRWGPPGQVILFAPVMFTLVQRVYFRSFRLLLPICVFNSKVALCQLLGLCLSWGPANPCFNQHGFWINGCCYPCRDLF

SEQ ID NO: 4600 - protein, 104 aa, Zea mays
  Clone ID: PAT_MRT4577_13848C.1.pep
RWKLGARKGLQPTAAAETRSASPAAWKKSRVEETRSGPNPGPFIGCCPGCPRARGTRNGGQPKGGEQSQAGVKDVMSKITSGSSRKVLKETRHQAGGPRNTSQS

SEQ ID NO: 4601 - protein, 155 aa, Zea mays
  unsure (1)..(155): unsure at all Xaa locations
  Clone ID: PAT_MRT4577_138492C.1.pep
EHHFESKADAGACKTYPQQAGTVRNNGFIDIKNRPCKAVEVSTSNTDTNGHIKCHFVAIHIFNVKKLEDIVPSSHNCDIPHVNRTEYQLIDISEDAFASLLTSNGNTRDDLRLPTDETLVDHIKEGFESGKDLVXTVQTAMSDEXICALDDDGPK

SEQ ID NO: 4602 - protein, 75 aa, Zea mays
  unsure (1)..(75): unsure at all Xaa locations
  Clone ID: PAT_MRT4577_13850C.1.pep
AIHYDPLPRIEQLSXENPMLRLRRCTLGISHPESTDMQARTIFEPAITMTNQGVQVYPXIMATLVGTPQELGHQV

SEQ ID NO: 4603 - protein, 36 aa, Zea mays
  Clone ID: PAT_MRT4577_138513C.1.pep
GKKVKGRGVRALTSEAVTLGVTTPPAALNAPIQGGS

SEQ ID NO: 4604 - protein, 104 aa, Zea mays
  unsure (1)..(104): unsure at all Xaa locations
  Clone ID: PAT_MRT4577_138599C.1.pep
PSLCSLHSSLHLQHCRLIHLLEWLALSAADASFFSAGGLEGYEKRLEITFSEAPRSGDPHGRGERALYRAQIDSDLDLARCTIASELSHKDFDXMVLSESSYVY

SEQ ID NO: 4605 - protein, 39 aa, Zea mays
  Clone ID: PAT_MRT4577_138634C.1.pep
GTGGLVLVDWRLVDPSYAAATLLQHLDEFRGQHCLQPTE

SEQ ID NO: 4606 - protein, 441 aa, Zea mays
  Clone ID: PAT_MRT4577_138695C.1.pep
APGSNRGGQSRVSTRGGVAGPGSPRASPAATAFAALRRRWRWAPPGSPTLERAARAFLLASAALVLACALYLYVLRYVGRGGRAFAAAGFVGGSVLGLGGEPCDVFDGAWVPDDTGRHPLYNSSECPFAERGFDCLANGRNDTGYLKWRWKPRRCGVPRFAARTALERLRGKRVVFVGDSMSRSQWESFICMLMAGVDDPRTVFEVNGNEITKTIRHLAVRFASHGLTVEFFRSVFLVQEHPAPRHAPKRVKSTLRLDRMDNFSRKWVNSDVLIFNTGHWWTPTKLFDTGCYFQAGRSLKLGTSIDAGFRMALETWASWVQKRVDLNRTHVFFRTYEPSHWGDTSQKVCEVTEQPSSEAKGNDKSEFGAILSDVVTNMKVPITVLNVTLMGAFRSDAHVGTWSYPPTILDCSHWCLPGVPDAWNELVFSYLLTNGWRNMPG

SEQ ID NO: 4607 - protein, 93 aa, Zea mays
  Clone ID: PAT_MRT4577_138729C.1.pep
QNYAHAQSHLPHSSHPNGHLTVQSSTYLVRRPCPAPEAKLYFGSEPTDAPAIPTNTRALELLRRHLPETYGEDAAAKDSGNRVPHESAHAFPH

SEQ ID NO: 4608 - protein, 654 aa, Zea mays
  unsure (1)..(654): unsure at all Xaa locations
  Clone ID: PAT_MRT4577_138761C.1.pep
QRPADNCYGCSIYHASVIETDPAEYCIVAPDTEIFCDXEEEEEEDEERLDEVGYDDVGGVRKQMAQIRELVELPLRHPQLFKSIGVKPPKGILLYGPPGSGKTLIARAVANETGAFFFLINGPEIMSKLAGESESNLRKAFEEAEKNAPSIIFIDEIDSIAPKREKTNGEVERRIVSQLLTLMDGLKSRSHVIVMGATNRPNSIDPALRRFGRFDREIDIGVPDEVGRLEVLRIHTKNMKLAEDVNLELISKDTHGYVGADLAALCTEAALQCIREKMDIIDLEDETIDAEILNSMAVTNDHFKTALGTSNPSALRETVVEVPNVSWEDIGGLENVKRELQETVQYPVEHPEKFEKFGMSPSKGVLFYGPPGCGKTLLAKAIANECQANFISVKGPELLTMWFGESEANVREIFDKARQSAPCVLFFDELDSIATQRGSSVGDAGGAADRVLNQLLTEMDGMNAKKTVFIIGATNRPDIIDPALLRPGRLDQLIYIPLPDEQSRLQIFKACLRKSPVAKDVDLNALAKYTQGFSGADITEICQRACKYAIRENIEKDIERERRMKDNPEAMEEDEVDEIAEIKAAHFEESMKYARRSVSDADIRKYQAFAQTLQQSRGFGSEFRFSEQSATAGAAAADPFASAGAAADDDDLYS

SEQ ID NO: 4609 - protein, 182 aa, Zea mays
  Clone ID: PAT_MRT4577_138762C.1.pep
EVIAVNSVFEMHRLLAQPGALEKVLGTVRAVRPRIVTVVEQEANHNSGTFLDRFTESLHYYSTMFDSLEGGSSGGPSEVSSGAAAAPAAAGTDQVMSEVYLGRQICNVVACEGAERTERHETLGQWRNRLGNAGFETVHLGSNAYKQASTLLALFAGGDGYKVEEKEGCLTLGWHTRPLIAT

SEQ ID NO: 4610 - protein, 402 aa, Zea mays
  unsure (1)..(402): unsure at all Xaa locations
  Clone ID: PAT_MRT4577_138763C.1.pep
GRVGVGADLAALCXEAALQCIREKMDIIDLEDETIDAEILNSMAVTNDHFKTALGTSNPSALRETVVEVPNVSWEDIGGLENVKRELQETVQYPVEHPEKFEKFGMSPSKGVLFYGPPGCGKTLLAKAIANECQANFISVKGPELLTMWFGESEANVREIFDKARQSAPCVLFFDELDSIATQRGSSVGDAGGAADRVLNQLLTEMDGMNAKKTVFIIGATNRPDIIDPALLRPGRLDQLIYIPLPDEQSRLQIFKACLRKSPVAKDVDLNALAKYTQGFSGADITEICQRACKYAIRENIEKDIERERRRKDNPEAMEEDEVDEIAEIRAPHFEESMKYARRSVSDADIRKYQAFAQTLQQSRGFGSEFRFSDQPATAGAAAAADPFASAGAAADDDDLYS

SEQ ID NO: 4611 - protein, 474 aa, Zea mays
  Clone ID: PAT_MRT4577_138802C.1.pep
MNLAVAAALPSVTPRTGVVLPRSSRRHCPRGVVPLAASSSVSSFTSPSAAAAPIYAPTPQDRSLRTPHSGYHFDGTARPFFEGWYFKVSIPECRQSFCFMYSVENPLFRDGMSDLDKLLYGPRFTGVGAQILGADDKYICQFSEKSNNFWGSRHELMLGNTFISNKESTPPQGEVPPQDFSRRILEGFQVTPIWHQGFIRDDGRSNYVPNVQTARWEYSTRPVYGWGDVKSKQLSTAGWLAAFPFFEPHWQICMASGLSTGWIEWDGERFEFENAPSYSEKNWGGGFPRKWYWIQCNVFPGASGEVSLTAAGGLRKIGLGDTYESPSLIGIHYEGQFFEFVPWTGTVSWDIGLWGLWKMSGENKTHLVEIEATTAESGTALRAPTIEAGLVPACKDTCYGDLRLQLWEKKYDGSKGEMILDATSNMAALEVGGGPWFNGWKGTTVVNEVVNNIVGTPVDVESLLPIPFLKPPGL

SEQ ID NO: 4612 - protein, 347 aa, Zea mays
  Clone ID: PAT_MRT4577_138883C.1.pep
VGTGGSLSLSAVSSVSIVICNKALMSSLGFNFATTLTSWHLLVTFCSLHVALCMKLFEHKPFDARTVMGFGVLNGISIGLLNLSLGFNSVGFYQMTKLAIIPCTVILETLFFRKKFSRNIKLSLSVLLLGVGVATVTDLQLNVMGSVLSLLAIITTCIAQIMTNTIQKKFKVSSTQLLYQSCPYQALTLFLVGPFLDGFLTNQNVFAFDYTTQVLFFIVLSCLISVSVNFSTFLVIGKTSPVTYQVLGHLKTCLVLTFGYVLLHDPFSWRNILGILIAVIGMVLYSYFCTRETQQKPAEASPQAVQAKEGESNPLISDSLSAAENGGSATDDEPLKVPMWSSKYSKA

SEQ ID NO: 4613 - protein, 356 aa, Zea mays
  Clone ID: PAT_MRT4577_138888C.1.pep
MGVAGEKFQLGTVGALSLSVVSSVSIVICNKALMSSLGFNFATTLTSWHLLVTFCSLHVALCMKLFEHKPFDARTVMGFGVLNGISIGLLNLSLGFNSVGFYQMTKLAIIPCTVILETLFFRKKFSRNIKLSLSVLLLGVGVATVTDLQLNVMGSVLSLLAIITTCIAQIMTNTIQKKFKVSSTQLLYQSCPYQALTLFLVGPFLDGFLTNQNVFAFDYTTQVLFFIVLSCLISVSVNFSTFLVIGKTSPVTYQVLGHLKTCLVLAFGYVLLHDPFSWRNILGILIAVIGMVLYSYFCTRETQQKPAEASPQAIQAKEGESSPLILDSLSAAENGGSATDDEPLKVPMWSSKYSKA

SEQ ID NO: 4614 - protein, 175 aa, Zea mays
  Clone ID: PAT_MRT4577_13898C.1.pep
APSVRRSQQSSTTVTALRDHGSARSAVQGGKILFGGSAIESEGNFVQPTIVEITRSAPVVKEELFGPVLYVMKFQTLKEAIEINNSVPQGLSSFIFTKWPDIIFKWLGPHGSDCGIVNVNIPTNGAEIGGAFGGEKAAGGGREAGSDSWKQYMRRATCTINYGSELPLAQGINFG

SEQ ID NO: 4615 - protein, 189 aa, Zea mays
  unsure (1)..(189): unsure at all Xaa locations
  Clone ID: PAT_MRT4577_13900C.1.pep
LVEVYKQVQIGDPLEKGTLLGPLHTPASKENFLKGIQTIKSQGGKILFGGSAIESEGNFVQPTIVEITRSAPVVKEEHFGPLLWPGRVQTLKEXIEINNSVPQGLSSSIFTKRPDIIFKWLGPHGSDCGIVNVNIPTNGAEIGGAFGGEKATGGGREAGSDSWKQYMRRATCTINYGSELPLAQGINFG

SEQ ID NO: 4616 - protein, 74 aa, Zea mays
  unsure (1)..(74): unsure at all Xaa locations
  Clone ID: PAT_MRT4577_13901C.1.pep
PGVGRAVGGPLAGLAALPGPRGVAERVLPVRPPPRPAHHTSLGCRCSVGGPAERGGAAGVSVGGGALGVRXGPA

SEQ ID NO: 4617 - protein, 263 aa, Zea mays
  unsure (1)..(263): unsure at all Xaa locations
  Clone ID: PAT_MRT4577_139031C.1.pep
MAPPSMCLAAKGVLPFSALISSGVTQRPVSVTASLEHKTSDARRKFLKLALGNIGVGLPTLLGVKKALADEQGISSSRMSYSRFLEYLDKGRVKKVDLFENGTIAIVEAISPELGNRVQRVRVQLPGLSQELLQKLREKNIDFAAHSNQEDSGSLLFNLIGNLAFPLILIGGLFLLSRRAQGGLGGPNGPGFPLGFGQSRAKFQMEPNTGVTFDDVAGVDEAKQDFMEVVEFLKKPEXFTAVGARIPXSVLLCRPPGTXKLCL

SEQ ID NO: 4618 - protein, 252 aa, Zea mays
  unsure (1)..(252): unsure at all Xaa locations
  Clone ID: PAT_MRT4577_139032C.1.pep
MAPPSMCLAAKGVLPFSALISSGVTQRPVSVTASLEHKTSDARRKFLKLALGNIGVGLPTLLGVKKALADEQGISSSRMSYSRFLEYLDKGRVKKVDLFENGTIAIVEAISPELGNRVQRVRVQLPGLSQELLQKLREKNIDFAAHSNQEDSGSLLFNLIGNLAFPLILIGGLFLLSRRAQGGLGGPNGPGFPLGFGQSRAKFQMEPNTGVTFDDVAGVDEAKQDFMGVVEFLKKPERXTAXGARFPKGFLL

SEQ ID NO: 4619 - protein, 678 aa, Zea mays
  unsure (1)..(678): unsure at all Xaa locations
  Clone ID: PAT_MRT4577_139033C.1.pep
MALPSMCLAAKGVLPFSARISSGVTQRPVSVTASLEHKTSDARRKFLKLALGNLGVGLPTLLGAKKALADEQGVSSSRMSYSRFLEYLDKGRVKKVDLFENGTIAIVEAISPELGNRVQRVRVQLPGLSQELLQKLREKNIDFAAHSNQEDSGSLLFNLIGNLAFPLILIGGLFLLSRRAQGGLGGPNGPGFPLGFGQSRAKFQMEPNTGVTFDDVAGVDEAKQXDFMEVVEFLKKPERFTAVGARIPKGVLLVGPPGTGKTLLAKAIAGEAGVPFFSISGSEFVEMFVGVGASRVRDLFKKAKENAPCIVFVDEIDAVGRQRGTGIGGGNDEREQTLNQLLTEMDGFEGNTGIIVIAATNRADILDSALLRPGRFDRQVSVDVPDVRGRTEILKVHGSNKKFDSDVSLDVIAMRTPGFSGADLANLLNEAAILAGRRGRTAISSKEIDDSIDRIVAGMEGTVMTDGKSKSLVAYHEVGHAICGTLTPGHDPVQKVTLVPRGQARGLTWFIPMDDPTLISRQQLFARIVGGLGGRAAEEVIFGEPEVTTGAAGDLQQITGLAKQMVVTFGMSEIGPWSLMEGGAQSGDVIMRMMARNSMSEKLAEDIDSAVKQLSDEAYEIALRHIRNNREAIDKIVEVLIEKETVTGDEFRAILSEFAEIPVENRVPPATPAAALPA

SEQ ID NO: 4620 - protein, 71 aa, Zea mays
  Clone ID: PAT_MRT4577_139155C.1.pep
GVFFWLFFFFFPTPKKQILFINKMGSQIFFHTFMLIGGDPTDPLKLVTYLFKLIPLVAPLEVHILTNHKFL

SEQ ID NO: 4621 - protein, 206 aa, Zea mays
  unsure (1)..(206): unsure at all Xaa locations
  Clone ID: PAT_MRT4577_139235C.1.pep
PPPAAYCIFALTHYSRCYCTGVMLDSRVLXTRGLNKEHEGPAEATGEDCSDDPPDERRPFRALWDDGLIRTTTGNRAFGALTGAMDGGLDIAHSEKRIAGLNKDDKQLDADIHRKYIYGGHVADYMTNLADHEPDKNQSHFSEYINKGIEADDMEAMNKKVHAGIRADPSVVKATKHPPKEHKRYHPKKLSYQQRKAXLIERLKPT

SEQ ID NO: 4622 - protein, 247 aa, Zea mays
  Clone ID: PAT_MRT4577_139270C.1.pep
QLWSRCRENGLKNIHQFSWPEHCKNHLSRILTLGMRSPAVGSEEERSKAPISGRKHIIVISVDSVNKENLVRIIRNAIEAAHTENTPASTGFVLSTSLTISEICSLLVSVGMHPAGFDAFICNSGSSIYYPSYSGNTPSNSRVTHVIDRNHQSHIEYRWGGEGLRKYLVKWATSVVERKGRIERQMIFEDSEHSSTYCLAFKVVNPNHLPPLKELRKLMRIQSLRCNALYNHSATRLSVTPIHASRS

SEQ ID NO: 4623 - protein, 104 aa, Zea mays
  Clone ID: PAT_MRT4577_139347C.1.pep
MDASGAGSMGKKGAAGRMAGIPRKMSVTLSVKAELMFHVGRIERYLKKVRFAQRVITVTRVYLDRVLEYLAVEVIELACIAANDFKMTRIILSDVLLAIRNDEE

SEQ ID NO: 4624 - protein, 99 aa, Zea mays
  Clone ID: PAT_MRT4577_139459C.1.pep
FQLLLSDSDEFLLLLRSPADVLLLIDSDEFRLLLPSPADVLLSQVNLTMFPSSEEQSLSDPAFWKSAEENTDNGGNPRLLSDSSFHSCNPGSAREPTRP

SEQ ID NO: 4625 - protein, 99 aa, Zea mays
  unsure (1)..(99): unsure at all Xaa locations
  Clone ID: PAT_MRT4577_139545C.1.pep
VQRSSSQSARRAPGSRNKMSNRXTQSCYACPQAIRLRXQDIVSHNCNDGSIQEISEMSRILNTYELLELDYDGRRATMIXMMDAMSSLMRQRMEDMXRD

SEQ ID NO: 4626 - protein, 438 aa, Zea mays
  unsure (1)..(438): unsure at all Xaa locations
  Clone ID: PAT_MRT4577_139718C.1.pep
RVYYGHPDVFDRXFHVTRGGVSKASKIINLSEDIFAGFNSTLREGNVTHHEYMQVGKGRDVGLNQISLFEAKIANGNGEQTLSRDIYRLGHRFDFFRMLSCYYTTIGFYFSTMITVWTVYVFLYGRLYLVLSGLDEALATGRRFVHNAPLQVALASESFVQLGFLMALPMMMEIGLERGFRTALSDFILMQLQLASVFFTFSLGTKTHYYGRTLLHGGAEYRATGRGFVVFHAKFADNYRLYSRSHFVKGIELMILLVVYEIFSQPYRGAVTYIFITVSMWFMVGTWLFAPFLFNPSGFEWQKIVDDWTDWHKWISNRGGIGVAPEKSWESWWEKEQEPLRYSGKRGTVVEILLALRFFIYQYGLVYHLNITKKITKDNQSVLVYCFSWVVIFVILLLMKTVSVGRRRFSAEFQLVFRLITALIFITFTAILVILIAI

SEQ ID NO: 4627 - protein, 330 aa, Zea mays
  Clone ID: PAT_MRT4577_139769C.1.pep
MPLPIDGRRERAVCVRGAGAGAMEINIVDKYEKLEKVGEGTYGKVYKAQDKATGQLVALKKTRLEMDEEGIPPTALREISLLNLLSHSIYIVRLLAVEQAAKNGKPVLYLVFEFLDTDLKKYLDVYRRGPSARPLPATLIKNFLYQLCKGVAHCHSHGVLHRDLKPQNLLVDKEKGILKIADLGLGRAFTVPMKSYTHEIVTLWYRAPEVLLGATHYSTGVDMWSVGCIFAEMARRQALFPGDSELQQLLHIFRLLGTPTEEQWPGVSDLRDWHEFPQWKPQGLARVVPTLEPEGVDLLSKMLQLDPSNRISALAAMEHPYFNSLDKSQF

SEQ ID NO: 4628 - protein, 46 aa, Zea mays
  unsure (1)..(46): unsure at all Xaa locations
  Clone ID: PAT_MRT4577_139867C.1.pep
MAGAFRVLHLVRAFLRFLPXAPNANRNILFQKTAIYTVISLIIYLP

SEQ ID NO: 4629 - protein, 90 aa, Zea mays
  Clone ID: PAT_MRT4577_140013C.1.pep
CNCQQGGCASGGAKRHRKVLRDNIQGITKPAIRRLARMGGVKRISGLIYEETRGVLKIFLQNVIRDAVTYTQHARPKNRTRMDVVYPLKP

SEQ ID NO: 4630 - protein, 91 aa, Zea mays
  Clone ID: PAT_MRT4577_140093C.1.pep
RGIRQLRRETGRTYWWGPRAQDILFPPVMFPPVQRVYPRSSRLLWPICVFDSKAALCQLLDLCSPSARAAPCFNQHGMWIDGCCSPCQDLF

SEQ ID NO: 4631 - protein, 569 aa, Zea mays
  Clone ID: PAT_MRT4577_1400C.1.pep
MGPAVRSSVVIRATVVGLVLVGIALALPLAAALRPLREHVASIGAAASAGSWGDEHAFYKRDENDIGPYSWNITGTYKGSWTFAGATNGSSRFLEFVESKGDSVLELLSTPTKISGVHYVQGSVTFHDVIDNAHNGGVAQIRLEGVYIWPFRQLRMVANSGADGEPLQEEDYFLSNPYHLLRIFSSQVFQESSEEKNRRKNSLTYDMEKHCNTEIAAKVVRVSSNPNDGEHEKYRLEGLMESPAVDDDGECFSPILLNATSLNVEVYYNKAVNYTLMVTFISFLQVLLLIRQMEHSNTQSGAAKVSILMIGQQAIMDAYLCLLHLTAGILVESLFNAFATAAFFKFVVFSIFEMRYLLAIWKASRPLNSGEGWEIMRRELSVLYSRFYGILLGGILLMYELHNFLRPLLLLMYSFWVPQIVTNVIRDTRKPLHPQYILGMTVTRLAIPLYIFGCPSNFMRIEPDKKWSIAVTVFMGIQAAVLLLQHYLGSRCFIPRQILPEKYCYHRKVEDSTNQPIDCVICMTTIDLTQRTSEYMVAPCEHIFHSGCLQRWMDIKMECPTCRRSLPPA

SEQ ID NO: 4632 - protein, 54 aa, Zea mays
  unsure (1)..(54): unsure at all Xaa locations
  Clone ID: PAT_MRT4577_140129C.1.pep
VPRHIQLGVRNDXELTKLTGGATIESXATMPNIHQHVLANKAAFSKASADDDNY

SEQ ID NO: 4633 - protein, 478 aa, Zea mays
  Clone ID: PAT_MRT4577_140198C.1.pep
MDAGDASTALALTAAEPSPPSPNRRGKRPTNPPKRFVHTPIPPSILSDPTLAAAATSLLPANYNFELHKTAHRIRSAAARRVALQLPEGLLLFALPLSHLLAPYLEPGADNDVLVLADATYGACCLADRPARALAADLLVHYGHSCLVPVTASLLPVLYVFVEIRVDAARLAAAVRAAFPDPAAAPRLAIAGTVQFIAAVHAAREMLTVEGYHDIVVPQAKPLSAGEILGCTAPTLKKSEEVGAVVFVADGRFHLEAFMIANPGVKAYRFDPFLGVLVLEEYDHVGMKQARKAAVLAARKAKSWGVVLGTLGRQGSTKVLDRVVEHLEEKELEHTVVLMSELSPARMELFGDSIDAWVQIACPRLSIDWGEGFKKPVLTTFEFDVALGYVPGWWEKGSRGCGSECGVGCCSGSGTRGNCNCSDGDYGGDYPMDYYSQDGGDWNSCYMKKKPSTGERKLRVRIGQRNSSRGEAWESGFS

SEQ ID NO: 4634 - protein, 324 aa, Zea mays
  Clone ID: PAT_MRT4577_140212C.1.pep
MPGDAYDLLCAEDDAAGSALLCTTDDDDGCCSAVEEDSAAAAASIAELIGGEAQYSPRPDYPDRLRSRSIDPAARAESVAWILKVQEYYGFLPLTAYLAVNYMDRFLSLHRLPQEDGWAMQLLAVTCLSLAAKMDRLVVVDCTALQVEGTSRYDCFEPGTVGRMELLVLMALNWRLRSVTPFTFVDFFACKVDPGGRHTRCLIARATQVILAAMHDVEFLDHCPSSMAAAAVLCAIGETPSLESVSPGAAVSWCIGLAEEGISSCYRLMQRLVIGNVRTRVASTTTITMAAVNLCCSDEALSSHSSATSSPPPAKRRKRSPTAT

SEQ ID NO: 4635 - protein, 72 aa, Zea mays
  unsure (1)..(72): unsure at all Xaa locations
  Clone ID: PAT_MRT4577_14036C.1.pep
EALHLRGGMSGLGREHVKVCSYHNILVIKGEGXKDDSEDXAVLSPRYSVLIXLAPEVYRMDKIKAYIKNGVL

SEQ ID NO: 4636 - protein, 95 aa, Zea mays
  Clone ID: PAT_MRT4577_140424C.1.pep
AFLISSSPRSGKWRDAQANVPSARRLRAQPAFKNLMVRGILQFTPGIAFCYVLHRCENPNIRCPKSSRLLYLIDEIPGLLSFFLFFSDGLFIISF

SEQ ID NO: 4637 - protein, 208 aa, Zea mays
  unsure (1)..(208): unsure at all Xaa locations
  Clone ID: PAT_MRT4577_140503C.1.pep
MVAAMESMVMDLSSXCFAGKAVNVPSSSAFGEARVTMRNTWACAKPAVASWSPWYGPDRVLYLGPLSGEPPSYLTCDFPGYYGWDAAGLSADPETFANKRELEVIHSRWAMLVALGCVFPXLLARNGVKFCDAVWLTAGSHIFSEGGLDYLVNSRLMHAXSILAIWVCQVVLRGAVEGYRISVGPVGEVLDPLYPGASFDPLXLSDYP

SEQ ID NO: 4638 - protein, 76 aa, Zea mays
  unsure (1)..(76): unsure at all Xaa locations
  Clone ID: PAT_MRT4577_140557C.1.pep
NEWSAXVALWAWDIVVGGCAVCRSHIVDLCVXCHASRASATSDECTVAWGVCNHALHFRCIGMWLETRRVCPLDSS

SEQ ID NO: 4639 - protein, 505 aa, Zea mays
  unsure (1)..(505): unsure at all Xaa locations
  Clone ID: PAT_MRT4577_140694C.1.pep
MASPAMVPLRQLFVDGEWRPPAQGRRLPVVNPTTEAHIGEIPAGTAEDVDAAVAAARAALKRNRGRDWARAPGAVRAKYLRAIAAKVIERKPELAKLEALDCGKPYDEAAWDMDDVAGCFEYFADQAEAXDCDKISPFSLPMETFKCHLXKRPIGVVGLITPWNYPLLMATWKVAPALAAGCTAVLKPSELASVTCLELADICKEVGLPSGVLNIVTGLGPDAGAPLSAHPDVDKVAFTGSFETGKKIMAAAAPMVKPVTLELGGKSPIVVFDDVDIDKAVEWTLFGCFWTNGQICSATSRLLIHTKIAKKFNERMVAWAKNIKVSDPLEEGCRLGPVVSEGQYEKIKKFISNAKSQGATILTGGVRPAHLEKGFFIEPTIITDITTSMEIWREEVFGPVLCVKEFSTEDEAIELANDTQYGLAGAVISGDRERCQRLSEEIDAGCIWVNCSQPCFCQAPWGGNKRSGFGRELGEGGIDNYLSVKQVTEYISDEPWGWYQSPSKL

SEQ ID NO: 4640 - protein, 477 aa, Zea mays
  unsure (1)..(477): unsure at all Xaa locations
  Clone ID: PAT_MRT4577_140696C.1.pep
GRDWARAPGAVRAKYLRAIAAKVIERKQELAKLEALDCGKPYDEAAWDMDDVAGCFEYFADQAEALDKRQNSPVSLPMETFKCHLRREPIGVVGLITPWNYPLLMATWKVAPALAAGCAAVLKPSELASVTCLELADICKEVGLPPGVLNIVTGLGPDAGAPLSAHPDVDKVAFTGSFETGKKIMAAAAPMVKPVTLELGGKSPIVVFDDVDIDKAVEWTLFGCFWTNGQICSATSRLLVHTKIAKEFNERMVAWAKNIKVSDPLEEGCRLGPVVSEGQYEKIKKFISNAKSQGATILTGGVRPAHLEKGFFIEPTIITDITTSMEIWREEVFGPVLCVKEFSTEDEAIELANDTXELILFSAVSMSFLQASQVMCXHXMNLCQYPSFEFLXYGLAGAVISGDRERCQRLSEEIDAGCIWVNCSQPCFCQAPWGGNKRSGFGRELGEGGIDNYLSVKQVTEYISDEPWGWYQSPSKL

SEQ ID NO: 4641 - protein, 119 aa, Zea mays
  Clone ID: PAT_MRT4577_140714C.1.pep
PNLKNGTDPLLMPFNSYMADWSSDKITYTTLNTPKISTELPVKLHHDKSSSFEAPNLKEHESVFATHEMTVEATRKEDEHTSKSSFTFYNGVPDTAAQASKPKKTRTTTAKNTEKFDWE

SEQ ID NO: 4642 - protein, 85 aa, Zea mays
  Clone ID: PAT_MRT4577_140869C.1.pep
SDPPHQTPAAAASSLAHLLLCGSVKRRNRIANAAGGKRAKKGNWFKVSKLRPLMEALDPTAKEVNNLKLRRFLRTRDHDVVKASA

SEQ ID NO: 4643 - protein, 198 aa, Zea mays
  Clone ID: PAT_MRT4577_140882C.1.pep
MATPNPPPPQQDEPSSSADPKAKKDYSTAILERKKSPNRLVVDEATNDDNSVVALHPDTMERLQLFRGDTVLLKGKKRKDTICIVLADDTCEEPKVRMNKTVRKNLRVRLGDVVSVHQCPDVKYGKRVHILPIDDTVEGITGNLFDAFLKPYFLEAYRPLRKGDLFLVRGGMRSVELKVIETDPAEYCIVAPDTEIFC

SEQ ID NO: 4644 - protein, 32 aa, Zea mays
  unsure (1)..(32): unsure at all Xaa locations
  Clone ID: PAT_MRT4577_140895C.1.pep
AXXSVGDHLKYQAXRCNFTLKKNYVSAIAIVF

SEQ ID NO: 4645 - protein, 554 aa, Zea mays
  unsure (1)..(554): unsure at all Xaa locations
  Clone ID: PAT_MRT4577_141052C.1.pep
MGNACGGALRSKHQHSFKHAASSQRHHASSEYSASAAADDSPRKPPPPPATTDAHAPPPPPATAMRRGGAGAPPDLGSVLGHPTPNLRDLYALGRKLGQGQFGTTFLCTELATGIDYACKSISKRKLITREDVDDVRREIQIMHHLSGHTNVVAIKGAYEDQLYVHIXXXXXXXXXXXXXXXQRGHYSERKAAALTRIIVGVVEACHSLGVMHRDLKPENFLLANRDDDLSLKAIDFGLSVFFKPGQVFTDVVGSPYYVAPEVLLKSYGPAADVWTAGVILYILLSGVPPFWAETQQGIFDAVLKGAIDFDSDPWPVISDSAKDLIRRMLNPRSAERLTAHEVLCHPWIRDHGVAPDRPLDPAVLSRIKQFSAMNKLKKMALRVIAESLSEEEIAGLKEMFQTMDTDNSGAITYDEXXXXXXXXGSTLKDTEIRDLMDAADIDNSGTIDYIEFIAATLHLNKLEREEHLVAAFSYFDKDGSGYITVDELQQACKEHNMPXXXXXXXXXXXDQDNDGRIDYGEFVAMMTKGNMGVGRRTMRNSLNISMRDXPGAF

SEQ ID NO: 4646 - protein, 556 aa, Zea mays
  Clone ID: PAT_MRT4577_141053C.1.pep
MGNACGGALRSKYQHSFKHAASSQRRASSEYSASAVADDSPRKPTQPPATTDAHAPPPPPATAAAAMRRGGAGAPPDLGSVLGHPTPNLRDLYALGRKLGQGQFGTTFLCTELATGVDYACKSISKRKLITREDVDDVRREIQIMHHLSGHTNVVAIKGAYEDQLYVHIVMELCAGGELFDRIIQRGHYSERKAAELTRIIVGVVEACHSLGVMHRDLKPENFLLVNKDDDLSLKAIDFGLSVFFKPGQVFTDVVGSPYYVAPEVLLKNYGPAADVWTAGVILYILLSGVPPFWAETQQGIFDAVLKGVIDFDSDPWPVISDSAKDLIRRMLNPRSAKRLTAHEVLCHPWIRDHGVAPDRPLDPAVLSRIKQFSAMNKLKKMALRVIAESLSEEEIAGLKEMFQTMDTDNSGAITYDELKEGLRKYGSTLKDTEIRDLMDAADIDNNGTIDYIEFIAATLHLNKLEREEHLVAAFSYFDKDGSGYITVDELQQACKEHNMPDAFLDDVINEADQDNDGRIDYGEFVAMMTKGNMGVGRRTMRNSLNISMRDAPGAF

SEQ ID NO: 4647 - protein, 553 aa, Zea mays
  Clone ID: PAT_MRT4577_141054C.1.pep
MGNACGGALRSKYQHSFKHAASSQRHASSEYSASAVADDSPRKPPPPPATTDAHAPPPPPATAMRRGGAGAPPDLGSVLGHPTPNLRDLYALGRKLGQGQFGTTFLCTELATGVDYACKSISKRKLITREDVDDVRREIQIMHHLSGHTNVVAIKGAYEDQLYVHIVMELCAGGELFDRIIQRGHYSERKAAELTRIIVGVVEACHSLGVMHRDLKPENFLLVNKDDDLSLKAIDFGLSVFFKPGQVFTDVVGSPYYVAPEVLLKNYGPAADVWTAGVILYILLSGVPPFWAETQQGIFDAVLKGVIDFDSDPWPVISDSAKDLIRRMLNPRSAERLTAHEVLCHPWIRDHGVASDRPLDPAVLSRIKQFSAMNKLKKMALRVIAESLSEEEIAGLKEMFQTMDTDNSGAITYDELKEGLRKYGSTLKDTEIRDLMDAADIDNNGTIDYIEFIAATLHLNKLEREEHLVAAFSYFDKDGSGYITVDELQQACKEHNMPDAFLDDVINEADQDNDGRIDYGEFVAMMTKGNMGVGRRTMRNSLNISMRDAPGAF

SEQ ID NO: 4648 - protein, 549 aa, Zea mays
  Clone ID: PAT_MRT4577_141056C.1.pep
MGNACSGALRSKYLHSFKHAASQRHDSEYSASASADDSPRKPTPPATTDAHAPAPPAAAMRRGAAGATPDLGSVLGHPTPNLRDLYALGRKLGQGQFGTTYLCTELATGIDYACKSISKRKLITKEDVDDVRREIQIMHHLSGHKNVVAIKGAYEDQVYVHIVMELCAGGELFDRIIQRGHYSERKAAALTRIIVGVVEACHSLGVMHRDLKPENFLLANRDDDLSLKAIDFGLSVFFKPGQVFTDVVGSPYYVAPEVLLKSYGPAADVWTAGVILYILLSGVPPFWAETQQGIFDAVLKGAIDFDSDPWPVISDSAKDLIRRMLNPRPAERLTAHEVLCHPWIRDHGVAPDRPLDPAVLSRIKQFSAMNKLKKMALRVIAESLSEEEIAGLKEMFQTMDTDNSGAITYDELKEGLRKYGSTLKDTEIRDLMDAADIDNSGTIDYIEFIAATLHLNKLEREEHLVAAFSYFDKDGSGYITVDELQLACKEHNMPDAFLDDVINEADQDNDGRIDYGEFVAMMTKGNMGVGRRTMRNSLNISMRDAPGVF

SEQ ID NO: 4649 - protein, 347 aa, Zea mays
  unsure (1)..(347): unsure at all Xaa locations
  Clone ID: PAT_MRT4577_141133C.1.pep
MAEQAGAGRYWCHMCAAAVSPAEGEVEMKCPFCHSGFLEEMETARGAATDDGDGDGDGAVAQVHPGADRPSSIWAHAILSTVDSSARRRRNRRQQEAASDVYDWNDPEFSLRRRRVTAFLRLLHELRDRQLQRLESAAGVALEGDQXPRSAGAXIGAAGGEHGVALGDYFLGPSLDALPRLRAENDAARHGTPPAKKEAVEAMPTVEIAGGNDGDDAASCPVCLEDYAAGERAREMPCRHRFHGNCIVPWLEMHSSCPVCRFQLPATDDKSSCSGGDGGFVSVDADREGSDNGGGDGRASSPGNAELAEAEESGRRLPPSLQWLNSLFSPSAQSSGSGGSSSHHWEN

SEQ ID NO: 4650 - protein, 175 aa, Zea mays
  unsure (1)..(175): unsure at all Xaa locations
  Clone ID: PAT_MRT4577_141167C.1.pep
MVGTGKRERIAIRRIDNLAARQVTFSKRRRGLFKKAEELSILCDAEVGLVVFSATGKLFHFASSSMKQVIDRYDSHSKTLQRSEPQSSQLQSHMDDGTCARLKEELAETSLKLRQMRGEELQRLSVEQLQELEKTLESGLGSVLKTKSXKKILDEISGLERXRTQLIEENSRLKE

SEQ ID NO: 4651 - protein, 232 aa, Zea mays
  unsure (1)..(232): unsure at all Xaa locations
  Clone ID: PAT_MRT4577_141169C.1.pep
MVGTGKRERIAIRRIDNLAARQVTFSKRRRGLFKKAEELSILCDAEVGLVVFSATGKLFHFASSSMKQVIDRYDSHSKTLQKSEPQSSQLQSHMDDGTCARLKEELAETSLKLRQMRGEELQRLSVQQLQELEKTLESGLGSVLKTKSQKILDEISGLERKRTQLIEENSRLKEQVTRMSRMETQLGADPEFVYEEGQSSESVTNTSYPRPSPXTDDCSDTSLRLGLPFFSS

SEQ ID NO: 4652 - protein, 233 aa, Zea mays
  Clone ID: PAT_MRT4577_141171C.1.pep
MVGTGKRERIAIRRIDNLAARQVTFSKRRRGLFKKAEELSILCDAEVGLVVFSATGKLFHFASSSMKQVIDRYDSHSKTLQRSEPQSSQLQSHMDDGTCARLKEELAETSLKLRQMRGEELQRLSVEQLQELEKTLESGLGSVLKTKSQKILDEISGLERKRTQLIEENSRLKEQVTRMSRMETQLGADPEFVYEEGQSSESVTNTSYPRPSTDTDDCSDTSLRLGLPLFSSK

SEQ ID NO: 4653 - protein, 70 aa, Zea mays
  unsure (1)..(70): unsure at all Xaa locations
  Clone ID: PAT_MRT4577_141465C.1.pep
GARAXALRVPALFXWRPVRPPGPCGPALPXRVXXSFLGPPALRPAAPSSPAXGSAGVXWLPGAAAPGXWG

SEQ ID NO: 4654 - protein, 248 aa, Zea mays
  Clone ID: PAT_MRT4577_141627C.1.pep
MVKLAFGSFRDSLSAASLKAYVAEFIATLLFVFAGVGSAIAYSQLTKGGALDPAGLVAIAIAHAFALFVGVSMAANISGGHLNPAVTFGLAVGGHITILTGILYWVAQLLGASVACFLLQYVTHGQAIPTHGVSGISEIEGVVMEIVITFALVYTVYATAADPKKGSLGTIAPMAIGFIVGANILAAGPFSGGSMNPARSFGPAVAAGNFAGNWVYWVGPLVGGGLAGLVYGDVFIASYQPVGQQEYP

SEQ ID NO: 4655 - protein, 123 aa, Zea mays
  Clone ID: PAT_MRT4577_141669C.1.pep
GKELPPRNIPVTQAQSRGGAGAAGGYGGGRGGDGGYGAGRRDGGYGGGAPHAGRREGAGAAYGAGGGYGGRREGAGAGYGGGGGPRWRDCVAPSLAWPELSPSTPLVSPFALCPRVSARSPLD

SEQ ID NO: 4656 - protein, 341 aa, Zea mays
  Clone ID: PAT_MRT4577_141711C.1.pep
MLRRQGRGGKFLEEVLIVGGLLLVQCVLSGYVVFTDHLLALGADPLAVVVVAGAAYAAFCFPFAVALERKRWPSTVSGTLVAQYLLIALGGTTAFQALMLLGIKKTTPAIASAMPNLSPGLIFIVAACFRLERFDRACKYTQAKMAGTVVCLAGALAMGFLHSPTSTSSSLQAAVAAEAAAGGGDYYYDWILGCCCLVAAVTVFALVTVLQAATLAAFPAPLTMCCATSATGAALTAVLRLVLEGRFLGMGSPRIDATLVAGDRRPRRGRGGRVHGVPGVVPGQEGPAFRLRLRARPDRLHRHPLRGSPPPSPQPGKPRRDRAHVHWALHCPMGQEQRDLG

SEQ ID NO: 4657 - protein, 250 aa, Zea mays
  Clone ID: PAT_MRT4577_141718C.1.pep
MVKLAFGSVGDSFSVTSIKAYVAEFIATLLFVFAGVGSAIAFGQLTNGGALDPAGLVAIAVAHALALFVGVSVAANTSGGHLNPAVTFGLAVGGHITVLTGLFYWVAQLLGASVACLLLRFVTHGKAIPTHGVSGGTTELEGVVFEIVITFALVYTVYATAADPKKGSLGTIAPIAIGFIVGANILAAGPFSGGSMNPARSFGPAVAAADFAGNWVYWVGPLIGGGLAGLVYGDVFIGGSYQQVADQDYA

SEQ ID NO: 4658 - protein, 69 aa, Zea mays
  Clone ID: PAT_MRT4577_141731C.1.pep
FAGYDELMIQLIIWVCRLFGREREPIIINCCRFCCWGPTHVRVSSMFTPLQNKISRLLWNKLGKKVFFL

SEQ ID NO: 4659 - protein, 297 aa, Zea mays
  Clone ID: PAT_MRT4577_141787C.1.pep
MVLLLLYHSIWLRVAGAGDSSSTDSPGGSLRRAHRDRGSTMAANFWTSSHCKQLLDPEDVDLVPAADRERGITPEEFRLIKIHMSFHIWRLAQQVKVRQRVVATAIAYFRRVYTRKSMSDYDPRLVAPTCLYLASKVEESTVQARLLVFYIKKMCGSDDKYRFEIKDILEMEMKLLEALDYYLVVFHPYRPLLQLLQDAGITDLTQFAWGLVNDTYKMDLILIYPPYMIALACIYIASVLKDKDTTAWFEELRVDMNIVKNISMEILDFYDTYKIDPQRGIPEDKISPVMNKLPAKA

SEQ ID NO: 4660 - protein, 491 aa, Zea mays
  Clone ID: PAT_MRT4577_141944C.1.pep
MAFFLALVCILVFLAIASYVQYTRWQKGKGRFGGHGRSAPLKLPPGSMGWPYLGETLQLYSQDPSVFFASKQKRYGEIFKTHLLGCPCVMLASPEAARFVLVTQAHLFKPTYPRSKERMIGPSALFFHQGDYHLRLRKLVQGALGPDALRALVPEVEAAVRSTLASWDAGHVRSTFHAMKTLSFDVGIVTIFGGRLDERRKAELRKNYSVVEKGYNSFPNSLPGTLHYKAMQARRRLHGVLCDIMRERRGQAQAGTTGLLGCLMRSRGDDGAPLLSDEQIADNVIGVLFAAQDTTASALTWIVKYLHDHPKLLEAVRAEQAAVREATGGGRQPLAWAHTKSMALTHRVILESLRMASIISFTFREAVADVEYKGFLIPKGWKVMPLFRNIHHSPDYFQDPHKFDPSRFQVAPRPSTFLPFGHGVHACPGNELAKLEMLVLIHHLVTGYRCVHLLSDPLHIFPACCIASGPRMTHGWLVFTSPAVLSLLYKL

SEQ ID NO: 4661 - protein, 500 aa, Zea mays
  unsure (1)..(500): unsure at all Xaa locations
  Clone ID: PAT_MRT4577_141949C.1.pep
MAFFLALVCILILLAIASYVQYTRWQKGKGRFGGHGRSAPLKLPPGSMGWPYLGETLQLYSQDPSFFFASKQKRYGEIFKTHLLGCPCVMLASPEAARFVLVTQAHLFKPTYPRSKERMIGPSALFFHQGDYHLRLRKLVQGALGPDALRALVPEVEAAVRSTLASWDAGHVRSTFHAMKTLSFDVGIVTIFGGRLDERRKAELRKNYSVVEKGYNSFPNSLPGTLHYKAMQARRRLHGVLCDIMRERRGQAQAAGTGLLGCLMRSRGDDGAPLLSDEQIADNVIGVLFAAQDTTASALTWIVKYLHDHPKLLEAVRAEQAAVREATGGGRQPLAWAHTKSMALTHRVILESLRMASIISFTFREAVADVEYKGFLIPXGWKVMPLFRNIHHSPDYFQDPHKFDPSRFQVAPRPSTFLPFGHGVHACPGNELAKLEMLVLIHHLVTGYRWQIVGSSDEVEYSPFPVPKHGLPVRLWRQNNPVDRKGRETDDDHVERIFLV

SEQ ID NO: 4662 - protein, 249 aa, Zea mays
  Clone ID: PAT_MRT4577_142197C.1.pep
MAAAGRLSLPLVLLVVLAVAGRAAAQDYDFFYLVLQWPGAYCDTKQSCCYPKSGKPAADFGIHGLWPNRDDGTYPQNCSPDNAFNPSKVSDLMSSLRAKWPTLACPSNDGLRFWGHEWEKHGTCAADVFDEHGYFQAALRLRDQLGVLGALTSAGVKPDGGYYTLSQIKGAIRQGTGFEPYVECNRDEAGNSQLYQLYFCVDAAGDSFVDCPVLPSGRPLHSMQEDNGMFIPHSSFFFANKRRAIGVPY

SEQ ID NO: 4663 - protein, 229 aa, Zea mays
  Clone ID: PAT_MRT4577_142201C.1.pep
MAAAGRLSLPLVLLVVLAVAGRAAAQDYDFFYLVLQWPGAYCDTKQSCCYPKSGKPAADFGIHGLWPNRDDGTYPQNCSPDNAFNPSKVSDLLSSLRAKWPTLACPSNDGLRFWGHEWEKHGTCAADVFDEHGYFQAALRLRDQLGVLGALTSAGVKPDGGYYTLSQIKGAIRQGTGFEPYVECNRDEAGNSQLYQLYFCVDAAGDSFVDCPVLPSGRPCGNRIEFPAF

SEQ ID NO: 4664 - protein, 71 aa, Zea mays
  unsure (1)..(71): unsure at all Xaa locations
  Clone ID: PAT_MRT4577_142367C.1.pep
PTRPTPRIHVNAHAPTRHIQERLXVSPCPAATVPTQLSGAPATPAPVDRVAAPCGVDSPSAGAVCRAAGKG

SEQ ID NO: 4665 - protein, 138 aa, Zea mays
  unsure (1)..(138): unsure at all Xaa locations
  Clone ID: PAT_MRT4577_142410C.1.pep
MAEEKHHXHHLFHHKKDEEQAAAGGYGESAEYTEATVTEVVSTGENEFDEYKKEEKEHKHKQHLGEAGAIAAGAFALYEKHEAKKDPEHAHRHKIEEEVAAAAAVGSGGFAFHEHHEKKKDHKEAEEAGGEKKHHFFG

SEQ ID NO: 4666 - protein, 141 aa, Zea mays
  Clone ID: PAT_MRT4577_142413C.1.pep
MAEEKHHHHHLFHHKKDEEQEEQLAGGGYGESAEYTEATVTEVVSTGENEYDEYKKEEKQHKHKQHLGEAGAIAAGAFALYEKHEAKKDPEHAHRHKIEEEVAAAAAVGSGGFAFHEHHEKKKDHKDAEEAGGEKKHHFFG

SEQ ID NO: 4667 - protein, 161 aa, Zea mays
  Clone ID: PAT_MRT4577_142415C.1.pep
MGSEGSSGPVVVPRNFRLLEELERGEKGIGDGTVSYGMDDADDIYMRSWTGTIIGPPNTVHEGRIYQLKLFCDTDYPDKPPTVRFQTRINMTCVNQETGLVEPSLFPMLGKWEREHTMEDILASLKREMSTPQNRRLYQPHEGNEDQRVEQKGLSLRCVVM

SEQ ID NO: 4668 - protein, 138 aa, Zea mays
  Clone ID: PAT_MRT4577_142418C.1.pep
MAEEKHHHHHLFHHKKDEEQLAAGGYGESAEYTEATVTEVVSTGENEYDEYKKEEKEHKHKQHLGEAGAIAAGAFALYEKHEAKKDPEHAHRHKIEEEVAAAAAVGSGGFAFHEHHEKKKDHKEAEEAGGEKKHHFFG

SEQ ID NO: 4669 - protein, 545 aa, Zea mays
  Clone ID: PAT_MRT4577_142494C.1.pep
MSSEPPPAPSAAAAEGLAADLSAATLSKKQQKKDARKAEKAEKAAQRQQQQQPADAEDPFAANYGDVPVEEIQSKAISGRLWSQIGDLDDSSAGRSVLIRGSLQAIRPVSKKMAFVVLRQSMSTVQCVLVASADAGVSTQMVRFATALSKESIVDVEGVVSLPKEPLKATTQQVEIQVRKIYCINRAIPTLPINLEDAARSEADFEKAELAGEKLVRVGQDTRLNYRAIDLRTPSNQAIFRIQCQVENKFRDFLLSKDFVGIHTPKLISGSSEGGAAVFKLLYNGQPACLAQSPQLYKQMAISGGFERVFEVGPVFRAENSNTHRHLCEFVGLDAEMEIKEHYFEVCDIIDGLFVSIFKHLSENCKKELESINRQYPFEPLKYLDKTLKLTYEEGIQMLKEAGTEIEPMGDLNTEAEKKLGRLVREKYDTDFFILYRYPLAVRPFYTMPCYDNPAYTNSFDVFIRGEEIISGAQRIHTPELLAKRATECGIDVSTISAYIEVFSYGAPPHGGFGVGLERVVMLFCALNNIRKTSMFPRDPQRLVP

SEQ ID NO: 4670 - protein, 457 aa, Zea mays
  unsure (1)..(457): unsure at all Xaa locations
  Clone ID: PAT_MRT4577_142527C.1.pep
MSFRSIVRDVRESFGSLSRRSLEVRISGLPGLSGGHHRGKSVGSVSDLRDRPVVVDQSRWXGLPPELLRDVMRRLEEGESNXWPSRKNGVACAAVCGTWREICKDIVLSPEFCGKLTFPVSLKQPGPRNGIIQCFIKRDKSTSTYYLYLCLSPVVLSEDGKFLLAAKRNRRTTYTEYIISVDPKSISRSSDGCVGKMRSNFLGTKFIVHDTRAPHNAGSLVSCERGSRRISSRRVSPKVPTASYPIARVNYELNLLGTRGPRRMNCTMHSIPASTLDPQGMVPEPGQPKQIFVPGSSSFEDSFRSANNTPSSSRFSVADRSLDWSSSRFSETSGLAQQDDDDSDQAKERPLVLCNKEPRWHEQLQCWCLNFHGRVTVASVKNFQLIAAPQLDSEPSQQAQQQTQPSNSSSASDHDKVILQFGKVANDMFTMDYRYPLSAFQAFAICLTSFDSKLACE

SEQ ID NO: 4671 - protein, 223 aa, Zea mays
  unsure (1)..(223): unsure at all Xaa locations
  Clone ID: PAT_MRT4577_142569C.1.pep
MDSNRSMATSGVAPFVAKTYRMVDDPATDGVVAWGRDNNSFVVADPFAFSQTLLPAHFKHSNFSSFVRQLNTYGFRKVDPDRWEFAHVSFLRGQTHLLGQIVRRSSGGKRKDDGNGAGAGSADDEDAVAMEVVRLRREQRAIEEQVAAMWRRVQETERRPKQMLAFLVKVAGDPXAAPPRLRRRGRRRVRRRGAGGRREHQEGAAASRCRKRRRRRRRLQRAL

SEQ ID NO: 4672 - protein, 105 aa, Zea mays
  Clone ID: PAT_MRT4577_142585C.1.pep
SRLFFFFFFFFFFFFFFFFFFFFFFWAAQTIFGWFSPFSIRFSIINMFGCAGLTSKFWDFTNKGGGVFYSTRIGAHRARGHTHEHNRFSLQCKIGIPIEHGNGRT

SEQ ID NO: 4673 - protein, 47 aa, Zea mays
  Clone ID: PAT_MRT4577_142684C.1.pep
MSEEKHHHFFNLHKIVVEQPADEYGYFETDVVTVTDYGECERHMKEV

SEQ ID NO: 4674 - protein, 267 aa, Zea mays
  Clone ID: PAT_MRT4577_142686C.1.pep
MAAGGGGGSAAPFVWKTYTMVEDPGTAGVIGWGSGNNSFVVADPFVFSQTLLPAHFKHNNFSSFVRQLNTYGFRKVDPDRWEFAHASFLRGQTHLLRNIVRRGSSAAGAGGGKRKDASPTELASGDDMTMVATEVVRLKQEQRAIDDRVASMWRRVQETERRPKQMLAFLLKVVGDRDRLHRLVGDAPVPDNGFASGGAAEPPAAEVGEKRARLLLDGDSMVALGPEAVDFAGFYSGGGAFGDVAVDAAAGSRGGGFSFAFGVDAGY

SEQ ID NO: 4675 - protein, 163 aa, Zea mays
  unsure (1)..(163): unsure at all Xaa locations
  Clone ID: PAT_MRT4577_142744C.1.pep
MAVTIAWVXARQTFDSRGNPTAEGDVGLRDSGYARGAGPRGASTAIYEALKLRNAGSDYLAKGALKGASMGNNIMGPIFVANPPTEQVEIDDFMGHQVDGTSNEXGWWEQNFGPNDILAVSLAGWRAXGAMVKKIPLDQNIEGLGGXNETLGVPVPAFKVIKE

SEQ ID NO: 4676 - protein, 163 aa, Zea mays
  Clone ID: PAT_MRT4577_143055C.1.pep
GTLEAGRVWNDPAKYKISDNRRHVAIVTTASLPWMTGTAINPLFRAAYLARSAKQKVTLVVPWLSKSDQELVYPNNITFSSPEEQETYIRNWLQERIGFEANFKISFYPGKFSKERRSIIPAGDTSQFISSKEADIAILEEPEHLNWYHHGKRWTDKFNHVIG

SEQ ID NO: 4677 - protein, 260 aa, Zea mays
  unsure (1)..(260): unsure at all Xaa locations
  Clone ID: PAT_MRT4577_143184C.1.pep
MWSFASNAIAGSLKKKAQPSKCSISNADYSDDEVSSCTSREEGLDCPICWESFNLVENVPYVLWCGHTMCKNCILGLHWAVVKFPSLPIQLPLFISCPWCNLLSFRLVYKGNLRFPRKNYFLLWMVESMNGGRAKFHSTNHDEHHSTWHSSAGTSSSHQQRRNAAVGSESSSXRDRRRPQXFHTDNISASLQKLMVCFMQLTAKFPLVIIFLLIVLYAVPASAAVLVLYALVTFLFALPSFLILYFAYPSLDWLVREIFA

SEQ ID NO: 4678 - protein, 193 aa, Zea mays
  unsure (1)..(193): unsure at all Xaa locations
  Clone ID: PAT_MRT4577_143214C.1.pep
MLLSVDNTSAGRQHEVKDLSQEHFGRLEIEMREVEMAVLMACRAECGPYKPFADARISGSLHMTIHXTATSSRPSPRLGVEVXWCSCCIXSTRGTSAXAAIXRDSAAXSAEKDXTLEEYWWCTERCLDXVRAVPPDLIEDDGQXATLLIHDRVQGEEDYNKIGKIPDPESTDDAEIKIEITIIRDCVKVDPKN

SEQ ID NO: 4679 - protein, 828 aa, Zea mays
  unsure (1)..(828): unsure at all Xaa locations
  Clone ID: PAT_MRT4577_143224C.1.pep
MESSWLLLLSCLPAVWVLAAAAGRSPGCATRCGEIDVPYPFGLDPQCAIHAGFWLNCTTVDGATKLLDKNSEVTKISVEDGKAWFKNFISRQCYNQSSGDMFENNAWVDYTGEPYVLSAEDNKIIVLGCNSMAYMQSDSYIIGCMSTCDDPLKNGSCSGTAGCCQAELPPGVQFYQGFFNSLHNTTKIWKQTPCNYITVMESAAFSFSSTYLNSTVLYDSDDGRTPVVMEWGITRQTCEEAKANKTAYACVSNHSDCVYSDAAGYRCRCSGGFKGNPYVVDGCAGSFLLRAQTSKSMHAQVTNRCDFFVRFSDIDECLDSATYPCAGICKNTLGNFTCSCPRGRSMINGVCVKSQRSTWMVPVVGRSLHKLRTCVRKIPCREHLFFFPTLFQCFPGVYRRSNKXFVRKIXCIAGASVGLVTLVIGVTCAYLVRERRKLHRVKQSYFRRHGGLLLFEELKSQHHQQGAAAFTIFSEEELQQATDRFDAQRVLGHGGHGTVYKGVLKSGTATEIAVKRCMTIDEQQKKEFGKEMLILSQVNHRNIVKLLGCCLEVEVPILVYEFVPNGTLFDLIHGDHGQRVSLDTRLRIAYESAEALAYLHSCASPPILHGDVKSTNILLDGDYAAKVSDFGASILAPNDKSQFVTVVQGTCGYLDPEYMQTYELTDKSDVYSFGVVLLELLTGKKAFDLQGSEQDRSLSMRFLYAMKENRLEDILDDQIKNSESIEYLEEIAELARQCLEMSGVNRPTMKEVADKLGRLRKIMKHPWAHEDPEELDRLLGEPSTTTNSTATTGNFIIAIGEPSTANSTANTGNFSITKRAAMGLESGR

SEQ ID NO: 4680 - protein, 89 aa, Zea mays
  Clone ID: PAT_MRT4577_143334C.1.pep
ATRQVTRMVRGAESLQCHGFRRLESFLHEEHLLIFLPHHKPVKVYVLRWSWGGQGHMHFPPMLEQNVLTIFWYSDYLASLYQVPKNQAS

SEQ ID NO: 4681 - protein, 568 aa, Zea mays
  Clone ID: PAT_MRT4577_143406C.1.pep
MEHSSSLEIRIEALRPHPPFSLALQVATHSVRRDRRSETTSPPTIRNARAMCPVRGGGCSWPASVVGSVTAALLLAAVIVRLFVPSACSSGIIKGRRQVGAGAAGGARLPAGSLGWPLLGETLAFIRAAYSPRPESFVEKRRVLYGKVFKSHLWGSPAVVSSDPEVSRAVLQADASAFVPWYPRSLMELMGQSSILVLGGGLQRRVHGLAGAFFKSPQLKAQVTLDMQRRVGRAMDMWGRRRHRSMGDDDSGGMPVRVQNEAKSIVFEILVRALIGLEEGDKMQYLRQQFQEFIAGLISLPVKLPGTQLYRSLKAKKRMTKLIKTIIQEERKKMMSEGDDLRGGTHPRDMIDVLLGNGNDELTDELISDNMIDFMIPAEDSVPVLITLAVKYLSECPQALQQLEEENMELKRQKSGAGETLEWTDYMSLAFTQHVITETLRMGNIINGIMRKAVRDVEVRGHLVPKGWRVLVYFRAVHLDAAVHDDPHAFNPWRWKERPDVVAMSGFTPFGGGQRLCPGLDLARLEASIFLHHLVTNFRWVAEEDTVVNFPTVRLKRGMPIAVTPRTC

SEQ ID NO: 4682 - protein, 161 aa, Zea mays
  Clone ID: PAT_MRT4577_14340C.1.pep
MTSSSTPSRKALSKIACNRLQKELAEWQVGPPAGFKYKVSDNLQRWVIEVGGAEGTLYAGETYQLQVDFPEHYPMEAPQVIFLNPAPMHPHIYSNGHICLDILYDSWSPAMTVSSVCISILSMLSSSPAKQRPADNDRYVRNCRNGRSPKETRWWFHDDKV

SEQ ID NO: 4683 - protein, 115 aa, Zea mays
  unsure (1)..(115): unsure at all Xaa locations
  Clone ID: PAT_MRT4577_143488C.1.pep
NQLEAQIHRKDIYGGQVGEYMRNLDEXEPEKGQFRFSECIKXGIEAFGMGALYKKVQSAIRADPSVVKWTKQPPKEHXRCYPKKVTFEQRKASFIERLNRLNSSGGTEAADEDDE

SEQ ID NO: 4684 - protein, 176 aa, Zea mays
  unsure (1)..(176): unsure at all Xaa locations
  Clone ID: PAT_MRT4577_143683C.1.pep
MGNQLATMRRHIRVPTRAAKIFGLLMLLGLSAGAVTATIFPQGSQAPIASFFPPYLXPAGSSVCENPIFQPYRIQQAIEVGILPXIXPLFLQQXXALLQQLPLGHXMXQNIRAQQLQQLVLANLVAYFKKQQFFPFNQLGSLNFVFNLKQQQLQFSQLPVAYPKHFLPFNQLAALN

SEQ ID NO: 4685 - protein, 471 aa, Zea mays
  Clone ID: PAT_MRT4577_143832C.1.pep
MVGAMRGGAMELEDRLATLPRFRGDHDDDGKERRTGTVWTATAHIITAVIGSGVLSLAWAMAQLGWVAGPVILVLFAAITFYTCGLLADCYRVGDPVTGKRNYTYTEAVKSYLGGRYVWFCGFCQYVNMFGTGIGYTITASISAAAINKSNCFHWHGHDADCSQNTSAYIIGFGVVQVIFSQLHNFHKLWWLSIIAAIMSFSYSAIAVGLSLAQIVMGPTGKTTMTGTLVGVDVDAAQKVWMTFQALGNVAFAYSYAIILIEIQDTLRSPPAENKTMRRATMMGISTTTGFYMLCGCLGYAAFGNAASGNILTGFGFYEPFWLVDFANACIVVHLVGGFQVFCQPLFAAVEGAVAARYPGSTREYGAAGLNVFRLVWRTAFVAVITLLAILMPFFNSILGILGSIAFWPLTVFFPVEMYIRQRQVRRFSTKWIALQSLSFVCFLVTAASCAASVQGVVDSLKTYVPFKTRS

SEQ ID NO: 4686 - protein, 172 aa, Zea mays
  Clone ID: PAT_MRT4577_143833C.1.pep
MVGAMRGGAMELEDRLATLPRFRGDHDDDGKERRTGTVWTATAHIITAVIGSGVLSLAWAMAQLGWVAGPLTLVLFAAITFYTCGLLADCYRVGDPVTGKRNYTYTEAVKSNLGGWYVWFCGFCQYVNMFRTSIGYTITAFISAAGINKSNCFHWHGHDADCSQNTSAYIIG

SEQ ID NO: 4687 - protein, 99 aa, Zea mays
  Clone ID: PAT_MRT4577_143840C.1.pep
ASEQLCFSISPIASLPIPPARRFVREGDTAALASSPEQQAAARDLRAQQRRTGSWWRPAEKMAGASSVDTEAAAGTANVKAGLHTPQGARVPHDAGGHG

SEQ ID NO: 4688 - protein, 61 aa, Zea mays
  Clone ID: PAT_MRT4577_143884C.1.pep
VNAIFTIPPELAYGASGSTTNNPTQCKPAIDVEMLSWTSVHSHLLRWRLIHAATLKRESPG

SEQ ID NO: 4689 - protein, 78 aa, Zea mays
  Clone ID: PAT_MRT4577_144014C.1.pep
MAAADVEYRCFLGRLAWATSNESLENAYDFYGEILDSKVITDRETERSRGFGYVTFSFENFMLYAIENMNCKELDGRN

SEQ ID NO: 4690 - protein, 165 aa, Zea mays
  Clone ID: PAT_MRT4577_14402C.1.pep
MSSHRVKWNEDNLYEIESNKPVRQKITEPKTPYHPMIDDDGSLSPTRPFDKCLDETVQAEAILTALNGVASSSISISKDDGWGSSDDDTDAIDQDADPEADTTRLSFKEHRRAHYDEYRKVKELMRTGSLTAEEADEDNRAATSSEDKGVGKGGPNDNMKPSPQT

SEQ ID NO: 4691 - protein, 52 aa, Zea mays
  Clone ID: PAT_MRT4577_144152C.1.pep
ARPQPPPERRLKLRALRPRGARCGGARFSTDSKQEFDHKRCHALIRLTVGSC

SEQ ID NO: 4692 - protein, 448 aa, Zea mays
  Clone ID: PAT_MRT4577_144161C.1.pep
MALLVRRARRAATKAAVSLAGRTGSVELAIPAHFRCPISLDLMRDPVTAPAGITYDRESIEAWLDTGRATCPVTHAPLRHEDLVPNHAIRRVIQDWCVANRSRGVERIPTPKIPVTPVQASELLFDLAGSARRRDAAARCAEVVTKIKVLARDSERNRRCFASIGTGRVLAAAFESLAAAAAADAAAPAGRVLEDILAALVCMMPLDEEAARTLALPTSLGSLVAIAENGSLAGRLNAVLAIKEVVSCDGAVTDLSGKADEIVDALAKIIKSPICPQATKAGMVATYHLALYDERVAARLAAAGLVPVLVEVLVDADKSMSEKALAVLDAVLASEEGRASARAHALAVPMLIKKMFRVSDLATQLAVSAMWRLGKAHSDGEDDGAVTRCLVEALGVGAFQKLLLLLQVGCRDATKEKATELLKLLNKYKSVGECVDAVDFRGLNKLSS

SEQ ID NO: 4693 - protein, 510 aa, Zea mays
  Clone ID: PAT_MRT4577_144241C.1.pep
MAAEQGRSLAETPTWSVATVTTLMVAACFLVERSLSRFAKWLRKTKRKAMLAALEKIREELMLLGVISLLLSQTARFISEICVPSSLFTSRFYICSESDYQDLLRNTDANQTALDKNMFGGQRLHVCGEGHEPFVSYEGLEQLHRFLFILGITHVLYSFVTVVLSMIKIYSWRKWETLAGPIAAEELKARRTKVMRRQSTFVFNNASHPWSKNKILIWMLCFLRQFKGSIIRSDYLALRLGFVTYHKLPHSYDFHKYMVRSMEDDYNGTIGISWPLWAYAIVCILINVHGINIYFWLSFVPVIKLVLLVGTELQHVIAQLALEVAEATAPYVGSQLKLRDDLFWFGKPRVLWWLIQFISFQNAFELATFLWSLWELSAHTCFMKHYYMVAIRLISGLLVQFWCSYSTLPLNVIISQMGSKFKKSLVSENVRESLHSWCKRVKDRSRHNPLFSRNGTLTTRSVCSLDTTYETDHETNTVCTLSRTASATSLDDQLTVVTVDDEPSCIEKDV

SEQ ID NO: 4694 - protein, 118 aa, Zea mays
  unsure (1)..(118): unsure at all Xaa locations
  Clone ID: PAT_MRT4577_144375C.1.pep
DRSARLDPPHTYFVHPWRNILEGRFSPQVAVAALIPXFQQLTGINVNMFYAPVLSLTICFSDDTSIMAAVITGLVNMFATREYIASVDXRLGLSALLLQGGTQIFDSQIVEGTLIALQ

SEQ ID NO: 4695 - protein, 108 aa, Zea mays
  unsure (1)..(108): unsure at all Xaa locations
  Clone ID: PAT_MRT4577_144426C.1.pep
FPAGPTRARFSSPSGSGSGPRGSPEGGGVRERIEMAASDVEXYRLIVRRLTCATDDHSLHNAFSTYSEVLDSKIILDRETQMYRGFRFVTFFTGDAMRNAIXEGMNGK

SEQ ID NO: 4696 - protein, 358 aa, Zea mays
  unsure (1)..(358): unsure at all Xaa locations
  Clone ID: PAT_MRT4577_14449C.1.pep
MATTATNRRVILKEYVEGYPREEHMELLQGAEVPLRLTGAEPAGSVLVRNLYLSCDPYMRPKMSRPLRESYTAAFVPGDTITGYXAARVVDSSDPRLAPGDLVWGITGWEDYSVVTPPATRLLSKISHHGAGEGAGVPLSYYTGILGMPGLTAYVGFHEICAPKKGETVFVSAASGAVGQLVGQFARLAGCHVVGSAGSREKVELLKTRFGFHDAFNYKEEPDLGAALKRCFPDGIDIYFENVGGAMLDAVLLNMRVHGRIAVCGLISQYNLADGEKDAVRNLAAVISKRLRLQGFIEPDHKHLYPQYEAWVLPYIRDGTLAYVEDVAEGLESAPKALIGLFHGRNVGKQLVRVADDE

SEQ ID NO: 4697 - protein, 59 aa, Zea mays
  Clone ID: PAT_MRT4577_144533C.1.pep
TPKNQILFITKRGSQIFFHTYMLIGVNPVDHLKLHTYLFKLIQLVATSEVHMLTDDKFS

SEQ ID NO: 4698 - protein, 71 aa, Zea mays
  Clone ID: PAT_MRT4577_144569C.1.pep
MGFRGAQEGGGLLSWKGMNSDSEATGLKFFLRIFGIGPGAKQMFSFLGDTCDAPVDKHSKLKGHAVTGFRM

SEQ ID NO: 4699 - protein, 66 aa, Zea mays
  unsure (1)..(66): unsure at all Xaa locations
  Clone ID: PAT_MRT4577_144800C.1.pep
TNXTHIPEHLSPLLMPFPTMNPXMQYFMKQQVVANLIAIPTLILHQLLTSPLHQCQIPMITPGMMP

SEQ ID NO: 4700 - protein, 303 aa, Zea mays
  Clone ID: PAT_MRT4577_14481C.1.pep
MRTNPTTSRPGISTIEEKSVGRIDQIIGPVLDITFPPGKLPYIYNALIVKSRDTADKQINVPGQVQQLLGNNRVRAVAMSATEGLMRGMEVIDTGTPLSVPVGGATLGRIFNVLGEPIDNLGPVDTSATFPIHRSAPAFIELDTKLSIFETGIKVVDLLAPYRRGGKIGLFGGAGVGKTVLMPRPINNITKAHGGVSVFGGVGERTREGNDLYMEMKESGVINEKNIEESKVALVYGQMNEPPGARMRVGLTALTMAEYFRDVNKQDVLLFIDNIFRFVQAGSEVSALLGRMPSAVGYQPTLS

SEQ ID NO: 4701 - protein, 74 aa, Zea mays
  unsure (1)..(74): unsure at all Xaa locations
  Clone ID: PAT_MRT4577_14490C.1.pep
DKEYEGNVEATGEDFSVEPADETMPFRALLDVSLXRTTTGTRVVGAIKXSLDGGLYMQHTDKRYAAFNNDDKQL

SEQ ID NO: 4702 - protein, 119 aa, Zea mays
  unsure (1)..(119): unsure at all Xaa locations
  Clone ID: PAT_MRT4577_145492C.1.pep
KPEAKKDPGARPPPQDRGGGCGGAARRFRRLPLPRAPQKEKGPQGPRGGRRRKKAPLFRLIDPPXVSSSXPCATXVCESDIERPPFCARVRLYALVLCPNKRGYVIYRMYTCGYACAWV

SEQ ID NO: 4703 - protein, 74 aa, Zea mays
  unsure (1)..(74): unsure at all Xaa locations
  Clone ID: PAT_MRT4577_145816C.1.pep
IVSGSGSGNDMYQNRFLQREAAFNKFRLKRKDWNFGKKVCYQNRKRLFXQRPRVRGQFVRQFEQKDQTAQGLKK

SEQ ID NO: 4704 - protein, 332 aa, Zea mays
  Clone ID: PAT_MRT4577_145875C.1.pep
MSTANRYQHIKSTKPVVGKARKLKDLMIKSDNRICADCGAPDPKWASANIGVFLCLKCGDVHRALGPDISKVLSVTLDDWSDSDIDSMVEVGGNSYANSIYEAFLPKDHPKPKPDSTMEYRTKFIRAKYETQDFLKPSLRISSRSSFKSTTSVKSVDSNFSSTSRKDVFEDTREFVGELNITLVKGTNLAVRDMLTSDPYVVLTLGGQKVQSTVKKSDLNPVWNEVLKISVPRNYGPLKLEVYDHDMFSADDIMGEAEIDLQPMITAAMAFGDTSRLGDMQIGRWFMTKDNALMKDSTVNVVAGKVKQEVHLKLQNVESGELELELEWVPIL

SEQ ID NO: 4705 - protein, 189 aa, Zea mays
  Clone ID: PAT_MRT4577_145926C.1.pep
LPRYIQISRHLKKKKKRGRSRSSWLLLPHRFVFRFWFVGEREEMAASDVEYRCFVGGLAWATDDHSLNNAFSTYGEVLESKIILDRETQRSRGFGFVTFSTEDAMRSAIEGMNGKELDGRNITVNEAQSRGGRGGGGGGYGGGRRDGGGYGGGGGGYGGGRGGYGGGGGGYGGANRGGGYGNNDGNWRN

SEQ ID NO: 4706 - protein, 112 aa, Zea mays
  Clone ID: PAT_MRT4577_146023C.1.pep
AQGYTNQQQGKFSHSTLFYAGNIWLPATGGKGLCKDGSNRHRKVLRDNIQGITKPAIRRLARRGGVKRISGLIYEETRGVLKIFLENVIRDAFTYTEHARRKTVTAMDVFYA

SEQ ID NO: 4707 - protein, 113 aa, Zea mays
  Clone ID: PAT_MRT4577_146083C.1.pep
SASYLQQHQLPFSQLLPTSPQHFLPFNQLAAFYSAAYLQQQQLLPFKQLAGMSPATFSIHPQLFPFSQLCAPSSGPLLHVPQFLPFSHRALTNPGAFSDQPIIGGALFWISYE

SEQ ID NO: 4708 - protein, 223 aa, Zea mays
  Clone ID: PAT_MRT4577_146094C.1.pep
MSNAASTTPLLAHYKMGKFDLSHRVVLAPLTRERSFGNVPQPHAILYYQQRATKGGLLIAEATGVSDTAQGYKDTPGIWTKKQVEAWKPIVDGVHAKGGIFFCQVWHVGRVSNHTFQPNGQAPISSTDKPIKPATRADGIGLAKVSTPRRLTTDEIPLVIDDFRVAARNAIEAGFDGVEIHGAHGYLIDQFLKDQVNDRTDKYGGSLENRCRFALEVVQAVAD

SEQ ID NO: 4709 - protein, 289 aa, Zea mays
  Clone ID: PAT_MRT4577_146234C.1.pep
MAAPMVDAEYLRQVDRARRHLRALISNKGCAPIMLRLAWHDAGTYDLKTKTGGANGSIRYEEEYTHGSNAGLKIAIDLLEPIKAKNPKITYADLYQLAGVVAVEVTGGPTVEFIPGRRDSSVCPREGRLPDAKKGAPHLRDIFYRMGLSDKDIVALSGGHTLGRAHPERSGFDGAWTKEPLKFDNSYFLELLNEESEGLLKLPTDKALLSDPEFRRYVELYAKDEDAFFKDYAESHKKLSELGFTPRSTAPSKSDLPTAAVLAQSAFGVAVAAAVVIAGYLYEASKKAK

SEQ ID NO: 4710 - protein, 301 aa, Zea mays
  unsure (1)..(301): unsure at all Xaa locations
  Clone ID: PAT_MRT4577_146362C.1.pep
MEQYEKVEKIGEGTYGVVYKALDKATNETIALKKIRLEQEDEGVPSTAIREISLLKEMNHGNIVRLHDVVHSEKRIYLVFEYLDLDLKKFMDSCPEFAKNPTLIKSYLYQILHGVAYCHSHRVLHRDLKPQNLLIDRRTNALKLADFGLARAFGIPVRTFTHEVVTLWYRAPEILLGARQYSTPVDVWSVGCIFAEMVNQKPLFPGDSEIDELFKIFRILGTPNEQSWPGVSCLPDFKTAFPRWQAQDLATVVPNLDPAGLDLLSKMLRYEPSKRITARQALEHEXYFKALEVVQCPAKCA

SEQ ID NO: 4711 - protein, 699 aa, Zea mays
  Clone ID: PAT_MRT4577_146436C.1.pep
MATETETFAFQAEINQLLSLIINTFYSNKEIFLRELISNSSDALDKIRFESLTDKSKLDAQPELFIHIVPDKASNTLSIIDSGIGMTKSDLVNNLGTIARSGTKEFMEALAAGADVSMIGQFGVGFYSAYLVAERVVVTTKHNDDEQYVWESQAGGSFTVTRDTSGEQLGRGTKITLFLKEDQLEYLEERRLKDLVKKHSEFISYPISLWTEKTTEKEISDDEDEEEKKDAEEGKVEDVDEEKEEKEKKKKKIKEVSHEWSLINKQKPIWMRKPEEITKEEYAAFYKSLTNDWEEHLAVKHFSVEGQLEFKAVLFVPKRAPFDLFDTRKKQNNIKLYVRRVFIMDNCEELIPEWLSFVKGIVDSEDLPLNISRETLQQNKILKVIRKNLVKKCVELFFEIAENKEDYNKFYEAFSKNLKLGIHEDSQNRTKIAELLRYHSTKSGDELTSLKDYVTRMKEGQNDIYYITGESKKAVENSPFLEKLKKRGYEVLYMVDAIDEYAVGQLKEFEGKKLVSATKEGLKLDETEDEKKRKEELKEKFEGLCKIIKEVLGDKVEKVVVSDRVVDSPCCLVTGEYGWTANMERIMKAQALRDSSMSGYMSSKKTMEINPENPIMDELRKRAEADKNDKSVKDLVMLLFETALLTSGFSLDDPNTFGTRIHRMLKLGLSIDEDESAEAEAEMPPLEDDAGESKMEEVD

SEQ ID NO: 4712 - protein, 698 aa, Zea mays
  Clone ID: PAT_MRT4577_146438C.1.pep
MASETETFAFQAEINQLLSLIINTFYSNKEIFLRELISNSSDALDKIRFESLTDKSKLDAQPELFIHLVPDKATNTLSIIDSGIGMTKSDLVNNLGTIARSGTKEFMEALAAGADVSMIGQFGVGFYSAYLVADRVVVTTKHNDDEQYVWESQAGGSFTVTRDTSGEQLGRGTKITLFLKDDQLEYLEERRLKDLVKKHSEFISYPISLWTEKTTEKEISDDEDEEEKKDAEEGKVEDVDEKEEKEKKKKKIKEVSHEWSLVNKQKPIWMRKPEEITKEEYAAFYKSLTNDWEEHLAVKHFSVEGQLEFKAVLFVPKRAPFDLFDTKKKQNNIKLYVHRVFIMDNCEELIPEWLSFVKGIVDSEDLPLNISRETLQQNKILKVIRKNLVKKCVELFFEIAENKEDYNKFYEAFSKNLKLGIHEDSQNRTKIAELLRYHSTKSGDELTSLKDYVTRMKEGQNDIYYITGESKKAVENSPFLEKLKKRGYEVLYMVDAIDEYAVGQLKEFEGKKLVSATKEGLKLDETEDEKKRKEELKEKFEGLCKVIKEVLGDKVEKVVVSDRVVDSPCCLVTGEYGWTANMERIMKAQALRDSSMAGYMSSKKTMEINPENPIMDELRKRAEADKNDKSVKDLVMLLFETALLTSGFSLDDPNTFGNRIHRMLKLGLSIDEDEPVEAEAEMPQLEDDAGESKMEEVD

SEQ ID NO: 4713 - protein, 698 aa, Zea mays
  Clone ID: PAT_MRT4577_146439C.1.pep
MASETETFAFQAEINQLLSLIINTFYSNKEIFLRELISNSSDALDKIRFESLTDKSKLDAQPELFIHLVPDKATNTLSIIDSGIGMTKSDLVNNLGTIARSGTKEFMEALAAGADVSMIGQFGVGFYSAYLVADRVVVTTKHNDDEQYVWESQAGGSFTVTRDTSGEQLGRGTKITLFLKDDQLEYLEERRLKDLVKKHSEFISYPISLWTEKTTEKEISDDEDEEEKKDAEEGKVEDVDEKEEKEKKKKKIKEVSHEWSLVNKQKPIWMRKPEEITKEEYAAFYKSLTNDWEEHLAVKHFSVEGQLEFKAVLFVPKRAPFDLFDTKKKQNNIKLYVRRVFIMDNCEELIPEWLSFVKGIVDSEDLPLNISRETLQQNKILKVIRKNLVKKCVELFFEIAENKEDYNKFYEAFSKNLKLGIHEDSQNRTKIAELLRYHSTKSGDELTSLKDYVTRMKEGQNDIYYITGESKKAVENSPFLEKLKKRGYEVLYMVDAIDEYAVGQLKEFEGKKLVSATKEGLKLDETEDEKKRKEELKEKFEGLCKVIKEVLGDKVEKVVVSDRVVDSPCCLVTGEYGWTANMERIMKAQALRDSSMAGYMSSKKTMEINPENPIMDELRKRAEADKNDKSVKDLVMLLFETALLTSGFSLDDPNTFGNRIHRMLKLGLSIDEDEPVEAEAEMPQLEDDAGESKMEEVD

SEQ ID NO: 4714 - protein, 259 aa, Zea mays
  Clone ID: PAT_MRT4577_146470C.1.pep
MAAAAAAAGTREEMVYMAKLAEQAERYEEMVEFMEKVAAAAELTVEERNLLSVAYKNVIGARRASWRIVSSIEHKEETRGAAGHAAAARGYRARVEAELSGICAGILRLLDERLVPAAAAVDARVFYLKMKGDYHRYLAEFKTGAERKDAADSTLAAYQAAQDIAVKELPPTHPIRLGLALNFSVFYYEILSSPDRACSLAKQAFDEAISELDSLGEESYKDSTLIMQLLRDNLTLWTSDMQEDGGDEMRDANKPDEEQ

SEQ ID NO: 4715 - protein, 590 aa, Zea mays
  Clone ID: PAT_MRT4577_146477C.1.pep
MGRGGARAAPAAAVPPWHALPDEVWEHAFSFLPADSDRGAAACACHAWLRFERRSRRRLAVANCYAASPRDAVERFPAVRAVEVKGKPHFADFGLVPPAWGADAAPWVAAAAAGWPLLEEISFKRMVVTDDCLEMIAASFRNFQVLRLVSCEGFSTAGLAAIAAACRNLRELDLQENEIEDCSIHWLSLFPVSFTSLVTLNFSCLEGDVNITVLEQLVTRCSNLKTLKLNNAIPLDKLANLLRKAPQIVELGTGRFSADYHPDLFSKLEAAFAGCKSLRRLSGAWDAVPEYLPAFYCVCEGLTSLNLSYATVRGPELIKFISRCKNLQLLWVMDLIEDHGLAVVASSCNKLQELRVFPSAPFEAAEQVSLTERGLVDVSASCPMLESVLYFCRRMTNEALITIAKNRPNFTCFRLCIIEPHTPDYITHQPLDAGFSAIVESCKGLRRLSVSGLLTDSVFKSIGAHADRLEMLSIAFAGNSDLGLHYILSGCKSLKKLEIRDCPFGDKPLLANAAKLETMRSLWMSTCSMTLGACRQLARKMPRLSVEVMNDPRRGFPLDSLTDESPVETLYVYRTISGPRSDTPACVQIL

SEQ ID NO: 4716 - protein, 499 aa, Zea mays
  Clone ID: PAT_MRT4577_146531C.1.pep
MVVSVAATGPGTDAEPVSSTFFASRYVRDPLPRYRMPERSIPREAAQQIISDELMLDGNPRLNLASFVTTWMEPECDKLIMDSINKNYVDMDEYPVTTELQNRCVNMIAHLFNAPIKEDETAIGVGTVGSSEAIMLAGLAFKRKWQNKRKEQGKPCDRPNIVTGANVQVCWEKFARYFEVELKEVKLSEGYYVMDPVKAVEMVDENTICVAAILGSTLTGEFEDVKQLNDLLTEKNKETGWDVPIHVDAASGGFIAPFLYPELEWDFRLPLVKSINVSGHKYGLVYPGVGWVIWRSKDDLPEELIFHINYLGTDQPTFTLNFSKGSCQIIAQYYQLIRLGFEGYRNIMENCQENAAILREGIAATGRFDVLSKDAGVPLVAFSLRDSSRFSVFDVSENLRRFGWIVPAYTMPADAEHVAVLRVVVREDFSRSLAERLVSDVRKILRELDARATHAVRVATATAEQSGDGVVAKKSVLEIEREVAARWMNAVNKKKTGVC

SEQ ID NO: 4717 - protein, 220 aa, Zea mays
  Clone ID: PAT_MRT4577_146534C.1.pep
LTGQIPASLGALSALQVLRLGDNPGLSGAIPDALGKLGNLTALGLASCNLTCPIPASLVRLDALTALNLQQNALSGPIPRGLAGLASLQALSLAGNQLTGAIPPELGTLARLQKLNLGNNSLVGAIPPELGALGELQYLNLMNNRLTGRVPRTLAALSRVHTIDLSGNMLSGALPAELGRLPQLIFLVLSDNQLTGSVPGDLCGGDEAESSSIEHLMLSM

SEQ ID NO: 4718 - protein, 110 aa, Zea mays
  unsure (1)..(110): unsure at all Xaa locations
  Clone ID: PAT_MRT4577_146736C.1.pep
PRVRKLRFICNMYRTGCWVREYHRTPSGVCNGTSGCQAMLIRCYIDRXHVQHDAVGXCAALGAMTYRCIKAVECEPHAVTYGRLLTSMKSIMTNASGCYQHLKGACATAR

SEQ ID NO: 4719 - protein, 234 aa, Zea mays
  Clone ID: PAT_MRT4577_146756C.1.pep
MSRLAAAALRCVVTASRDTSSSRFAVSAPVSARLFSADASGEAAATAAESQDDSFFKASREGLAYGRFYSVIGGGSRLEKNILKTDIIHHLDRCGLSLDDVKIEYNKGYAPLAALLRFSSKAMFTTAIRQANQNRLHRIDEISRETWDLKKSFDGKAVLLQGVPRNALADDIERFLCGTNFEPPPFETFLRAGVPEPIRMMLVKFHTKTDAMNAFITKNRSFCLNSQVSMRVLQ

SEQ ID NO: 4720 - protein, 140 aa, Zea mays
  Clone ID: PAT_MRT4577_147020C.1.pep
GGSGGAREGGGFGGGGPRYGGGGSGGGGGSGGGGGSGGGGGGFGGGPRGGGFGNSPGNWRNLPVGPARPSFPFRSRDVSPSPKGLSSFVSCLLFPPCVFYCKVPLCQLLVLCSPPVSADPCLQQHGLRVDGCFSPPPAFF

SEQ ID NO: 4721 - protein, 445 aa, Zea mays
  Clone ID: PAT_MRT4577_147063C.1.pep
MDEEYDVIVLGTGLKECILSGLLSVDGLKVLHMDRNDYYGGDSTSLNLNQLWKRFRGEDKPPAHLGASRDYNVDMVPKFMMANGTLVRTLIHTDVTKYLSFKAVDGSYVFSKGKIYKVPATDMEALKSPLMGLFEKRRARNFFIYVQDYNEADPRTHQGLDLTRVTTRELIAKYGLSDDTVDFIGHALALHRDDRYLDEPALDTVKRMKLYADSLARFQGGSPYIYPLYGLGELPQGFARLSAVYGGTYMLNKPECKVEFDMEGKVCGVTSEGETAKCKKVVCDPSYLPNKVRKIGRVVRAIAIMSHPIPNTNESHSVQIILPQKQLGRRSDMYVFCCSYTHNVAPRGKFIAFVSAEAETDNPQSELKPGIDLLGSVDEIFYDIYDRYEPVNEPSLDNCFVSTSYDATTHFETTVTDVLNMYTMITGKTVDLSVDLSAASAAEEY

SEQ ID NO: 4722 - protein, 52 aa, Zea mays
  Clone ID: PAT_MRT4577_147104C.1.pep
LLLPLLPSPPRIRVPYGFVGGLWQRVVWNTVSYTAGFPWPPTTNPWIKPFSS

SEQ ID NO: 4723 - protein, 394 aa, Zea mays
  Clone ID: PAT_MRT4577_147208C.1.pep
MADSGEGRRVCGMPEKAQLHVAMLLLQFGYAGFHVVSRLALNMGISKLVFPVYRNIIALCLLVPFAYFLEKKDRPQLTLNFVVQFFLLALCGITANQGFYLLGLDNTSPTFASAIQNSVPAITFAMAAALRIEKVRLDRRDGVAKVAGTLACVAGASVITLYKGPTIFGPSGSGGGGGGLELAAVGGDKNWTLGCVYLIGHCLSWSGWLVLQAPVLKKYPARLSVTSYTCFFGVIQFLVIAAFMERDAEAWKFHSGSELFTILYAGFIASGVAFAVQIWCIDRGGPVFVAVYQPVQTLVVAIMASLTLGEKFYLGGIIGAVLIVAGLYLVLWGKSEERARVARDAVSGGDREGLLVAAAAGGGGGGIVRSAGNKAASAATQPLLLPSSTPTDNV

SEQ ID NO: 4724 - protein, 400 aa, Zea mays
  unsure (1)..(400): unsure at all Xaa locations
  Clone ID: PAT_MRT4577_147210C.1.pep
MADAGEGRRVCGMPEKAQLHVAMLALQFGYAGFHVVSRLALNMGISKLVFPVYRNIIALCLLVPFAYFLEKKDRPQLTLNFVIQFFLLALCGITANQGFYLLGLDNTSPTFASAIQNSVPAITFAMAAALRIEKVRLDRRDGVAKVAGTLACVAGASVITLYKGPTIFXPAAAAAAATSSSCXVAVAVAAGEKNWTLGCVYLIGHCLSWSGWLVLQAPVLKKYPARLSVTSYTCFFGVIQFLVIAAFMERDADAWKFHSGSELFTILYAGFIASGVAFAVQIWCIDRGGPVFVAVYQPVQTLVVAIMASLTLGEKFYLGGIIGAVLIIAGLYLVLWGKSEERARIARDAAAALVVSGAGDREGLLAAGGGGGGGIRSKAAASAAVTQPLLLPSSTSTDNV

SEQ ID NO: 4725 - protein, 67 aa, Zea mays
  unsure (1)..(67): unsure at all Xaa locations
  Clone ID: PAT_MRT4577_147268C.1.pep
AVVLRYLAGEVLELAGNAARDNKXTRIVPRHIQLAVRHDEELNKLLGGATIASGGVMPNMGGXLLPK

SEQ ID NO: 4726 - protein, 54 aa, Zea mays
  Clone ID: PAT_MRT4577_147335C.1.pep
FDLDARATHAVRVSAATAEQSGDGVVAKKSVLEIEREVAARWRNAVNKKKTGVC

SEQ ID NO: 4727 - protein, 193 aa, Zea mays
  unsure (1)..(193): unsure at all Xaa locations
  Clone ID: PAT_MRT4577_147337C.1.pep
WVPGPPRVDPRVRLNFSXGSCQIIAQYYQLIRLGFEGYRNXMENCQENAAILREGIAATGRFDVLSKDAGVPLVAFSLRDSSRFSVFDVSENLRRFGWIVPAYTTPADAEHVAVLRVVVREDFSRSLAERLVSDVRKILRELDARATHAVRVSTATAEQSGDGVVAKKSVLEIEREVAARWMNAVNKKKTGVC

SEQ ID NO: 4728 - protein, 159 aa, Zea mays
  Clone ID: PAT_MRT4577_147424C.1.pep
MDATGTGAGGKAKKGAAGRKAGGPRKKSVTRSVKAGLQFPVGRIGRYLKKGRYAQRVGSGAPVYLAAVLEYLAAEVLELAGNAAKDNKKTRIVPRHVLLAIRNDEELGKLLAGVTIAHGGVLPNINPVLLPKKTAEKASSGGSKEAKSPRKVAKSPKKA

SEQ ID NO: 4729 - protein, 159 aa, Zea mays
  Clone ID: PAT_MRT4577_147426C.1.pep
MDATGTGAGGKAKKGAAGRKAGGPRKKSVTRSVKAGLQFPVGRIGRYLKKGRYAQRVGSGAPVYLAAVLEYLAAEVLELAGNAAKDNKKTRIVPRHVLLAIRNDEELGKLLAGVTIAHGGVLPNINPVLLPKKTAEKASSGGSKEAKSPRKAAKSPKKA

SEQ ID NO: 4730 - protein, 313 aa, Zea mays
  unsure (1)..(313): unsure at all Xaa locations
  Clone ID: PAT_MRT4577_147427C.1.pep
MGGMPDAWADAWADAWADAWADAWEILVCTHIIESGIDIAHANTMIIQFAELYGLAQLYQLRGRVGRSGTEGFAYLFYTDKSLLSXELQRLGAIEEHSELGQGFHVAEKDMGIRGFGSLFGEQQSGDVANVGIDLFFDMLFDSLSKVDQFCLVPVPYKDVQLDINISPRLSSEYISYLENPVELLNEAAKAAEKDLWTLIQFTEDLRRRYGKEPRDMELLLKKLYVRRMAADLGISRIYPSGKMIFMKTNMNKKVFRLMTEAMTSETHRNSLSFAEKEIKAELLVNLPDTLLLNWLFHCLSDCYTVIPALVKY

SEQ ID NO: 4731 - protein, 417 aa, Zea mays
  unsure (1)..(417): unsure at all Xaa locations
  Clone ID: PAT_MRT4577_147438C.1.pep
GPSSFLSLARSPPFPRSLSSSSLHSYLRSRHSPPTEGQGTVPTRPPVRPPWSPGGAARPGCRRRRAPRSAPPXGGEAKVTPEADPAAQHDEADEERWSRLLPELLTEIMRRVDAGAERWPPRRDVVVCACVCRRWRDAAVSVVRPPLECGRITFPSSLKQPGPRDAPMHCFIRRDKKNSTFSLYLSLTQALTDKGKFLLAARRFRQGAHTEYIISYDYDDLHPRSSSYVGKLRSDFLGTKFIIYDSQAPYDGAKPSRTRSTRRFASKQISPQVSGGNFEVGQVTYRFNFMKSRGPRRMQCNIQCPVGQGSASDPSKEKTPSPSSLDLKNKAPRWHDHLQCWCLNFHGRVTVASVKNFQLVATAGSGGPWGVGDEETVILQFGKIEDDAFTMDYRQPLSAFQAFAICLTSFGTKLACE

SEQ ID NO: 4732 - protein, 302 aa, Zea mays
  Clone ID: PAT_MRT4577_147484C.1.pep
MGSEADCDRIRGPWSPEEDDALRRLVERHGARNWTAIGREIPGRSGKSCRLRWCNQLSPQVERRPFTAEEDAAIVRAHARLGNRWAAIARLLPGRTDNAVKNHWNCSLKRKLAAASAPAGSSDVDARPTKRVSLSPDSPSGSGSGSGSGSGSDRSDLSHGAGQVYRPVARSGGFEPADCAMSRPLEEEEEEKEDPLTSLSLSLPGTDQRFHHDRAHSQFQELPASPPSPSPPPPPAGPTSAYPFSPVFMEAMQELIRTEVQRYMASVGVRAGCGAAGGADLCMPQLVDGVMRAAAERVGRMQ

SEQ ID NO: 4733 - protein, 110 aa, Zea mays
  Clone ID: PAT_MRT4577_147564C.1.pep
SESYYLRRRGLAPSPIGGSRFPLRAARARRLTAVLAVAPVRGMSHRHLDLVGVSCAPRAGMVMISHRVHSVLRLGHPGTNDVTGWQEVRSAADRVDRLDDIRSHNGAPGL

SEQ ID NO: 4734 - protein, 92 aa, Zea mays
  unsure (1)..(92): unsure at all Xaa locations
  Clone ID: PAT_MRT4577_147568C.1.pep
EHDLESKADAGASKTYAHHAGTVRKNGFIGIKNRPXKVVVVPTSETVHHGHAKCHFAAIDIFNGKKLEDIAHXSHNCDITYVNRTEYQLIDL

SEQ ID NO: 4735 - protein, 87 aa, Zea mays
  Clone ID: PAT_MRT4577_147672C.1.pep
PGWPKGGAGGYGAGGGYAGRPQGGGGGYGGGGGGWRDLCVGPPWLGPSYLTHLKDRGPVRFGPRVRARSPLGLGVGTPAPPPVCPRY

SEQ ID NO: 4736 - protein, 501 aa, Zea mays
  Clone ID: PAT_MRT4577_147684C.1.pep
MDTVGVPVVAVANGIGEVERKVQKSYWEEHSKCLTVESMMLDSRAADLDKEERPEILSLLPSYKGKSVLELGAGIGRFTGDLAKEAGHVLALDFIESVIKKNQSINGHHKNITFRCADVTSNDLKIEDNSVDLIFSNWLLMYLSDEEVQKLVGKMVKWLKVGGHIFFRESCFHQSGDSKRKVNPTHYREPRFYTKVFKEGHSFDQDGGSFELSLVTCKCIGAYVKNKKNQNQICWLWEKVKSTEDRDFQRFLDNVQYKTSGILRYERVFGEGFVSTGGIETTKEFVGMLDLKPGQKVLDVGCGIGGGDFYMAANYDVHVLGIDLSVNMVSFAIERAIGRKCSVEFEVADCTTKDYPENSFDVIYSRDTILHIQDKPALFRSFFKWLKPGGKVLISDYCKNPGKPSEEFAAYIKQRGYDLHDVKAYGQMLKDAGFHNVIAEDRTEQFLNVLQREIGEVEKNKDAFLADFTQEDYDDIVNGWNAKLKRSSAGEQRWGLFIATK

SEQ ID NO: 4737 - protein, 151 aa, Zea mays
  unsure (1)..(151): unsure at all Xaa locations
  Clone ID: PAT_MRT4577_147695C.1.pep
MAMTRPFLAPLMIVAAVLLSRMAAAAADDGDVLLQVKSAFVDDPXGVLAGWNDSAGSGAGSSGFCSWSGVACDASGLRVVGLNLSGAGLAGTVSRALARLDALEAIDLSSNALTGPVPAALGGLPNLQLLLLYSNQLTGQIPASLGALSAL

SEQ ID NO: 4738 - protein, 221 aa, Zea mays
  unsure (1)..(221): unsure at all Xaa locations
  Clone ID: PAT_MRT4577_148063C.1.pep
YARSIGPESRVDHASGGIGMTQSXLVNNLGTIARSGTKEFMEALAAGADVSMIGQFGVGFYSAYLVAERXVVVTTKHNDDEQYVWESQAGGSFTVTRDTSGEQLGRGTKITLYLKDDQLEYLEERRLKDLIKKHSEFISYPISLWTEKTTEKEISDDEDEEEKKDAEEGKVXDVDEEKEEKEKKKKKIREVSHEXWSLVNKQKPIWMRKPEEITKXEEYAA

SEQ ID NO: 4739 - protein, 499 aa, Zea mays
  Clone ID: PAT_MRT4577_148084C.1.pep
TCIVKLAWVSMDYLAAAVPVTLALGVGAILLVLRWTYCRRRTSAEEARLPPGSRGLLFLGETLHYLAASSTPGVLPPFFQRRLERYGPIFRTNLVGEDLVVSLDAELNAHVLKQEERGFQIWYPPSFMRVFGADNITAKLGVLHHYMRTLVLRLFGHQTVRSVLLHDVQRSARDELRSWLGRPDVEVRTATSRMIFGVTAKKLISHDDAASGETLWRCFHDWTSGLLSFPVSIPGTTFYRCMQGRKKVMTMLKQQLVERRRNAAERETTEDFFDLVIDELNKPDPMMDESTALDLLFTMLFASHETTSMVLTVILKYLTDNPKALQELTEEHERILESRADPGSDLTWEEYRSMKFTSHVIHESLRLANIALAMFRKANQDVHINGYTIPKGSKIMMCALASHLNTEVYEDPSVFNPWRWKDIPEPVGTSKDFMAFGGGLRLCAGAEFSKMQMAMFLHYLVTNYSWKPVSGGTMLFYPGLQFPEGFHIQLLPKIPNVVP

SEQ ID NO: 4740 - protein, 496 aa, Zea mays
  Clone ID: PAT_MRT4577_148098C.1.pep
MVLSHASSGRDDDAVASTFASRYVRERLPRYRMPERSIPREAAQQIISDELMLDGNPRLNLASFVTTWMEPECDKLIMDSINKNYVDMDEYPVTTELQNRCVNMIAHLFNAPIKEDETAIGVGTVGSSEAIMLAGLAFKRKWQNKRKEQGKPCDRPNIVTGANVQVCWEKFARYFEVELKEVKLSEGYYVMDPVKAVEMVDENTICVAAILGSTLTGEFEDVKQLNDLLTDKNKETGWDVPIHVDAASGGFIAPFLYPELEWDFRLPLVKSINVSGHKYGLVYPGVGWVIWRSKEDLPEELIFHINYLGTDQPTFTLNFSKGSSQIIAQYYQLIRLGFEGYRNIMQNCQDNAAILREGIAATGRFGVLSKDAGVPLVAFSLRDSSRFSVFDVSENLRRFGWIVPAYTMPADAEHVAVLRVVVREDFSRSLAERLVSDVRKILRELDARATHAVRVATATAEQSGDGVVAKKSVLEIEREVAARWMNAVNKKKTGVC

SEQ ID NO: 4741 - protein, 415 aa, Zea mays
  Clone ID: PAT_MRT4577_148101C.1.pep
MLLATVHLLTACPLFLQNRCVNMIAHLFNAPIKEDETAIGVGTVGSSEAIMLAGLAFKRKWQNKRKEQGKPCDRPNIVTGANVQVCWEKFARYFEVELKEVKLSEGYYVMDPVKAVEMVDENTICVAAILGSTLTGEFEDVKQLNDLLTEKNKETGWDVPIHVDAASGGFIAPFLYPELEWDFRLPLVKSINVSGHKYGLVYPGVGWVIWRSKDDLPEELIFHINYLGTDQPTFTLNFSKGSCQIIAQYYQLIRLGFEGYRNIMENCQENAAILREGIAATGRFDVLSKDAGVPLVAFSLRDSSRFSVFDVSENLRRFGWIVPAYTMPADAEHVAVLRVVVREDFSRSLAERLVSDVRKILRELDARATHAVRVATATAEQSGDSVVAKKSVLEIEREVAARWRNAVNKKKTGVC

SEQ ID NO: 4742 - protein, 520 aa, Zea mays
  Clone ID: PAT_MRT4577_148134C.1.pep
MAEQHKGPTNRVASDGLPDGVAPPRKKSNVRFAFACAILASMTSILLGYDIGVMSGAALFIKEDLKISDVEVEVLLGILNLYSLIGSFAAGRTSDWIGRRLTIILAAVIFFVGAFMMGFSVNYPMLMAGRFVAGIGVGYALMIAPVYTAEVSPASARGFLTSFPEVFINFGILLGYVSNYAFSRLPLRLGWRVMLGIGAAPSVVLALMVLGMPESPRWLVMKGRLADAKVVLGKTSDTPEEAAERLADIKAAAGIPQELDGDVVAVPKKRDSEEARVWKELILSPTPAMRRILLSGIGIHFFQQASGIDAVVLYSPRVFKAAGITSDNQLLGTTCAVGVTKTLFILVATFLLDRVGRRPLLLASTGGMVVSLVGLGFGLTVIGHHQEGTTIPWAIGVCIASILGVVAFFSIGLGPITWVYSSEIFPLHLRALGCALGVGLNRVTSGVISMTFLSLSKGITIGGSFFLYAGIASLAWVFFFTYLPETRGRTLEQMGGLFGIPNMAGDSDQLTSSRPRRRRP

SEQ ID NO: 4743 - protein, 482 aa, Zea mays
  Clone ID: PAT_MRT4577_148316C.1.pep
MMMMMMAGEHVLAALGTLLLASLLTLVLNHFLPLLLNPKAPRGSFGWPLLGETLRFLTPHASNTLGGFLEDHCSRYGRVFKSHLFCTPTVVSCDQDLNHFILQNEERLFQCSYPRPIHGILGKSSMLVVLGEDHKRLRNLALALVTSTKLKPSYLGDIEKIALHVVGAWRRHGGVRVVAFCEEARKFAFSVIVKQVLGLSPEEPVTARILEDFLAFMKGLISFPLYIPGTPYAKAVRARERISSTVKGIIKERRSAGSWNKQGDFLDVLLSSNELSDEEKVSFVLDSLLGGYETTSLLISMVVYFLGQSAQDLDLVKREHDSIRSNKGKEECLTSEDYKKMEYTQQVINEALRCGNIVKFVHRKALKDVKYKEYLIPSGWKVLPVFTAVHLNPSLHGDAQQFQPCRWEGTSQGTSKRFTPFGGGPRLCPGSELAKVETAFFLHHLVLNYRWRIDGDDIPMAYPYVEFQRGLPIEIEPTSPES

SEQ ID NO: 4744 - protein, 147 aa, Zea mays
  Clone ID: PAT_MRT4577_148470C.1.pep
AKQGLAEFVPSFVKPSFGNGTVLDKSDFRGSSGKTILDRPEPSKSNNSDDEAHQFWHKQLPDDIIPDFTSFEKVEQGPELSLAGLSLNAPPFYGTTSSRFSREYHELSSPVTKGLELELEHTNMLYEDKSNWEQNYIGDLHIANGNQ

SEQ ID NO: 4745 - protein, 178 aa, Zea mays
  unsure (1)..(178): unsure at all Xaa locations
  Clone ID: PAT_MRT4577_148473C.1.pep
MGQSPERATYQLIDRREASMYSESRGEARDFARVRNTCFEQARQAYLVGNKALAKELSMKGQAYNVQMKAAHEKAREAIYRQRNPVSSQRGGGDHLIDLHGLHVNEAIHILKGELTALKSAARAAGERMQVMVCVGTGHHTKGSRTARLPXXAVEQFLLDEGLQYTQPQAGLLRVMVY

SEQ ID NO: 4746 - protein, 154 aa, Zea mays
  unsure (1)..(154): unsure at all Xaa locations
  Clone ID: PAT_MRT4577_148474C.1.pep
AKQGLASMYSESRGEARDFARVRNTCFEQARQAYLVGNKALAKELSMKGQAYNVQMKAAHEKAREAIYRQRNPVSSXQRXGGDHLIDLHGLHVNEAIHILKGELTALKSAARAAGERMQVMVCVGTGHHTKGSRTARLPIXVEQFLLDEGLQYT

SEQ ID NO: 4747 - protein, 156 aa, Zea mays
  Clone ID: PAT_MRT4577_148475C.1.pep
MSSLNKVVSNSGDACSVLASKVTSLNPNAAEFVPSFVKPSFGNGTVLDKSDFRGSSGKTILDRPEPSKSNNSDDEAHQFWHKQLPDDIIPDFTSFEKVEQGPELSLAGLSLNAPPFYGTTSSRFSRDITNYLLQLPRALLELEHTNMLYEDKALEQ

SEQ ID NO: 4748 - protein, 117 aa, Zea mays
  Clone ID: PAT_MRT4577_148478C.1.pep
ATTPIFALSAHPHLSAPVSVRTRPPPTSPWPSRIRSRTRPCSGRRARTAAGGRALFSLPRLRPAAPWASRLSALRISSSTGGKAVASVGRRERAEQLSKAGALFAQLFYCYFGCAQV

SEQ ID NO: 4749 - protein, 317 aa, Zea mays
  Clone ID: PAT_MRT4577_148479C.1.pep
TCYRFWERKLQFLGLDFNHTIEILTQPEMQDDATHNHTLNLPHSTPNFSTGDFPALPTAEDQNGFNQGNVDVLGMFNGRSSSAMPTGAGDFVSAVRKLASQNSGQWKFKKGPEYGNGISALSVPKQYSSSTKQSSGNKFQSISSGRVAPWLETGDAVASMYSESRGEARDFARVRNTCFEQARQAYLVGNKALAKELSMKGQAYNVQMKAAHEKAREAIYRQRNPVSSQRGGGDHLIDLHGLHVNEAIHILKGELTALKSAARAAGERMQVMVCVGTGHHTKGSRTARLPIAVEQFLLDEGLQYTQPQAGLLRVMVY

SEQ ID NO: 4750 - protein, 380 aa, Zea mays
  unsure (1)..(380): unsure at all Xaa locations
  Clone ID: PAT_MRT4577_148480C.1.pep
MSSLNKVVSNSGDACSVLASKVTSLNPNAAEFVPSFVKPSFGNGTVLDKSDFRGSSGKTILDRPEPSKSNNSDDEAHQFWHKQLPDDIIPDFTSFEKVEQGPELSLAGLSLNAPPFYGTTSSRFSREYHELSSPVTKGLELELEHTNMLYEDKSNWEQNYIGDLHIANGNQDLHYDSESGVSFSDSFASEYVAPSDGLFAPLEYLASQFPGFSAESLAELYYANGCDFNHTIEILTQLEMQVDATPNHTLNLPHSTPNFSTGDFPALPTAEDQNGFNQGNVDVLGMFNGRSSSAMPTGAGDFVSAVRKLASQNSGQWKFKKGPEYGNGISALSVPKQYSSSTKQSSGNKFQSISSGRVAPWLETGDAVASMYSEXRGEAR

SEQ ID NO: 4751 - protein, 96 aa, Zea mays
  Clone ID: PAT_MRT4577_148566C.1.pep
MVLVSAAKMSVRGKGGKGLGKGGAKRHRKVLRDNIQGITKPAIRMLSRRCGVNRISELIYEETRSVLKNFLENVIRYSVTYTEHARRKTVNGMDDY

SEQ ID NO: 4752 - protein, 137 aa, Zea mays
  Clone ID: PAT_MRT4577_14870C.1.pep
QCNKKSSRNGEQHHGPLLHGLRRQGRERAVVVRLRRGPRDDAQDGGEGQASGGVREPVVRPRPRAVPGPTVRRATEAFAELKVKELKNGRLAMFSMFGFFVQAIVTGKGPLENLADHIADPVNNNAWAYATNFVPGK

SEQ ID NO: 4753 - protein, 354 aa, Zea mays
  Clone ID: PAT_MRT4577_148772C.1.pep
MHPKARIHADPVREVDHFDCLPDSLVLLILNKVEDVRSLGRCYAVSKRLCGLVSLVHDVYVKIDRVVAVDGDAEGTLNLSSPKPRSIFSHFLKLMLFTIIKPFHNMRSPNGTARPLFPQLSQHSPAQVLRNFTHVRNLRIELPSGDVGTEEGVLLKWRAEYGSTLENCVILGGTRVDRKPVGGEHEPALEDNGSMPESFYTNGGLKLRVVWTISSLIAASTRHYLLRSIINGHPTLQSLVLTDADGQGTLCMGAKQLEEFRENQLSASACSNRTQVPACNMKLKYAPYVELPGGMALQGATLVAIKPSPEGSNGSHPNRKEAEGFVFGAFDGPFKAAVKALMKRRTYLLEMNGF

SEQ ID NO: 4754 - protein, 190 aa, Zea mays
  unsure (1)..(190): unsure at all Xaa locations
  Clone ID: PAT_MRT4577_14878C.1.pep
MASSTMALSSTAFAGKAVNVPSSSAFEXARVTMRKTARKAKPAAASASPWNDPDRVLNLSPLSGEPPSYLTGEFPADYRCYTAKLSLDPXTFAKNRELEVIHSRWAMLGALGCVFPELLARNGLADDPEAFAELKVKELKNGRLAMFSMFGFFVQAIVTGKGPLENLADHIADPVNNNAWAYATNFVPGK

SEQ ID NO: 4755 - protein, 179 aa, Zea mays
  unsure (1)..(179): unsure at all Xaa locations
  Clone ID: PAT_MRT4577_148808C.1.pep
PPVRPRVRVLIIAILNDGTIMTISKDSXKPPAVXDSWXLKEIFATGIVLGSYLSLMTDIVFWAIHKTDLFSNNFGVRTIRDRDHEMMFALHLQMSIASHALIFFTRPPSWFLVERPVLLLVTAILLAQLVNTFLAVYTNWGLGWIKGIGCGWTGVDWLYSIVNYFPLDLLKFLIRYMLI

SEQ ID NO: 4756 - protein, 235 aa, Zea mays
  unsure (1)..(235): unsure at all Xaa locations
  Clone ID: PAT_MRT4577_14887C.1.pep
PAARASTCSLSTGEPPSYLTXEFPXDYGXWDTAGMTADPETXAKNXELEVIHXRWAMLXGALGXCVFPRAXLARNGVKFGKGXVWFKGRAPQIFXSEGGXLDYLGKPQALXTRQSILAIWAXCQVVLMGAXVEGXYRIAGGRLXGEVVDPXLYPWRGSFDPXLAWPNDPXAFSEXLRVKELRXGRLPMFXSCFGFFVQAIVXTGKGAXLKNLAGHIADPVNNXAWAYATNFVPGN

SEQ ID NO: 4757 - protein, 286 aa, Zea mays
  Clone ID: PAT_MRT4577_148946C.1.pep
IRHEGYDRVMAYKFHEDEHGEVFAEITKPGIEPYIGLHYPATDIPQAARFLFMKNKVRMICDCRARSVKIIEDEALSIDISLCGSTLRAPHSCHLKYMENMNSIASLVMAVVVNENEEDDEPEPEQPPQQQKKKRLWGLIVCHHESPRYVPFPLRYACEFLAQVFAVHVNKEFELEKQIREKSILRMQTMLSDMLFKESSPLSIVSGSPNIMDLVKCDGAALLYGDKVWRLQTAPTESQIRDIAFWLSEVHGDSTGLSTDSLQDAGYPGAASLGDMICGMAVAKIT

SEQ ID NO: 4758 - protein, 98 aa, Zea mays
  unsure (1)..(98): unsure at all Xaa locations
  Clone ID: PAT_MRT4577_149075C.1.pep
MAGRSFSCQPQLVAAAAVLAAALLLLAAVAWTASAVVSCGEVTTSVAPCLMFAMVSAASPYVVICSGVRXINSLASFATYRQVTCNCLTSMXRGASGA

SEQ ID NO: 4759 - protein, 237 aa, Zea mays
  unsure (1)..(237): unsure at all Xaa locations
  Clone ID: PAT_MRT4577_149280C.1.pep
TTNFRDEGGFPPHIHENKERLXLSKAAIENAGYTRKVGIGMDVAASEFFGEKDKTYDLNFKEENNDGSNKISRDSLKDLYKSFVYEYPIESIEDPFDQDDWSTYAKLTDEIGQKVQIVGDDLLVTNPTRVAKAINEKTCNALLLKVNQIGSVTESIEAVRMSKRAGWGVMASHRSGETEDTFIADLSVGLSTGQIKTGAPCRSERLAKYNQLLRIEEELGDAAVYAGAKFRAPVEPY

SEQ ID NO: 4760 - protein, 240 aa, Zea mays
  Clone ID: PAT_MRT4577_149284C.1.pep
GQDATIVGDEGGFAPNIQENKEGLELLKAAIEKAGYTGKVVIGMDVAASEFFGEKDKTYDLNFKEENNDGSNKISGDSLKDLYKSFVSEYPIESIEDPFDQDDWSTYAKLTDEIGQKVQIVGDDLLVTNPTRVAKAINEKTCNALLLKVNQIGSVTESIEAVRMSKRAGWGVMASHRSGETEDTFIADLSVGLSTGQIKTGAPCRSERLAKYNQLLRIEEELGDAAVYAGAKFRAPVEPY

SEQ ID NO: 4761 - protein, 40 aa, Zea mays
  Clone ID: PAT_MRT4577_149388C.1.pep
YRVTVRFRHGVSVRSTFGLGVGTPVVPFVCSLLGNDTTEA

SEQ ID NO: 4762 - protein, 145 aa, Zea mays
  unsure (1)..(145): unsure at all Xaa locations
  Clone ID: PAT_MRT4577_149407C.1.pep
MALSVEKTSSGRXYKVKDLSQADFGRLEIELAEVEMPGLMACHAEFGPSKPFAGARISGSLHMTIQTAVLIETLTALGAEVRWCSCNIFFTQDHPAGGIGRELGGGVGWKGETLEEYWWRTERWLDXTRGXGPHLILDNGWDDTL

SEQ ID NO: 4763 - protein, 485 aa, Zea mays
  unsure (1)..(485): unsure at all Xaa locations
  Clone ID: PAT_MRT4577_149410C.1.pep
MALSVEKTSSGREYKVKDLSQADFGRXEIELAEVEMPGLMACRAEFGPSKPFAGARISGSLHMTIQTAVLIETLTALGAEVRWCSCNIFSTQDHAAAAIARDSAAVFAWKGETLEEYWWCTERCLDWGEAGGPDLIVDDGGDATLLIHEGVKAEEEYEKTGKIPDPESTDNAEFKIVLTIIRDGLKADPKKYRKMKERLVGVSEETTTGVKRLYQMQETGALLFPAINVNDSVTKSKFDNLYGCRHSLPDGLMRATDVMIAGKVAVVCGYGDVGKGCAAALKQAGARVIVTEIDPICALQALMEGLQVLPLEDVVSEADIFVTTTGNKDIIMVDHMRKMKNNAIVCNIGHFDNEIDMLGLETYPGVKRITIKPQTDRWVFPETNTGIIVLAEGRLMNLGCATGHPSFVMSCSFTNQVIAQLELWKEKSSGKYEKKVYVLPKHLDEKVAALHLGKLGAKLTKLTKSQADYISVPIEGPYKPAHYRY

SEQ ID NO: 4764 - protein, 428 aa, Zea mays
  unsure (1)..(428): unsure at all Xaa locations
  Clone ID: PAT_MRT4577_149511C.1.pep
MSAEFCAAAGVVAMELGVGDVLGLQQGIAITAPSPRDSDLGLLKRAGLTQAAAAAPYPSPFLDEEKMLRFSKAAHTLHSGLDFGGPGEQAFLLSRTKMPFTPSQWMELEHQALIYKYLNAKAPXIPSSLLISISKSFRSSNRVSWRPLYQGYTNADSDPEPGRCRRTDGKKWRCSKEAMADHKYCERHINRNRHRSRKPVENQPKKTTKEVPAAAGSLPCAGPQGSLKKAKVNDSKPGTVSYWADSLNRTMLSREKANKPTEDSSLLLTSTNSQPTLSLLSQLKQQNKPDKLGPTLENESNPDTILKAWGGNQPSHKSISSTERHDAESLQSVLQNFSLAQNEKMESEKNKYSDSVLVSSTFYSADGPRATCLTPNMTQVKQDCISSSWEMPQGGPLGEILTNSKNSKDLSKCKPRSYGWLLNLDHAP

SEQ ID NO: 4765 - protein, 423 aa, Zea mays
  unsure (1)..(423): unsure at all Xaa locations
  Clone ID: PAT_MRT4577_149626C.1.pep
MDKLSGSARLMIVSDLDHTMVDHHDEENLSLLRFGALWESVYCEDSLLVFSTGRSPTLYKELRKEKPMLTPDITIMSVGTEITYGEAMVPDDGWEEYLNNKWDRNIVVAETVSFSELKLQPETEQRPHKVSFFVDKKNAQEVIKSVAERLDKCGLDAKIIYSGGQDLDILPQGAGKGQALAYLLEKLSSCGKPPNNTLVCGDSGNDAELFSIPGVHGVMVSNAQEELLQWYTENAKDNPKIIHSNERCAAGIIQAIGHFKLGPNISPRDLQFXXAKEASFKPTDAVVKFYVLYEKWRRAEVPKSDSVIKYFKNITHANGVTIHPAGLELSLHASIDALGSCYGDKQGRKYRAWVDRLFITQTGSDSWVGRFDLWESEGDVRVCSLSSLALILKAESPEGFVLTHIQKTWLNGYSSGVEQAFKL

SEQ ID NO: 4766 - protein, 451 aa, Zea mays
  unsure (1)..(451): unsure at all Xaa locations
  Clone ID: PAT_MRT4577_149629C.1.pep
MDKLSGSARLMIVSDLDHTMVXRPTHILVCLKLSVCKLFILLGWLKLAXDHHDEENLSLLRFGALWESVYCEDSLLVFSTGRSPTLYKELRKEKPMLTPDITIMSVGTEITYGEAMVPDDGWEEYLNNKWDRNIVVAETVSFSELKLQPETEQRPHKVSFFVDKKNAQEVIKSVAERLDKCGLDAKIIYSGGQDLDILPQGAGKGQALAYLLKKLSSCGKPPNNTLVCGDSGNDAELFSIPGVHGVMVSNAQEELLQWYTENAKDNPKIIHSNERCAAGIIQAIGHFKLGPNISPRDLQFPYAKEASFKPTDAVVKFYVLYEKWRRAEVPKSDSVIKYFKNITHANGVTIHPAGLELSLHASIDALGSCYGDKQGRKYRAWVDRLFITQTGSDSWVGRFDLWESEGDVRACSLSSLALILKAESPEGFVLTHIQKTWLNGYSSGVEQAFKL

SEQ ID NO: 4767 - protein, 125 aa, Zea mays
  Clone ID: PAT_MRT4577_149992C.1.pep
MAVEGDKKMVTLKSSDGEEFEVKKAVAMDSQTIRHMIEDDCANNGIPLTNGYSKSLFKVIEYCNKHVHAVDGAVAVLKAGFDDVGAVCANSKRVFGEDSKNWDADFVKVDQATLFDLILAANYLN

SEQ ID NO: 4768 - protein, 77 aa, Zea mays
  Clone ID: PAT_MRT4577_150003C.1.pep
MAAADVEYRCFVGGLAWATSNESLENAFASYGEILDSKVITDRETGRSRGFGLVTLFYENSMLDAIKNMNGMELDGR

SEQ ID NO: 4769 - protein, 364 aa, Zea mays
  Clone ID: PAT_MRT4577_150025C.1.pep
MSGMAARIGEWKPVMAMLIFDLISAVTTALIKKALQEGLDRLVLITLRQLVATVFLAPIAYFRERSTRPKLTLEILVYLFFSAAFGAALSQYTFFYGLQYTTATFAITFTNVAPVLTFLIAVLLRVESLSMKNKAGAAKIAGTLTSFAGVMLLTLYKGVSLTHQQAGEASPEDHNLGAAAASPSDRKSWTLGTLALLANCLCFSFWLLLQSRLTKKYPALYSSTAYMFLISSMQGGALTAAIQRRASVWLLTRPIEIVTVLYTGIMGSGVGYVLMTWCVEKRGPVFTSAFIPVIQIMVAMVDFFFLHENLYLGSVLGSILLILGLYILLWGKKRDASSSAAAKEEEDGEKEDEEEEDKEKQVRS

SEQ ID NO: 4770 - protein, 70 aa, Zea mays
  unsure (1)..(70): unsure at all Xaa locations
  Clone ID: PAT_MRT4577_150162C.1.pep
GANRFQRINRKXEATRQNCLRQRTSPYPSRAHHFFSGKANRSFLPPSAQAITIRNPATRLXLLHMRAKDN

SEQ ID NO: 4771 - protein, 78 aa, Zea mays
  Clone ID: PAT_MRT4577_150265C.1.pep
TVVVVAPTPVATVAASAATQAGNGRNDRWGPRDQVILFSHVMFTLVQRGYHRSSRLLMPICVFDCKVPMCQVLMLCLS

SEQ ID NO: 4772 - protein, 78 aa, Zea mays
  Clone ID: PAT_MRT4577_150347C.1.pep
EVLRGSVSRVSGSRWAASDVEYPLLGTAASPEPRTTTSSTTPSGPTVKPSSPRLFLDRETQRSLRFRLRHLSPRTRAM

SEQ ID NO: 4773 - protein, 64 aa, Zea mays
  Clone ID: PAT_MRT4577_150619C.1.pep
GAELVVDLDSLPGQQQRAIRTARYPTASPFAVRRSHMSCSLHVVVLRSCNFWRVAVVFGSGCRI

SEQ ID NO: 4774 - protein, 94 aa, Zea mays
  unsure (1)..(94): unsure at all Xaa locations
  Clone ID: PAT_MRT4577_150645C.1.pep
GDPAGDFVPGRFLGEEGSKLLQYVYWSHGREAENPRVGNKQGPGKNFVVLVGRLLLVELFLRXDPFPPEVGKELVGPRVIFPGVPKAPSGPGSE

SEQ ID NO: 4775 - protein, 120 aa, Zea mays
  Clone ID: PAT_MRT4577_150676C.1.pep
PNMMPFMMVPTMMSSKTIASMMPSLIMPNLVSPIMMPSMKLSMMTLSMMPSIMMLSMIPTMMMSSMVSSMIMSNMMAVPQCYSDSFSLIKLTLLLPFMFSSTFVAIGPMFLQKPSLGAAF

SEQ ID NO: 4776 - protein, 549 aa, Zea mays
  unsure (1)..(549): unsure at all Xaa locations
  Clone ID: PAT_MRT4577_150748C.1.pep
MNTVALLSLAPQLLIKPSLTCFSRKGVGRYGGIKVYAVLRDDGAEFAKNNNLEALFHVDDPGPRVPIKKGKFLDVNEALEVVRFDIQYCDWRARHDLLTIMVLHNKVVEVLNPLAREFKSIGTLRKELAELQQELAKAHNQVHLSETRVSSALDKLAHMETLVNDRLLPPDGASSTSTAQPTSLVPSTSSTARVRAKKPPRRGLNVSGPVKPYNPSLKNFWYPVAFSSDLKDDTMVPIACFEEQWVIFRGKDGRPGCVQNTCAHRACPLHLGSVNEGRIQCPYHGWEYSTDGKCEKMPSTKMLNVRIQSLPCFEQEGMVWIWPGDDPPKATIPSLLPPSGFTVHAEIVMELPVEHGLLLDNLLDLAHAPFTHTSTFAKGWSVPSLVKFLTPASGLQGYWDPYPIDMEFRPPCMVLSTIGISKPGKLEGKSTQQCSTHLHQLHVCLPSSRNKTRLLYRMSLDFAPWLKHVPLMHLLWSHFAEKXVSQCDKVLNEDLRLVLGQQERMINGANVWNWPVSYDKLGVRYRLWRDTVERGSERLPFSNQAESGS

SEQ ID NO: 4777 - protein, 59 aa, Zea mays
  Clone ID: PAT_MRT4577_150830C.1.pep
SQHPRVSRIILDHRALPGHLRPALPGAHGERSRCAGQRCLLLGAVAAGAGLCAAPCAVV

SEQ ID NO: 4778 - protein, 147 aa, Zea mays
  unsure (1)..(147): unsure at all Xaa locations
  Clone ID: PAT_MRT4577_151076C.1.pep
HLLAQNVRAQQVLQLVLANFDAYYQHQQFLPFTQLPAVNSDSHLQQHHQPFSQLSDAYPHQFLPFMQVTALNSHVYQQQQQLLPFSQLAGVSPVTFXTQPQLLPFXQQAAPNAVTLLQLQQSLPFNHLALTNASAFYHHPVGGGALF

SEQ ID NO: 4779 - protein, 116 aa, Zea mays
  unsure (1)..(116): unsure at all Xaa locations
  Clone ID: PAT_MRT4577_151226C.1.pep
EGAARAAHTKHNIVPTISSKLFSLLIVGDLSASAATATIFPKCSHAPIASLLPPYXISPAVSSICENPILQPYRIQQAITVSILPLSPLFLQQSLTLLHQLPFVHLLAQNIMAQHL

SEQ ID NO: 4780 - protein, 63 aa, Zea mays
  unsure (1)..(63): unsure at all Xaa locations
  Clone ID: PAT_MRT4577_151308C.1.pep
XKXXXRXDPGXDVAXXASLPPGSCHXXKHVMREAXAPRTSAGAHXCLFVFDXSRLRVADYXGT

SEQ ID NO: 4781 - protein, 234 aa, Zea mays
  Clone ID: PAT_MRT4577_15138C.1.pep
IAGLISIDLARDMLQVHPNSNALVISTEIITPNFYHGSRRDMLLPNCLFRMGAAAILLSNRRREARRAKYRLVHVVRTHKGADDRAYRCVYEEEDDEGHSGISLSKELMAIAGEALKSNITTMGPLVLPMSEQLLFFFRPVGRKVINNKWKPYIPDFKLAFEHFCIHAGGRAVIDELHKNLELSPRHVEASRMTLHRFGNTSSSSLWYELAYIEAKGRMRKGDRVWQIGFGSGF

SEQ ID NO: 4782 - protein, 83 aa, Zea mays
  Clone ID: PAT_MRT4577_151489C.1.pep
GRPTRTGKAAQENVHQQAEADSDEGREKGEGEANNWHRAPPTGMQQGEEHKEEQRQSSDWERDLPAKTLRGLLGENEDPTRQG

SEQ ID NO: 4783 - protein, 147 aa, Zea mays
  Clone ID: PAT_MRT4577_151621C.1.pep
MPVPLAPYPAPPAPFTPPNGAQSQLVCTGCRNLLMYPAGATSVCCAVCSTVTAVPAPGTEMAQLVCGGCHTLLMYIRGATSVQCSCCHTVNLAMEANQVAHVNCGNCRMLLMYQYGARSVKCAVCSFVTSVGSRSPAAELIVSLKVL

SEQ ID NO: 4784 - protein, 162 aa, Zea mays
  Clone ID: PAT_MRT4577_151622C.1.pep
MPVPLAPYPAPPAPFTPPNGAQSQLVCTGCRNLLMYPAGATSVCCAVCSTVTAVPAPGTEMAQLVCGGCHTLLMYIRGATSVQCSCCHTVNLAMEANQVAHVNCGNCRMLLMYQYGARRLPLFRCYSYCKTTCVSHEKQRTNRQVSLYSDLTWCRAEAQQLS

SEQ ID NO: 4785 - protein, 143 aa, Zea mays
  Clone ID: PAT_MRT4577_151624C.1.pep
MPVPLAPYPAPPAPFTPPNGAQSQLVCTGCRNLLMYPAGATSVCCAVCSTVTAVPAPGTEMAQLVCGGCHTLLMYIRGATSVQCSCCHTVNLAMEANQVAHVNCGNCRMLLMYQYGARSVKCAVCSFVTSVGTSPGAEQKPSS

SEQ ID NO: 4786 - protein, 171 aa, Zea mays
  unsure (1)..(171): unsure at all Xaa locations
  Clone ID: PAT_MRT4577_151786C.1.pep
VIQGGIGPAGLSAXDLHVLDLTQQRPRWHRVVVQGPGPGPRYGHVMALVGQRFLLTIGGNDGKRPLADVWALDTAAKPYEWRKLEPEGEGPPPCMYATASARSDGLLLLCGGRDANSVPLSSAYGLAKHRDGRWEWAMAPGVSPSPRYQHAAVFVNARLHVSGGALGXGRM

SEQ ID NO: 4787 - protein, 117 aa, Zea mays
  Clone ID: PAT_MRT4577_151969C.1.pep
MTASQSSMSGGGEPGVRTVVWFRRDLRVEDNPALAAAARTAGEVVPAYVWSPEEDGPYYPGRVSRWWLSQSLKHLDASLRRLGAWRLVTRRSSDAVVALIDLVRSTGATHLFFQPTL

SEQ ID NO: 4788 - protein, 1003 aa, Zea mays
  unsure (1)..(1003): unsure at all Xaa locations
  Clone ID: PAT_MRT4577_152093C.1.pep
MIVQPIELRAWTAFPGSAQEGIGRMAASVSRAICVQKPGSKCTRDREATSFARRSVAAPRPPHAKAAGVIRSDSGAGRGQHCSPLRAVVDAAPIQTTKKRVFHFGKGKSEGNKTMKELLGGKGANLAEMASIGLSVPPGFTVSTEACQQYQDAGCALPAGLWAEIVDGLQWVEEYMGATLGDPQRPLLLSVRSGAAVSMPGMMDTVLNLGLNDEVAAGLAAKSGERFAYDSFRRFLDMFGNVVMDIPRSLFEEKLEHMKESKGLKNDTDLTASDLKELVGQYKEVYLSAKGEPFPSDPKKQLELAVLAVFNSWESPRAKKYRSINQITGLRGTAVNVQCMVFGNMGNTSGTGVLFTRNPNTGEKKLYGEFLVNAQGEDVVAGIRTPEDLDAMKNLMPQAYDELVENCNILESHYKEMQDIEFTVQENRLWMLQCRTGKRTGKSAVKIAVDMVNEGLVEPRSAIKMVEPGHLDQLLHPQFENPSAYKDQVIATGLPASPGAAVGQVVFTAEDAEAWHSQGKAAILVRAETSPEDVGGMHAAVGILTERGGMTSHAAVVARGWGKCCVSGCSGIRVNDAEKLVTIGGHVLREGEWLSLNGSTGEVILGKQPLSPPALSGDLGTFMAWVDDVRKLKVLANADTPDDALTARNNGAQGIGLCRTEHMFFASDERIKAVRQMIMAPTLELRQQALDRLLPYQRSDFEGIFRAMDGLPVTIRLLDPPLHEFLPEGNIEDIVSELCAETGANQEDALARIEKLSEVNPMLGFRGCRLGISYPELTEMQARAIFEAAIAMTNQGVQVFPEIMVPLVGTPQELGHQVTLIRQVAEKVFANVGKTIGYKVGTMIEIPRAALSGDLGTFMAWVDDVRKLKVLANADTPDDALTARNNGAQGIGLCRTEHMFFASDERIKAVRQMIMAPTLELRQQALDRXAVSEVLDQRGVGELVKFATERGRKARPNLKVGIXGEHGGEPSSVAFFAKAGLDYVSCSPFRVPIARLAAAQVLV

SEQ ID NO: 4789 - protein, 278 aa, Zea mays
  Clone ID: PAT_MRT4577_152094C.1.pep
HWVPRGRPGRIFRAMDGLPVTIRLLDPPLHEFLPEGNIEDIVSELCAETGANQEDALARIEKLSEVNPMLGFRGCRLGISYPELTEMQARAIFEAAIAMTNQGVQVFPEIMVPLVGTPQELGHQVTLIRQVAEKVFANVGKTIGYKVGTMIEIPRAALVADEIAEQAEFFSFGTNDLTQMTFGYSRDDVGKFIPVYLAQGILQHDPFEVLDQRGVGELVKFATERGRKARPNLKVGICGEHGGEPSSVAFFAKAGLDYVSCSPFRVPIARLAAAQVLV

SEQ ID NO: 4790 - protein, 978 aa, Zea mays
  unsure (1)..(978): unsure at all Xaa locations
  Clone ID: PAT_MRT4577_152095C.1.pep
MIVQPIELRAWTAFPGSAQEGIGRMTASVSRAICVQKPGSKCTRDREATSFARRSVAAPRPPHAKAXAGVIRSDSGAGRGQHCSPLRAVVDAAPIQTTKKRVFHFGKGKSEGNKTMKELLGGKGANLAEMASIGLSVPPGFTVSTEACQQYQDAGCALPAGLWAEIVDGLQWVEEYMGATLGDPQRPLLLSVRSGAAVSMPGMMDTVLNLGLNDEVAAGLAAKSGERFAYDSFRRFLDMFGNVVMDIPRSLFEEKLEHMKESKGLKNDTDLTASDLKELVGQYKEVYLSAKGEPFPSDPKKQLELAVLAVFNSWESPRAKKYRSINQITGLRGTAVNVQCMVFGNMGNTSGTGVLFTRNPNTGEKKLYGEFLVNAQGEDVVAGIRTPEDLDAMKNLMPQAYDELVENCNILESHYKEMQDIEFTVQENRLWMLQCRTGKRTGKSAVKIAVDMVNEGLVEPRSAIKMVEPGHLDQLLHPQFENPSAYKDQVIATGLPASPGAAVGQVVFTAEDAEAWHSQGKAAILVRAETSPEDVGGMHAAVGILTERGGMTSHAAVVARGWGKCCVSGCSGIRVNDAEKLVTIGGHVLREGEWLSLNGSTGEVILGKQPLSPPALSGDLGTFMAWVDDVRKLKVLANADTPDDALTARNNGAQGIGLCRTEHMFFASDERIKAVRQMIMAPTLELRQQALDRLLPYQRSDFEGIFRAMDGLPVTIRLLDPPLHEFLPEGNIEDIVSELCAETGANQEDALARIEKLSEVNPMLGFRGCRLGISYPELTEMQARAIFEAAIAMTNQGVQVFPEIMVPLVGTPQELGHQVTLIRQVAEKVFANVGKTIGYKVGTMIEIPRAALVADEIAEQAEFFSFGTNDLTQMTFGYSRDDVGKFIPVYLAQGILQHDPFEXPYTYQVLDQRGVGELVKLATERGRKARPNLKVGICGEHGGEPSSVAFFAKAGLDYVSCSPFRVPIARLAAAQVLV

SEQ ID NO: 4791 - protein, 882 aa, Zea mays
  Clone ID: PAT_MRT4577_152101C.1.pep
MAPVQCARSQRVFHFGKGKSEGNKTMKELLGGKGANLAEMASIGLSVPPGFTVSTEACQQYQDAGCALPAGLWAEIVDGLQWVEEYMGATLGDPQRPLLLSVRSGAAVSMPGMMDTVLNLGLNDEVAAGLAAKSGERFAYDSFRRFLDMFGNVVMDIPRSLFEEKLEHMKESKGLKNDTDLTASDLKELVGQYKEVYLSAKGEPFPSDPKKQLELAVLAVFNSWESPRAKKYRSINQITGLRGTAVNVQCMVFGNMGNTSGTGVLFTRNPNTGEKKLYGEFLVNAQGEDVVAGIRTPEDLDAMKNLMPQAYDELVENCNILESHYKEMQDIEFTVQENRLWMLQCRTGKRTGKSAVKIAVDMVNEGLVEPRSAIKMVEPGHLDQLLHPQFENPSAYKDQVIATGLPASPGAAVGQVVFTAEDAEAWHSQGKAAILVRAETSPEDVGGMHAAVGILTERGGMTSHAAVVARGWGKCCVSGCSGIRVNDAEKLVTIGGHVLREGEWLSLNGSTGEVILGKQPLSPPALSGDLGTFMAWVDDVRKLKVLANADTPDDALTARNNGAQGIGLCRTEHMFFASDERIKAVRQMIMAPTLELRQQALDRLLPYQRSDFEGIFRAMDGLPVTIRLLDPPLHEFLPEGNIEDIVSELCAETGANQEDALARIEKLSEVNPMLGFRGCRLGISYPELTEMQARAIFEAAIAMTNQGVQVFPEIMVPLVGTPQELGHQVTLIRQVAEKVFANVGKTIGYKVGTMIEIPRAALVADEIAEQAEFFSFGTNDLTQMTFGYSRDDVGKFIPVYLAQGILQHDPFEVLDQRGVGELVKLATERGRKARPNLKVGICGEHGGEPSSVAFFAKAGLDYVSCSPFRVPIARLAAAQVLV

SEQ ID NO: 4792 - protein, 126 aa, Zea mays
  Clone ID: PAT_MRT4577_152170C.1.pep
EVIAVHGKAIGGVPAKKATSTISNAVLQFHVGRIASFLMAVKYAKRVSSGSPVYLTTVLEYLAAEVLELAGNASRYNKKTRIVPRHIQLAVRNDEELTKLFAVSTIASGCVMPNIHQHLLPNKAAF

SEQ ID NO: 4793 - protein, 55 aa, Zea mays
  Clone ID: PAT_MRT4577_152177C.1.pep
HTSRERPVSFKGSASSTPRPEQMSTMRMASKVWFHRSSAILSGDQYLCYGICRHL

SEQ ID NO: 4794 - protein, 293 aa, Zea mays
  Clone ID: PAT_MRT4577_152258C.1.pep
SRPAGVALSASATPPPPARSLLFPHFTLTRDVNTCSLVVDTVGEYHSGVGAKRNGRRKGKKGKKGKQDAPVTDFVPVKTQIRLDENTANNEAAGAAAEPVFVVGEAVNDSLPVVASESDFSRGKYLIYIGGGERCKSMNHFIWGFLCALGEAQFLNRTLVMDLNVCLNARYTSSGKDEERDFRLYFDFEHLKQSASVIDQSQFWQDWGQWHKKDRLKNFYTEDIRMTPMKLRDIKDTLIMRKFGNVEPDNYWSRVCEGETEGIIKRPWHFLWKLPRLMEIVSAIASRMNWDFD

SEQ ID NO: 4795 - protein, 58 aa, Zea mays
  Clone ID: PAT_MRT4577_152259C.1.pep
CRNVTGLARRCSRSTATPLCSERRLLANCLCGIPQIPVWTVYVTYRDGLINQTDLSQL

SEQ ID NO: 4796 - protein, 94 aa, Zea mays
  unsure (1)..(94): unsure at all Xaa locations
  Clone ID: PAT_MRT4577_152260C.1.pep
PNLDRDTSPDSLLMALNDKVGAGRYLYIATXWDENSEWFTETKELSNGQPVEFDGYMRIAVDTEVFLRGKRHVETFNELTRDCKDGVNTCSASS

SEQ ID NO: 4797 - protein, 192 aa, Zea mays
  Clone ID: PAT_MRT4577_152261C.1.pep
CDTEAPVDCTGDRELFRVRMRAAIERFPDLHFYRFGRPVAVPGSPMECDLAWRFRPAADAIGTGRTTYYKDYRRFTLTRDVNTCSLVVDTVGEYHSGVGAKRNGRRKGKKGKKGKQDAPVTDFVPVKTQIRLDENTANNEAAGAAAEPVFVVGEAVNDSLPVVASESDFSRGKYLICIGGGERCKSMNHLFG

SEQ ID NO: 4798 - protein, 124 aa, Zea mays
  unsure (1)..(124): unsure at all Xaa locations
  Clone ID: PAT_MRT4577_152369C.1.pep
PVNQAQSRGGGGGGGGYGGGRGGGGFGGGRRDGGFGGGGGFRGRREGGGGGFXGGGGYCGRRVGGGGGFRGGGGGWWDCCVGPSWLRPGCLICLSCRGSVRFCPRVSVRSPFGLGVGSPGGPFV

SEQ ID NO: 4799 - protein, 88 aa, Zea mays
  Clone ID: PAT_MRT4577_152373C.1.pep
TPYSESYIHLSAHHLINSPSMTQLPRPPSGFSCRCVRRGIDENYDGVIYQYASSSYVKEGYIEPRAVIYPTDDEDVFKAIEYARTNDV

SEQ ID NO: 4800 - protein, 79 aa, Zea mays
  unsure (1)..(79): unsure at all Xaa locations
  Clone ID: PAT_MRT4577_152422C.1.pep
MAAKILCLLMLLGLSASAATATIFPRCSQAPIATLLPPYLSPTVSSVXCDNPILQPYRXIQQTITXAGILPXHPLLLQQ

SEQ ID NO: 4801 - protein, 446 aa, Zea mays
  Clone ID: PAT_MRT4577_152459C.1.pep
MAVTITWVKARQIFDSRGNPTVEVDVGLSDGSYARGAVPSGASTGIYEALELRDGGSDYLGKGVLKAVSNVNNIIGPAIVGKDPTEQVEIDNFMVQQLDGTSNEWGWCKQKLGANAILAVSLAVCKAGAMVKKIPLYQHIANLAGNKTLVLPVPAFNVINGGSHAGNKLAMQEFMILPTGASSFKEAMKMGVEVYHNLKSIIKKKYGQDATNVGDEGGFAPNIQENKEGLELLKAAIEKAGYTGKVVIGMDVAASEFFGEKDKTYDLNFKEKNNDGSNKISGDSLKDLYKSFVSEYPIESIEDPFDQDDWSTYAKLTDEIGQKVQIVGDDLLVTNPTRVAKAINEKTCNALLLKVNQIGSVTESIEAVRMSKRAGWGVMASHRSGETEDTFIADLSVGLSTGQIKTGAPCRSERLAKYNQLLRIEEELGDAAVYAGAKFRAPVEPY

SEQ ID NO: 4802 - protein, 446 aa, Zea mays
  Clone ID: PAT_MRT4577_152461C.1.pep
MAVTITWVKARQIFDSRGNPTVEVDVGLSDGSYARGAVPSGASTGIYEALELRDGGSDYLGKGVLKAVSNVNNIIGPAIVGKDPTEQVEIDNFMVQQLDGTSNEWGWCKQKLGANAILAVSLAVCKAGAMVKKIPLYQHIANLAGNKTLVLPVPAFNVINGGSHAGNKLAMQEFMILPTGASSFKEAMKMGVEVYHNLKSIIKKKYGQDATNVGDEGGFAPNIQENKEGLELLKAAIEKAGYTGKVVIGMDVAASEFFGEKDKTYDLNFKEENNDGSNKISGDSLKDLYKSFVSEYPIESIEDPFDQDDWSTYAKLTDEIGQKVQIVGDDLLVTNPTRVAKAINEKTCNALLLKVNQIGSVTESIEAVRMSKRAGWGVMASHRSGETEDTFIADLSVGLSTGQIKTGAPCRSERLAKYNQLLRIEEELGDAAVYAGAKFRAPVEPY

SEQ ID NO: 4803 - protein, 238 aa, Zea mays
  Clone ID: PAT_MRT4577_152504C.1.pep
MSAASKKLFQAARSLVLSASNRSVLAAEGRTAALATLTNFGRKTLPTAYLSYHKQGSHHAASGWGAIAAAVPAAVYMLQDQEAHAAEMERTFIAIKPDGVQRGLISEIMSRFERKGYKLVAIKLIVPSKEFAEKHYHDLKERPFFSGLCDFLSSGPVLAMVWEGEGVIKYGRKLIGATDPQKSEPGTIRGDLAIVVGRNIIHGSDGPETAKDEIALWFEPKELVSYTSNAEKWIYGVN

SEQ ID NO: 4804 - protein, 237 aa, Zea mays
  Clone ID: PAT_MRT4577_152506C.1.pep
MSGSASRKLFQAARSIVLSASQRSSFSVLAAEGRTAALANFGRKILPSACSYHRQGSHAASGWGAIAAAVPAAVYMLQDQEAHAAEMERTFIAIKPDGVQRGLISEIVNRFERKGYKLVAIKLIVPSKGFAEKHYHDLKERPFFNGLCDFLSSGPVLAMVWEGEGVIKYGRKLIGATDPQKSEPGTIRGDLGVVVGRNIIHGSDGPETAKDEIALWFEPKELVSYTSNAEKWVYGVN

SEQ ID NO: 4805 - protein, 234 aa, Zea mays
  Clone ID: PAT_MRT4577_152508C.1.pep
MSGSASRKLFQAARSLVLSASQRSVLAAEGRTAALANFGRKTLPTAYSYHKQGSHAASGWGAIAAAVPAAVYMLQDQEAHAAEMERTFIAIKPDGVQRGLISEIMSRFERKGYKLVAIKLIVPSKEFAEKHYHDLKERPFFSGLCDFLSSGPVLAMVWEGEGVIKYGRKLIGATDPQKSEPGTIRGDLAIVVGRNIIHGSDGPETAKDEIALWFEPKELVSYTSNAEKWIYGVN

SEQ ID NO: 4806 - protein, 161 aa, Zea mays
  unsure (1)..(161): unsure at all Xaa locations
  Clone ID: PAT_MRT4577_152531C.1.pep
MTDSGDDHFESKADAVASKTYPKXGGTGRKNGFFVINNRPCKVVEVXSTSKTANNEHDXCHFVAIDIFNGKWLEHIVPSSHNCDIPHANRTEYHMIDISDDGSVRLLTSHGDTXDDLRLPTDETLVAHIREGIXKXKDLVETVQTAMWEEQICAMKDGGPQ

SEQ ID NO: 4807 - protein, 87 aa, Zea mays
  unsure (1)..(87): unsure at all Xaa locations
  Clone ID: PAT_MRT4577_152593C.1.pep
LFSISGSEFVEMFVGVGASRVRELFKTAKENAPYIVYVDEIDAVVRHRGTGIGGGNEXREQTLNQXLTGMDGFEGNTGITVLLPLSI

SEQ ID NO: 4808 - protein, 62 aa, Zea mays
  unsure (1)..(62): unsure at all Xaa locations
  Clone ID: PAT_MRT4577_152730C.1.pep
LEYLEERXLKDLVKKHSELVRYPICLWTEKTTEKEISDDEHEEEKKDAEEGKVEDVDEENEE

SEQ ID NO: 4809 - protein, 223 aa, Zea mays
  unsure (1)..(223): unsure at all Xaa locations
  Clone ID: PAT_MRT4577_153066C.1.pep
MERLSTNQLYSSGVPVTVPTSLPCIPVSLDESFPRLPDAQSVLMERELRSTPLPPHQTTVAPIRGLFHSNTGSVGPLCSPPSVRFSSHSNPEQYPNHNSYNSQVPSTASSSTLNYGSQYGGFEPSITDFPRDIEPTWCPDPVESILGYSGDVPAGNNLTGTTSIGASDDLTKQTEWWTEFMNEDWKDMVDNPTSQKLNRLGNPVHHPTQXTISYPTTVSSQIC

SEQ ID NO: 4810 - protein, 121 aa, Zea mays
  unsure (1)..(121): unsure at all Xaa locations
  Clone ID: PAT_MRT4577_153096C.1.pep
NCGRSRAYSCGWATPLLDISACADDAFLTXSDIKLNHAILGGEKHLPMCDELGSTSIVEYMAGRATQNSIMVAQWMLQTPGASSYMXCIGKDKFGEEMKKNAQAAGVTAHYYQDETAPTGT

SEQ ID NO: 4811 - protein, 177 aa, Zea mays
  unsure (1)..(177): unsure at all Xaa locations
  Clone ID: PAT_MRT4577_153097C.1.pep
MGNPLLDXSAVVDDAFLTKYDIKLNNAILAEEKHLPMYDELASKSNVEYRAGGATQNSIRVAQWMLQTPGATSYMGCIGKDKFGEEMKKNAQAAGVTAHYYEDETAPTGTCAVCVVGGERSLIANLSAANCYKSEHXKRPENWALVEKAKYXYIAGFFLTVXSADFIQVVXEHACRK

SEQ ID NO: 4812 - protein, 178 aa, Zea mays
  unsure (1)..(178): unsure at all Xaa locations
  Clone ID: PAT_MRT4577_153098C.1.pep
MAGREGVLLGMGNPLLDISAVVDDAFLTKCDIKLNNAILAEEKHLPMYDELAGGGGVEYLAGGATQNSIRVAQWMLQTPGXXSYMGCIGKDKFGEEMKKNAQAAGVTAHYYEDETAPTGTCAXCVVGGERSLLANLXAAPCFKSEHLXRPENWALVEKAKYIFLAGFFLSVSPDSIQL

SEQ ID NO: 4813 - protein, 84 aa, Zea mays
  Clone ID: PAT_MRT4577_153226C.1.pep
THTPHTAPAQLSSADQDNQSWLCRARVAAAAPLLLLLLVAAAAQLVSSVSPADSDIRHKSCRTTHYPPACEQSLASYRSSSSTR

SEQ ID NO: 4814 - protein, 99 aa, Zea mays
  unsure (1)..(99): unsure at all Xaa locations
  Clone ID: PAT_MRT4577_153353C.1.pep
GSPAYGLVGERIEMRASDAEYRCFVGDLAWTTHDHSLHNGFSTYGEVLETRIILHRETHRSHEYDLYTFSTXEAMRNAIQGLNGKKLDCRYITICEGQH

SEQ ID NO: 4815 - protein, 101 aa, Zea mays
  unsure (1)..(101): unsure at all Xaa locations
  Clone ID: PAT_MRT4577_153561C.1.pep
MAANMLCLLMLLGIYASAATDTIFPHCSQAPIAYLLTTYLSPAVYSVCENTILHPYRIQQAIAAGILPLXPLFLQQSSALLHSLPLVHSSAQNILAQQLQQ

SEQ ID NO: 4816 - protein, 137 aa, Zea mays
  unsure (1)..(137): unsure at all Xaa locations
  Clone ID: PAT_MRT4577_153600C.1.pep
HGTGNXGGMGQLGEHGGXXGMGGGQFQPAREEHKXXGGILHRSGSSSSSSSEXDDGXMGGRRKKGIKEKIKEKLPGGHKDDQHATATTGGAYGQQGHTGSAYGQQGHTGGSYATGTEGTGEKKGIMDKIKEKLPGQH

SEQ ID NO: 4817 - protein, 179 aa, Zea mays
  unsure (1)..(179): unsure at all Xaa locations
  Clone ID: PAT_MRT4577_153667C.1.pep
SPLFLXQHPSALLQQXPFGPLGAQHIRAQQLQHLVLATLAAYSQPPQFLPFTQLAALNSAAYLPTQFPFSQLVAASPQQFFPFTHLAALTSAAYLQQQQLLPFTQLADVTPAAFLTPPQLFPFYLHATPNAGPLLHLPQLLPFTHLAFQNPPVFPQNPLIGGPPFRLLMSYSSIMKFFG

SEQ ID NO: 4818 - protein, 221 aa, Zea mays
  Clone ID: PAT_MRT4577_153677C.1.pep
MDRKRIKDALEKHLERSSPSTSRGVVSKERERLAAGKLPSSLGKAEVSDGEEFETDSEDSDVSGSEGEDTSWISWFCTLRGNEFFCEIDDDYIQDDFNLCGLSNQVPYYDYALDLILDIESSNDDGFTEEQNELIESSAEMLYGLIHARYILTSKGLAAMLEKFKNYYDFGRCPRVYCCGQPCLPAGQSDVPRSSTVKIYCPKCEELNYPRSKYQGSILLI

SEQ ID NO: 4819 - protein, 111 aa, Zea mays
  unsure (1)..(111): unsure at all Xaa locations
  Clone ID: PAT_MRT4577_153694C.1.pep
SSPSSPRILSSSXVTSVCENPIFXTPTGIQHGISHAGILILYHPLFLQHXSRALLQSVTLLVHLIGXNIMGTYNYIQLVLANXLAAYSHQQQFLPFNQLGSLNSASYLQQQ

SEQ ID NO: 4820 - protein, 100 aa, Zea mays
  unsure (1)..(100): unsure at all Xaa locations
  Clone ID: PAT_MRT4577_153777C.1.pep
LSTEFPAFAAGALQSYKVGAEAISKIESLPGXSMQALCNTAVXEVFDLTGYDWVVAYIFHEDEHGGGGGVITKRGIEPCLGLHYAATDIPQAAKFLLMKN

SEQ ID NO: 4821 - protein, 424 aa, Zea mays
  Clone ID: PAT_MRT4577_153882C.1.pep
MAARAADENRRPAAGKPAPGVRDMASRRALTDIKNLVGAAPYPYAVAKKPMLQKSKRDEKQPALASSRPMTRKFAASLASKGQPECQPIVADPEPEVCQQKESVGDGTVDIDVELYELVDGSDSDIDMGATENKDIMNEDELLMDIDSADSGNPLAATEYVKELYTFYRENEAKSCVRPDYMSSQQDINSKMRAILIDWLIEVHYKFELMDETLFLTVNVIDRFLEKEVVPRKKLQLVGVTALLLACKYEEVSVPVVEDLVLISDRAYTKGQILEMEKLILNTLQFNMSVPTPYVFMKRFLKAADADKQLELASFFMLELCLVEYQMLNYRPSHLAAAAVYTAQCAINRCQHWTKVCESHSRYTSDQLLECSRMMVDFHQKAGTSKLTGVHRKYSTYKFGCVAKILPAQFLLESGGTPPPSGAN

SEQ ID NO: 4822 - protein, 80 aa, Zea mays
  Clone ID: PAT_MRT4577_153884C.1.pep
MARIGASHVLLVVLLLSAVLSSGSARVPRERPDAMLPAGQTAAMAEMTVPGEGQSSGPAFGVAAHESKRLSPGGPDPQHH

SEQ ID NO: 4823 - protein, 69 aa, Zea mays
  unsure (1)..(69): unsure at all Xaa locations
  Clone ID: PAT_MRT4577_153932C.1.pep
YQLIYISKDGFVSLLTSNGNPKDDLRLPTDXTPVAQIKERFXNGQDPVVTVQSSMGEEQICALKDVGPK

SEQ ID NO: 4824 - protein, 67 aa, Zea mays
  Clone ID: PAT_MRT4577_153979C.1.pep
GDSLEEFLTKATPDKNLIRLLICMGDARGTIAVKVRAASCGESACVKSFGDEQLAVDRRANRLLFEA

SEQ ID NO: 4825 - protein, 578 aa, Zea mays
  unsure (1)..(578): unsure at all Xaa locations
  Clone ID: PAT_MRT4577_154033C.1.pep
MSNHNAPCDIPKPASVDEFLAKNGKKKKSFMSGLFRKKGRGADKKLLSRRDIVFDLEGRSGDRMDLLETSAAVRKSFSDRHCTTRIENLTLSCLDSPRRPNVDTREYRVFVGTWNVGGKPPDSSVNLQEFLQIEGLPDIYVLGFQEIVPLNAGNVLVVEDNEPAGKWMDLIYQALNRPPPHQDGQSSGDELSPPPSTSSSHYPSRPQGAARDPSNAAAIPKTSSGGMLCAQKPPPPLKMVSKCYRVDNALVKTCTCMSDPSTMQLRAREMREFXSAASRPPPPRRAAAPTTTRWPPSKAATRGAXGGMNYCLVARKQMVGIFLSVWVRRELVQYVGHLRVDCIGRGIMGRLGNKGCIAMSMTLHHTSICFVCCHLASGEKEGDEVRRNSDVAEILKNAQFPRICKVPGQRVPEKIIDHDRIIWLGDLNYRVSLSYEETKTLLEDNEWDILLEKDQLAMERQAGRVFKGWKEGKIYFAPTYKYKQNSDSYLWETAKSKKKRRTPAWCDRILWHGQGIEQLQYIRGEFRLSDHRPVCSVFVIEADVDSGSKIRKGYSTLDARIHCESPEIPKRHSFYDDF

SEQ ID NO: 4826 - protein, 126 aa, Zea mays
  unsure (1)..(126): unsure at all Xaa locations
  Clone ID: PAT_MRT4577_154109C.1.pep
AYSKQEQFLPYNQLAALTCGANVQQQLPFSQLAGAYPQQFLPFNQLTALNSDAYLQQQQLPPFSQXTDVSPIAFLTQQQLLPFHVRFEPSAGTLLQLHRLQPFSQHALTXNTAAFXQQPIIGGALL

SEQ ID NO: 4827 - protein, 124 aa, Zea mays
  unsure (1)..(124): unsure at all Xaa locations
  Clone ID: PAT_MRT4577_154174C.1.pep
MAAKIFCLLMLLGISASAATATIFPQCSQAPIAFLLPPYLSPALPSVXENPRGGPYRIQQANQGGIXLPVSPLDLQQSSDLLQQLPSLHLLEHNMKGKHLQQLELSNLGNYSQKQEFIRFNQQR

SEQ ID NO: 4828 - protein, 107 aa, Zea mays
  Clone ID: PAT_MRT4577_154234C.1.pep
MSGSSGSGVWVFKNGVMQLEQPAAAASRKALVYVPTNEVVRSVEALERRLGTLGWERYYENRSIVQLHKRDGGADLITIPRDFASLRSTHMYDVVVKNRDHFKVVDA

SEQ ID NO: 4829 - protein, 117 aa, Zea mays
  Clone ID: PAT_MRT4577_154241C.1.pep
RNIPVKEAQSPPALGTAAGGYGGARGGGGFGGGGPRNGGGGFGGGAGGSGGAGGSGGGGGGYGGGNRGGGFGNSAGNWRNLPVGPARPSYPVRSRDVSPSPKGLFSFVSFGVAPLGF

SEQ ID NO: 4830 - protein, 90 aa, Zea mays
  Clone ID: PAT_MRT4577_154243C.1.pep
AGFGGGGPRYGGGGYAGGAAGYGAAGGSGGGGGGYGGGTRGGGYGNSAGNWRNLPVGPARPSYPVRSRDVSPSPKGLSSFVPFVVAPLCF

SEQ ID NO: 4831 - protein, 61 aa, Zea mays
  Clone ID: PAT_MRT4577_154376C.1.pep
GYGGGRGKGGYGGGGPRYGGGGYSGGAGYGGGGGGYGGGGGGYGGGNRGGGYGKSDGNWRK

SEQ ID NO: 4832 - protein, 360 aa, Zea mays
  Clone ID: PAT_MRT4577_154389C.1.pep
MEAWPDDFRCPITLEVMTDPVILPSGHTFERRSIQSWLDGGHLTCPVTNLPLPPSPPLIPNHALRRLIAAVSPSAAASLVPAEGGAHARQEAVSAAAAAAVPARPASPVPALLRLAKSGAAGRKEVLESGSAAVLLRHAEAGDEAAARALLHLSLDGDDTRVGLVADGAVDALSAAVSRGGAAAASAATALTSLATVDVNKCTIGAHPSAIPALAGLLRRGGPRERREAATALYELCKLPENRRRAVREGAAPALADFAAAGSARAVEVLGLLARCREGRQELCRVPGVVSVLTGAAGSGNARAIEQALLVLNWICSESNELAVEAIKLQAFDLCEALVNDDNCKIAKNAVDLARTLEKA

SEQ ID NO: 4833 - protein, 63 aa, Zea mays
  unsure (1)..(63): unsure at all Xaa locations
  Clone ID: PAT_MRT4577_15444C.1.pep
MAAFNKLGGLLRHSALVSGITGGSXPAVFNAXRLMFTKVGRGGXDWGVDDLKLKEAFSRFGEV

SEQ ID NO: 4834 - protein, 64 aa, Zea mays
  Clone ID: PAT_MRT4577_154488C.1.pep
VKPLIPKFARMIRKRSHDFLPFPTTRRSRPRAKTSKPDSLPRTRPNPRSRHLSGRRAAAAARGP

SEQ ID NO: 4835 - protein, 50 aa, Zea mays
  Clone ID: PAT_MRT4577_154566C.1.pep
LAGADIKKALEIVPANRDVKLEYKFLKEKFKGSTKKAANFYSNMFAKMTK

SEQ ID NO: 4836 - protein, 135 aa, Zea mays
  Clone ID: PAT_MRT4577_154720C.1.pep
FLLLGFVTHGKGVLSHAVAAGISELEGVVFEVVITFALVYTVYATAADPKKGSLGTIAPIAIGFIVGANILAAGPFSGGSMNPARSFGPAVAAGNFAGNWVYWVGPLVGGGLAGLVYGDVFIGGSYQQVADQDYA

SEQ ID NO: 4837 - protein, 231 aa, Zea mays
  Clone ID: PAT_MRT4577_154721C.1.pep
MVKLAFGSVGDSFSATSIKAYVAEFIATLLFVFAGVGSAIAYGQLTNGGALDPAGLVAIAIAHALALFVGVSVAANISGGHLNPAVTFGLAVGGHITILTGVFYWVAQLLGATVACLLLGFVTHGKAIPTHAVAGISELEGVVFEVVITFALVYTVYATAADPKKGSLGTIAPIAIGFIVGANILAVAAGDFAGNWVYWVGPLVGGGLAGLVYGDVFIGGSYQQVADQDYA

SEQ ID NO: 4838 - protein, 341 aa, Zea mays
  Clone ID: PAT_MRT4577_154722C.1.pep
MEVALKESPTLPKASFTILSCLIALFAAGRKTCLARARSELERIGCCRTRGRTRGRTRGRTRGRTRGRTRGQAQSLRAPAKSCGREEQRNKMVKLAFGSVGDSFSVTSIKAYVAEFIATLLFVFAGVGSAIAFGQLTNGGALDPAGLVAIAVAHALALFVGVSVAANTSGGHLNPAVTFGLAVGGHITVLTGLFYWVAQLLGASVACLLLRFVTHGKAIPTHGVSGGTTELEGVVFEIVITFALVYTVYATAADPKKGSLGTIAPIAIGFIVGANILAAGPFSGGSMNPARSFGPAVAAADFAGNWVYWVGPLIGGGLAGLVYGDVFIGGSYQQVADQDYA

SEQ ID NO: 4839 - protein, 138 aa, Zea mays
  unsure (1)..(138): unsure at all Xaa locations
  Clone ID: PAT_MRT4577_154723C.1.pep
LPPSRREFRDIYVIFELMESDLHQVIKANDDLTAEHHQFFLYQLLRGMKYIHAASVFHRDLKPKNILANADCKLKICDFGLARVSFNDTPSAIFWTDYVATRWYRAPELCGSFFSXGKNVVHQLDLMTDLLGTPSAES

SEQ ID NO: 4840 - protein, 253 aa, Zea mays
  Clone ID: PAT_MRT4577_154726C.1.pep
MQDMMVKLAFGSVGDSFSATSIKAYVAEFIATLLFVFAGVGSAIAYGQLTNGGALDPVGLVAIAIAHALALFVGVSVAANISGGHLNPAVTFGLAVGGHITILTGVFYWVAQLLGATVACLLLGCRTHGKAIPTHAVAGINELEGVVIEVVITFALVYTVYATAADPKKGSLGTIAPSAIGFIVGANILAAGPFSGGSMNPARSFGPAVAAGNFAGNWVYWVGPLVGGGLAGLVYGDVFIGGSYQQVADQDYA

SEQ ID NO: 4841 - protein, 250 aa, Zea mays
  Clone ID: PAT_MRT4577_154729C.1.pep
MVKLAFGSVGDSFSVTSIKAYVAEFIATLLFVFAGVGSAIAYGQLTNGGALDPAGLVAIAIAHALALFVGVSVAANISGGHLNPAVTFGLAVGGHITILTGVFYWVAQLLGATVACLLLGFVTHGKAIPTHAVAAGISELEGVVFEVVITFALVYTVYATAADPKKGSLGTIAPIAIGFIVGANILAAGPFSGGSMNPARSFGPAVAAGNFAGNWVYWVGPLVGGGLAGFIYGDVFIGGSYQQVADQDYA

SEQ ID NO: 4842 - protein, 126 aa, Zea mays
  Clone ID: PAT_MRT4577_154853C.1.pep
IRLELESIIFLDRETQRSRGFGLVTFSTEEAMRNAIQGMNGKELDGQNITVNEAQSRGGRRGSGGGYSGGRGGSGYSRGGRHDGCSGYCGGRRSYGGCGCYGGGGGGYSCGNRGGCYGYYHGNWRN

SEQ ID NO: 4843 - protein, 37 aa, Zea mays
  Clone ID: PAT_MRT4577_154868C.1.pep
KNGVVGWGRQWRSKTVFLVASLSDYHLKRFAQVICRL

SEQ ID NO: 4844 - protein, 50 aa, Zea mays
  Clone ID: PAT_MRT4577_154932C.1.pep
TKAGRGLLSSGLGSVDSLCDNLGKKIKQHKVQKDDTDLLIRTTWHLHRQI

SEQ ID NO: 4845 - protein, 98 aa, Zea mays
  Clone ID: PAT_MRT4577_155037C.1.pep
PRVRSRVRPRVRSSGAPCLGYAMGSSVSSSAACYSCVRSLNSRASSTADRHATCNCLNSMTGRLGGSVSMANSANIPGKCCDSVGVPISLTVDCTKIN

SEQ ID NO: 4846 - protein, 78 aa, Zea mays
  Clone ID: PAT_MRT4577_155113C.1.pep
MADNAKAAAAHARPESSQEEEEDWKEAEGDVAEVDRAATNGAGEGGVPTDRPIRVYADGIYDLFHFGHAKSLEQAKKS

SEQ ID NO: 4847 - protein, 180 aa, Zea mays
  Clone ID: PAT_MRT4577_155451C.1.pep
ACKYEEVSVPVVEDLVLISDRAYTKGQILEMEKLILNTLQFNMSVPTPYVFVKRFLKAADADKQLELVSFFMLELCLVEYQMLNYRPSHLAAAAVYTAQCAINRCQQWTKVCESHSRYTGDQLLECSRMMVDFHQKAGTGKLTGVHRKYSTYKFGCAAKILPAQFMLESGGTAPPPSGAI

SEQ ID NO: 4848 - protein, 49 aa, Zea mays
  Clone ID: PAT_MRT4577_155761C.1.pep
HQHDVICIKCTENPKNLKKATQTNRTIQLVWTGRRRSPSRLQQELSRQK

SEQ ID NO: 4849 - protein, 72 aa, Zea mays
  Clone ID: PAT_MRT4577_15580C.1.pep
WTLLAPLLSSMLLVGLAAGSDDDEDGGRIRKPHFNYGKFNADPWTEGQATSQCGRHSLTQPTERGSWCDADH

SEQ ID NO: 4850 - protein, 263 aa, Zea mays
  unsure (1)..(263): unsure at all Xaa locations
  Clone ID: PAT_MRT4577_155911C.1.pep
MASSSPDLADDGFAAPRLFSQGVSYTYDDVIFLPGYIGFPADAVDLSTRLSRRVPLSIPCVASPMDTVSEAAMAAAMASLGAAAVVHCNTEPHSQAAIVRAAKSRRLPFVSSVPFFSPSSSPTLNDFAGSEYALVTERGDSLSRLVGIAVAADAASREVPISVSEYMRPTPRSASSAFDFEEAATFLADEGLDYAPLVSDDGEVVDLITAKDVERIRSYPKLGKPSLGAXGKFVVAASIGTREXDDRXRLEQLVKAGXNAIVI

SEQ ID NO: 4851 - protein, 502 aa, Zea mays
  unsure (1)..(502): unsure at all Xaa locations
  Clone ID: PAT_MRT4577_155915C.1.pep
MASSSTDLADDGFAAPRLFSQGVSYTYDDVIFLPGYIGFPADAVDLSTRLSRRIPLSIPCVASPMDTVSEAAMAAAMASLGAAAVVHCNTDPHAQAAIVRAAKSRRLPFVSSVPFFSPSSAPTLNDFAGSEYALVTERGDSLSRLVGVAVAADAASREVPVSVSEYMRPTPRSASAXFDFEEAATFLGXDKGLDYAPLVSDDGEVVDLITAKDVERIRSYPKLGKPSLGANGKFVVAASIGTREDDKGRLEQLVKAGANAIVIDSSQGNSIYQLDMIKFAKKMYPEVDLIGGNVVTIAQAQNLIQAGVDGLRVGMGSGSICTTQEVCAVGRGQATAVYKVSSYAKDHNVPVIADGGISNSGHIVKALSLGASTVMMGSFLAGSHEAPGTYEYKDGRRVKKYRGMGSLEAMTKGSDARYLGDTLKLKVAQGVVGAVADKGSVLRFIPYTMQAVKQGLQDLGADSLQSAHDLLRSETLRLEVRTGAAQAEGGIHGLVSYEKKAF

SEQ ID NO: 4852 - protein, 79 aa, Zea mays
  unsure (1)..(79): unsure at all Xaa locations
  Clone ID: PAT_MRT4577_155953C.1.pep
YMMFQFYFCPAGEGPFFGCPGPHPFPCSRGVLFPPFKKWMFXQRLFRGGGPFQLPGVAXWPTDTPARGLCLGFCPVCLE

SEQ ID NO: 4853 - protein, 424 aa, Zea mays
  Clone ID: PAT_MRT4577_155978C.1.pep
MENLRSQNCHQGVAMEGVKFAPEKANTNRRALSDIKNIIGGPHQHLAVSKRALSEKPAAAAAANAKDQAGFVGHRPVTRKFAATLATQPTVALLDPIGSERLKRNADTAFHTPADMESTKMTDDSPLPMVSEMDEMMSPELKEIEMEDIEEAAPDIDSGDAGNSLAVADYVDEIYRFYRKTEGASCVPTNYMSSQTDINEKMRGILIDWLIEVHYKLELLEETLFLTVNIIDRFLARENVVRKKLQLAGVTAMLLACKYEEVSVPVVEDLILICDRAYTRADILEMERRIVNTLNFNMSVPTPYCFMRRFLKAAQSEKKLELLSFFMIELSLVEYEMLQFCPSMLAAAAIYTAQCTINGFKSWNKCCELHTRYSEEHLMVCSRMMVELHQRAAHGKLTGVHRKYNTSRYSYAAKSEPATFLLDA

SEQ ID NO: 4854 - protein, 283 aa, Zea mays
  Clone ID: PAT_MRT4577_156281C.1.pep
PTRPRTRGRDDSYQKWRWQPAGCDLPRFDARLLLERLRNKRLMFVGDSLNRNQWESMVCLVQSVIPDRGQKTLTKFVNGGSSNVFYAHEYNATVEFYWAPFLVESNSDNPKVHSVPDRVIQWHAIAKHARNWIGVDYLVFNTYIWWLNTLDMKVLKQGSSFDDQGGSTEYVEVDRPVAYKEVLTTWAKWVDRNIDPNRTTVFFMGMSPNHITPEAWGNKGGIKCAMETLPIASNRSAALDVGTDWRLYAGAREVLPTLRRVPVHFVDITALSELRKDAHTLVH

SEQ ID NO: 4855 - protein, 460 aa, Zea mays
  unsure (1)..(460): unsure at all Xaa locations
  Clone ID: PAT_MRT4577_156283C.1.pep
RGAEAGPTRPGGALTRRSLRRPRRRRRXATAALRGVVSVPQTCDLYRGSWVYDEVSAPVYKEGECEFLTEQVTCMRNGRRDDSYQKWRWQPAGCDLPRFDARLLLERLRNKRLMFVGDSLNRNQWESMVCLVQSVIPDRGQKTLTXRQRRVXNVFYAHEYNATVEFYWAPFLVESNSDNPKVHSVPDRIIQWHAIAKHARNWIGVDYLVFNTYIWWLNTLDIKVLKQGSSFDDQGGSTEYVEVDRPVAYKEVLTTWAKWVDRNIDPNRTTVFFMGMSPNHITSMASAKKTAGRRGKKKKRVPEFRVPVSDPGFSGTDRVLVIPYPTRIRGSISGPEAWGNKGGIKCAMETLPIASNRSAALDVGTDWRLYAGAREVLPTLRRVPVHFVDITALSELRKDAHTSVHTLRQGKLLTPEQQADPKTYADCIHWCLPGLPDTWNQFLYARIASSPWPNDAQAQQ

SEQ ID NO: 4856 - protein, 367 aa, Zea mays
  unsure (1)..(367): unsure at all Xaa locations
  Clone ID: PAT_MRT4577_156356C.1.pep
GEHPSDRIKLPGNAMLGEGKPENQNHAIIFTRGXHYMEETLKMRNLLQEFLKKHDGVRYPSILGVREHIFTGSVSSLAWFMSNQETSFVTIGQRVLANPLRVRFHYGHPDIFDRLFHLTRGGVSKASKIINLSEDIFAGFNSTLREGNVTHHEYMQVGKGRDVGLNQISLFEAKIANGNGEQTLSRDVYRLGHRFDFFRMLSCYYTTIGFYFSTMITVWTVYVFLYGRLYLVLSGLDEALATGKRFIHNEPLQVALASQSFVQLGFLMALPMMMEIGLERGFRTALSDFVLMQLQLASVFFTFSLGTKTHYYGTTLLHGGAEYRATGRGFVVFHAKFAENYRLYSRSHFVKGIELMILLIVYEIFGQ

SEQ ID NO: 4857 - protein, 723 aa, Zea mays
  unsure (1)..(723): unsure at all Xaa locations
  Clone ID: PAT_MRT4577_156358C.1.pep
IGTSSRPGKLPGDPHPEDIQPRIPTYPSLRVAYIDEVEEPSKDKNKKIEKVYYSALVKAAVTKPDDPXVQKLDQXIYRIKLPGNAMLGEGKPENQNHAIIFTRGEGLQTIDMNQEHYMEETLKMRNLLQEFLKKHDGVRYPSILGVREHIFTGSVSSLAWFMSNQETSFVTIGQRVLANPLRVRFHYGHPDIFDRLFHLTRGGVSKASKIINLSEDIFAGFNSTLREGNVTHHEYMQVGKGRDVGLNQISLFEAKIANGNGEQTLSRDVYRLGHRFDFFRMLSCYYTTIGFYFSTMITVWTVYVFLYGRLYLVLSGLDEALATGKRFIHNEPLQVALASQSFVQLGFLMALPMMMEIGLERGFRTALSDFVLMQLQLASVFFTFSLGTKTHYYGTTLLHGGAEYRATGRGFVVFHAKFAENYRLYSRSHFVKGIELMILLIVYEIFGQSYRGAIAYIFITFSMWFMVVTWLFAPFLFNPSGFEWQKIVDDWTDWNKWISNRGGIGVPPEKSWESWWEKEQEPLRHSGKRGTVLEIVLSLRFFIYQYGLVYHLNITTHTKSVLVYCISWVIIFVILLVMKTVSVGRRKFSAEFQLVFRLIKGLIFITFISIIIILIAIPHMTVQDIFVCILAFMPTGWGLLLIAQTMRSAISHMGLWGSVKALARGYEIIMGLLLFTPIAFLAWFPFVSEFQTRMLFNQAFSRGLQISRILGGHKKDRAARNKE

SEQ ID NO: 4858 - protein, 630 aa, Zea mays
  Clone ID: PAT_MRT4577_15635C.1.pep
MESGLVASHRLRVPPPSASAGHHHLIRHRHAHAPVAAAPLRLSLPRHLPRSTPLRLPAALPLRHCLPPLRAASAAAAAVPAPGDDASPKFLGVETKTIKKIVPLGLMFFCILFNYTILRDTKDVLVVTAKGSSAEIIPFLKTWVNLPMAVGFMLLYTKLADVLSKEALFYAVIFPFIAFFGAFAYVLYPMRDAIHPTALADRLLASLGPSFLGPVAILRVWSFCLFYVMAELWGSVVISVLFWGFANQITTVEEAKEFYPLFGLGANVALIFSGRTVKYFSNMRKNLGPGVDGWAISLKAMMSIVVVLGLVITGIYWGVNKFVIDNSSVPVVERKKKDKPKLSMGESMKVLLSSRYVRDLATLVVAYGISINLVEVTWKSKLKAQFPSPNEYSSFMGDFSTATGIATFTMMLLGRVILRKFGWGVAATITPAVLLLTGVGFFSLILFGEPLTPLMTKFGMTPLLAAVYVGAMQNIFSKSAKYSLFDPCKEMAYIPLDEDMKVKGKAAIDVVCNPLGKSGGALIQQFMILSFGSLANSTPYLGGILLVIVLAWLGAVRSLDLQFSSLAKQELGREKLLKTQAVETVAEVVGTGNGSLQETLASEPSANGAATKQSQEPESTAPEKSGQQSQ

SEQ ID NO: 4859 - protein, 256 aa, Zea mays
  Clone ID: PAT_MRT4577_156363C.1.pep
MARGSMAAVLAVLAVAALRCAPAAAELPLVEHPAKNDGSLSLLVVGDWGRNGTYNQSRVAEQMGKVGERLDIDFVVSTGDNFYENGLTGVHDQQFEESFTNIYTAQSLQKPWYLVLGNHDYRGDALAQLDPVMRKLDERFVCMRSFVVNAEMVEFFFIDTTPFQLKYWTHPKDSHYDWRGVAPRENYIANLLKDLDEAMKKSTAKWKIAVGHHTMRSVSDHGDTEELLQLLLPVLEVNGIDFYINGHDHCFEHITS

SEQ ID NO: 4860 - protein, 345 aa, Zea mays
  unsure (1)..(345): unsure at all Xaa locations
  Clone ID: PAT_MRT4577_15637C.1.pep
TGIYWGVNKFVIDNSSVPVVERKKKXTWQIFYCSSSCVYGSLLNGSANITFQDKPKLSMGESMKVLLSSRYVRDLATLVVAYGISINLVEVTWKSKLKAQFPSPNEYSSFMGDFSTATGIATFTMMLLGRVILRKFGWGVAATITPAVLLLTGVGFFSLILFGEPLTPLMTKFGMTPLLAAVYVGAMQNIFSKSAKYSLFDPCKEMAYIPLDEDMKVKGKAAIDVVCNPLGKSGGALIQQFMILSFGSLANSTPYLGGILLVIVLAWLGAVRSLDLQFSSLAKQELGREKLLKTQAVETVAEVVGTGNGSLQETLASEPSANGAATKQSQEPESTAPEKSGQQSQ

SEQ ID NO: 4861 - protein, 249 aa, Zea mays
  unsure (1)..(249): unsure at all Xaa locations
  Clone ID: PAT_MRT4577_156652C.1.pep
MDLLDAGHRHSSELPAAGADMEGASVLPLSGAAYQPYVSELLSFSIERLHKEPELLRVDGERVRRQMQEVAVENYAAFIAASEALSFVRAQLEGFDKHLEALVEEIPNLTSGCTEFVESAHQILEERKLNQTLLANHSTLLDLLEIPQLMDTCIRNGNYDEALDLEAFVSKISKLHPDLPVIQGLAAEVKKTIQSLISQLLQKLRSNIQLPECLRIVAHLRRIGVFSESELCLQFXCREAWLSGILDDL

SEQ ID NO: 4862 - protein, 163 aa, Zea mays
  unsure (1)..(163): unsure at all Xaa locations
  Clone ID: PAT_MRT4577_15666C.1.pep
MASSTMCXLSSTALRRXAVNVPXSSAFXXARVTMRKTASNAKPAEAFGRPWYGPYRVLYLGPLSGEPPSYLTGEFPGDYXDDXTARLSVDPETFAKNLELEVIHSRCDMLGALGCIFPDLLARNGVKFREAVCPHDGSQIFSEGGLDYLENPSLIHAQSILAI

SEQ ID NO: 4863 - protein, 51 aa, Zea mays
  Clone ID: PAT_MRT4577_156727C.1.pep
QCHNVTLIPSRALYINIYNLSCSCPTAVAIWPMSFLKALRWCCFLDISICV

SEQ ID NO: 4864 - protein, 650 aa, Zea mays
  Clone ID: PAT_MRT4577_156728C.1.pep
MARFEVNGKSVQGVDLLRRRHWPSRLDFWPFLALYALWLLLAVPALDFTDALIILAALSAAHILTFLFTAWFVDFRAFVGYSKVKDIHAANTCKVTPAKFSGSKEIVPLHKQKNVASTSAAGETEEIYFDFRKQRFIYSAEKDNFLKLRYPTKELIGHYGKGTGYGTEAKISTAVDKWGRNVFEYPQPTFQKLMKEQIMEPFFVFQVFCVVLWCLDAYWYYSLFTLFMLFLFESTMAKNRLKTLTELRRVKVDSQIVLTYRCGKWVKIPGTELLPGDIVSIGRSTSGEDRSVPADMLLLAGSAIVNEAILTGESTPQWKVSIAGRSPDDMLSIKRDKNHILFGGTKVLQHTADKSVNLRAPDGGCLAFVLRTGFETSQGKLMRTILFSTERVTANNKESGLFILFLLFFAIIASGYVLVKGLEDPTRSRYKLLLSCSLIITSVIPPELPMELSIAVNTSLIALARRGIFCTEPFRIPFAGKVDICCFDKTGTLTSDDMEFQGIVTLEGDTDLISDANKLPLRTQEVLSSCHALVFVDNKLVGDPLEKAAIKGIDWIYTSDEKAMSKKPGGQPVQIVHRYHFASHLKRMSVIVRIQQKFYAFIKGAPETIQEKLVDLPAAYVETYKKYTRQGSRVLALAYKLLPEMPVSFC

SEQ ID NO: 4865 - protein, 95 aa, Zea mays
  unsure (1)..(95): unsure at all Xaa locations
  Clone ID: PAT_MRT4577_156763C.1.pep
GYLGLCGGAIAAADVEYRCFVGGLAWDTINKSLENAFACYREILDSKVITDRDDGXRSRGFGFATFCYENSMLDSIKNMNGKELDGRNITVNHAQ

SEQ ID NO: 4866 - protein, 90 aa, Zea mays
  Clone ID: PAT_MRT4577_156772C.1.pep
NMTGKELDGRNIPVNQAQSRAGAGAAGGYGGGPGGGGYGGGPRDGGYGGGGGYAGRPKGGGAGYGGGGGYAGRPEGGGGGYGGGGGGWRD

SEQ ID NO: 4867 - protein, 159 aa, Zea mays
  Clone ID: PAT_MRT4577_156775C.1.pep
MAAADVEYRCFVGGLAWATSNESLENAFASYGEILDSKVITDRETGRSRGFGFVTFSSENSMLDAIENMNGKELDGRNITVNQAQSRGGGGGGGGGGYGGGRGGGGYGGGRRDGGYGGGGGYGGRREGGGGGYGGGGGYGGRREGGGGGYGGGGGGWRD

SEQ ID NO: 4868 - protein, 157 aa, Zea mays
  unsure (1)..(157): unsure at all Xaa locations
  Clone ID: PAT_MRT4577_156792C.1.pep
MAAADVEYRCFVGGLAWATSNESLENAFASYGEILDSKVITDRETGRSRGFGFVTFSSENSMLDAIENMNGKELDGRXITDNQAQSRGGGGGGGGYGGGRGGGGYGGXRRDSCYGGGGGCGGRREGGGGGYRGGGGFGGRREXGGGGYXGGGGGWRD

SEQ ID NO: 4869 - protein, 257 aa, Zea mays
  Clone ID: PAT_MRT4577_156793C.1.pep
MAAADVEYRCFVGGLAWATSNESLENAFASYGEILDSKVITDRETGRSRGFGFVTFSSENSMLDAIENMNGKELDGRNITVNQAQSRGGGGGGGGYGGGRGGGGYGGGRRDGGYGGGGGYGGRREGGGGGYGGGGGYGGRREGGGGGYGGGGGGGWRDKRSLPRGRAEAGRVRQLAERADQRDPGDAAQAVLHADPGAGGLEGRGVPLHRPQGQRPGHQPQPAHQPQPPRQLLRQARPLGLPVLLITPIHSIDPSAG

SEQ ID NO: 4870 - protein, 190 aa, Zea mays
  Clone ID: PAT_MRT4577_156873C.1.pep
MQTTGPASPDKPPVVDPEADDKVEEGARAKEDDAAKVSGEDEDEEEQEGRRGRRQRRRRGGAAGDSSVAMVKRELLARCLTCPLCDRLLRKATTISECLHTFCRNCIYNKINDEDLDHCPVCKIDLGCTPVDKLRADHNIQDVRSKVFPFKRKKVNAEEAESPIMLPVKVKERSISSLVVNTPRVTQQLH

SEQ ID NO: 4871 - protein, 160 aa, Zea mays
  Clone ID: PAT_MRT4577_156911C.1.pep
MNDSEEHHFKLKADAGAFKTYPQQAGTVRKNGSIVIKNRPCEVEEVSTSQTGQHGHAKCHFVAIDILNGKKLEDIGASSHNWDIPHANRTDADLIDISHDGLVSLLTSDGNTKDDLILPTDETLVAQIKEGFESGEALAATVQSAMEEEQICALKDVGTQ

SEQ ID NO: 4872 - protein, 181 aa, Zea mays
  unsure (1)..(181): unsure at all Xaa locations
  Clone ID: PAT_MRT4577_156944C.1.pep
TGSKQAITAGILPLSPLFLQQXSSALLHQXLPLVHLLAQNIRAQQLQXLVLANLSAYSQQQQFLPFNQLAALNSASYLQQQQLPFSQLPDAXHQLFLTLYSLAALIYYVYLQQQQVISFRQLAVVIHATFLIQSQLLPFRQHAAPNAGSLLQLQHLLPFKQLAFTKPPAFFLQLIIVGALF

SEQ ID NO: 4873 - protein, 45 aa, Zea mays
  Clone ID: PAT_MRT4577_157023C.1.pep
PKHLNLHLYNITGFHMGNRNAYDIKQNHPVRKITYASSGIDWFAL

SEQ ID NO: 4874 - protein, 101 aa, Zea mays
  Clone ID: PAT_MRT4577_157113C.1.pep
GLSVATSKTGEHGHAKCQGVAIDIYNGKKLEDIGPSSHNWDIPHVNRTEYQLIDISEDGFASLLTSDGNTKDDLRLPTDETLGAQIKGGYESGKDLCVTVQ

SEQ ID NO: 4875 - protein, 138 aa, Zea mays
  unsure (1)..(138): unsure at all Xaa locations
  Clone ID: PAT_MRT4577_157123C.1.pep
MAEEKHHHHHLCHHKKDEEQIAVGGYGESAVYTEATVTAVVFTGENXSSXYKKEEKEHKHKQHLRXAGAIDACTLKLYQKHEAKNDPEHAHLHMIEEDVAVEDDVGSGGFSFHEHHXKKKDHKEAIEVCCQNKHHLFV

SEQ ID NO: 4876 - protein, 415 aa, Zea mays
  unsure (1)..(415): unsure at all Xaa locations
  Clone ID: PAT_MRT4577_157125C.1.pep
MGGVGEGDAWADQEQGNGGGSRGVGGGGGEAKRSEIYTYEAAWHIYAMNWSVRRDKKYRLAIASLLEQVTNRVEVVQLDEASGDIAPVLTFDHQYPPTKTMFMPDPHALRPDLLATSADHLRIWRIPSSDDAEDGAASANNNNGSVRCNGTQQPGIELRSELNGNRNSDYCGPLTSFDWNDADPRRIGTSSIDTTCTIWDVEREAVDTQLIAHDKEVYDIAWGGAGVFASVSADGSVRVFDLRDKEHSTIIYESGSGGSSGGGSNSGAGDGGTASPTPLVRLGWNKQDPRYMATIIMDSPKVVVLDIRYPTLPVVELHRHHAPVNAIAWAPHSSCHICTAGDDMQALIWDLSSMXLVAMAVAMGMVTQPLEXAEGGLDPILAYTAGAEIEQLQWSATQPDWVAIAFANKLQILRV

SEQ ID NO: 4877 - protein, 104 aa, Zea mays
  unsure (1)..(104): unsure at all Xaa locations
  Clone ID: PAT_MRT4577_157295C.1.pep
AKDDVASYKAVIHVTDPTPASPTADDSKALVIAEXLQLNXPEKPAPPTQGGSTDRDLAIARGETDKRNFMIKAWEENGMTKADTKADDKVSAIGLCENSNKAPI

SEQ ID NO: 4878 - protein, 628 aa, Zea mays
  unsure (1)..(628): unsure at all Xaa locations
  Clone ID: PAT_MRT4577_157312C.1.pep
MGGGADEVVKVVDLEDGEGEEEAEAAAAEGSSMEMGMLPRMPVRVLLAEGDDSTRHVISALLRKCGYRVAAASDGVKAWDLLKEKSFKVDLVLTEVELPLMSGFLLLSTIMEHDASKNIPVIMMSSHDSVSMVFKCMLKGAADFLVKPIRKNELRNLWQHVWRKQLANGGPNVQHIQREENLAERIQQKTGVTKADNLDRDVPCKNRECSEQESDAQSSCTRSELEAESKQTDNILEYKQSTQRHLSIPSHKNVELNXDRPKYKELRVITXPASEDDLSPKKRTCLNENNSXSFKRYGXVHIMENQQKYNTQWEVDTMRTTSRGNDEKGSIPAHQLELSLRRTDYGKLENHEKNDRRTLNHSTSSAFSLYNCRAVPTLGNAGDGQLCSTSETLVDVENKNGDSADPSQDMTETNRPPIRVVPVPVQGLTFDGQPFWNGTPVASLFYSQSTPPIWNSKTSMWQESTPQATSLPQKSPQNEPNEMGAKPVINAGEQFAMGPPSASGKQLHVEILNDDPRHISPMTGESGISTVLDSTRNTLSSSGCDSISNQITAPTESSNVYKDVPETPSAEGSRHLSQREAALNKFRLKRKDRCFEKKVRYQSRKLLAEQRPRVKGQFVRQDHSIQGS

SEQ ID NO: 4879 - protein, 630 aa, Zea mays
  unsure (1)..(630): unsure at all Xaa locations
  Clone ID: PAT_MRT4577_157315C.1.pep
MGGGADEVVKVVDSEDGEGEEEEAEAAAAEGSSKETPMLPRMPVRVLLAEGDDSTRHVISALLRKCGYRVAAASDGVKAWDILKEKSFNIDLVLTEVELPLMSGFLLLSTIMEHDASKNIPVIMMSSHDSVSMVFKCMLKGAADFLVKPLRKNELRNLWQHVWRKQLAXAGPMCSTYKKRISQXMEQKTGVTKADNLNSDGPHKNRECSEQESDAQSSCTRSELEAESKQTNNILEYMQSTERHLFIRSHKDLELNGETKTRTKGNNLIPTREDDLLPKKRTCLNDNDSERTSRDMELVHIMDNQQKHDTQRDVDTMRTTSRGNDEKNSIPAHQLELSLRRTDYGKLENHEKNDRRTLNHSTSSAFYLYNCRTASSLGNAGDGQLCSTSETLVDVENRNGDLAALSEDTTETNRPPIRVVPFPVPVQCFTFDGQPFWNGTPVASPFYPQSAPPIWNSKTPTWQESTPQATSLPQKSQQNEPVEMDAKPVENAEEQFVVGPPSASGKQLHVEIPKDGLRHISPVTGESGISTVLDSTRNTLSSSGCDSTSNRITASTEPSSNVYRGVPETARAEGLRHLSQREAALNKFRLKRKDRCFEKKVRYQSRKLLAEQRPRVKGQFVRQDHSIQGS

SEQ ID NO: 4880 - protein, 40 aa, Zea mays
  unsure (1)..(40): unsure at all Xaa locations
  Clone ID: PAT_MRT4577_157603C.1.pep
TSAKHLLNSGHWVLQXFFLLQASRRPSRELPGLWSIGRVG

SEQ ID NO: 4881 - protein, 363 aa, Zea mays
  Clone ID: PAT_MRT4577_157626C.1.pep
MVVMGKEQQHEEEEVQGKVVQEEVQVVQETVVPVPSEEDKEAEAALVHKISSLAAAIAKLPSLSPSPEVNALFTELVTACIPRSSVDVERLGPELQEMRGGLIRLCADAEALLEAHYSDLLASFDNPLEHLSLFPYINNYILLSQLEHGLLARHVPGPAPARVAFVGSGPLPLSSLVLAARHLPGASFDNYDICGEANDRARRLVRGDGALQARMAFRTSDVADVTRELASYDAVFLAALVGMAAEEKARVVAHLGRHMAPGAALVVRSAHGARGFLYPVVDPGEIRRGGFDVLAVHHPEGEVINSVIIARKPVAVDAHATGGVGHAHAHAHGAVLNRPCLCCEMEARAHQKMEEVAVEQLPS

SEQ ID NO: 4882 - protein, 129 aa, Zea mays
  Clone ID: PAT_MRT4577_157778C.1.pep
VFSLPQSVFCCFYGENSAPFSKDCKLAYFVCLEEVGCYPGKGWSAFLVKRVFGVHLLLSFFLFKSLRSRGCRLVSPPARLFVRRMLSFNMCSFVAPCLVHLYPPSFRWSAGFSPIGKPVWVNFFLKPSF

SEQ ID NO: 4883 - protein, 219 aa, Zea mays
  unsure (1)..(219): unsure at all Xaa locations
  Clone ID: PAT_MRT4577_15782C.1.pep
RGGRNKIKKKKKNPRVGPVLLWFGISVPLVFVGSYLGFKKPAMEPPVKTSKIPRQIPEQAWYMNPLFTILIGGVLPFGAVFIELFFILTSIWLHQFYYIFGFLFLVFVILVITCAEIAVVLCYFQLCSEDYMWWWRSYLTSGSSALYLFLYAAFYFFTKLQITKLVSGILYFGYMFLASYAFFVLTGTXSYAFFVLNGKIGFCAXFWFTRLIYSSVKID

SEQ ID NO: 4884 - protein, 62 aa, Zea mays
  Clone ID: PAT_MRT4577_1578C.1.pep
ANNNIGVVIALWAPIILVYFMDTQIWYAIFSTLIGGVYGACRRLGEIRTLGMLRSRFESLPK

SEQ ID NO: 4885 - protein, 89 aa, Zea mays
  Clone ID: PAT_MRT4577_157903C.1.pep
QPRHQPHTNREHDHHHLPKSPKMANQPCEGQVRYGTVWSYSSKDIVVNVYLKSSSHIYTSRVRHTSDEPYKFQQLNTIRRQLYTRCRTR

SEQ ID NO: 4886 - protein, 118 aa, Zea mays
  unsure (1)..(118): unsure at all Xaa locations
  Clone ID: PAT_MRT4577_157931C.1.pep
IRLEVSSTYFSRTSTQTVLATLLKDPIELSAYRDRRFKGTQEENEAGLLAWTTLYIGNMSFYTTEEQAYELLYLAGKIKKIMIGLEQNSKIPCXIXFVLYYSREDAENAVKYMSGTML

SEQ ID NO: 4887 - protein, 65 aa, Zea mays
  Clone ID: PAT_MRT4577_157970C.1.pep
HVYESSMERDREEEEDRRGSGNMLVRGCSIHSYLTSTVPKCKPFHELRNPHVAIYIFVITNRGKR

SEQ ID NO: 4888 - protein, 806 aa, Zea mays
  Clone ID: PAT_MRT4577_158122C.1.pep
MRKWALSSALLLLFLLTTLPDPAKKLQVNAEESSYDLANPPKVEEKLGAVPHGLSTDSEVAQREAESISRKTLRSSAEKFEFQAEVSRLMDIIINSLYSNKDIFLRELISNASDALDKIRFLSLTDKEVLGEGDTAKLEIQIKLDKEKKILSIRDRGIGMTKEDLIKNLGTIAKSGTSAFVEKMQSGGDLNLIGQFGVGFYSVYLVADYVEVVSKHNDDKQYVWESKADGSFAISEDTWNEPLGRGTEIRLHLRDEAKEYLEEDKLKDLVKKYSEFINFPIYLWSTKEVDVEVPTDEDETSEEEDSTPETTEEETEEDEDEEKEKKPKTKTIKETTSEWELLNDVKAVWLRSPKEVTDEEYSKFYHSLAKDFGDDKPMGWSHFTAEGDVEFKALLFIPPKAPHDLYESYYNSNKSNLKLYVRRVFISDEFDDLLPKYLSFLKGIVDSDTLPLNVSREMLQQHSSLKTIKKKLIRKALDMIRKLAEEDPDEYSNKDKTDEEKSEMEEKKGQYAKFWNEFGKSIKLGIIEDATNRNRLAKLLRFESTKSDGKLASLDEYISRMKSGQKDIFYITGSSKEQLEKSPFLERLTKKNYEVIFFTDPVDEYLMQYLMDYEDKKFQNVSKEGLKLGKDSKLKELKESFKELTDWWKKALESENVDSVKISNRLHDTPCVVVTSKYGWSANMEKIMQAQTLSDSSKQAYMRGKRVLEINPRHPIIKELRDKVAQDNESEELKHTARLVYQTALMESGFNLPDPKEFASSIYKSVQKGLDLSPDATVEEDEAEEQPEVEEKEPEPEPSSYDKDEL

SEQ ID NO: 4889 - protein, 115 aa, Zea mays
  Clone ID: PAT_MRT4577_158138C.1.pep
DRLTQAKPYLSDGVVQGLVDPRLGDGYDCGQLRRLMFVASLCVRAAAVWRPTMTQVVELLESGEISQEQWQMPEKEEQDELWDFDDLDDFDEDDYDDESDSPSISSSACSIHPDD

SEQ ID NO: 4890 - protein, 68 aa, Zea mays
  unsure (1)..(68): unsure at all Xaa locations
  Clone ID: PAT_MRT4577_158232C.1.pep
MSAGASEQXRTFGPKESGCHKGNVIGSAIGDPLKNTLGPSLNIQIKLMTVESLIFATLFASLGGLLFG

SEQ ID NO: 4891 - protein, 85 aa, Zea mays
  unsure (1)..(85): unsure at all Xaa locations
  Clone ID: PAT_MRT4577_158338C.1.pep
MVXASLLKSCLLPKKSEWGATRXPSXPRPATVSVVVRACXYADELVKTXKTIGWVGAACRTMGWCRWWSWRCCWTVRSGSSGRSG

SEQ ID NO: 4892 - protein, 126 aa, Zea mays
  unsure (1)..(126): unsure at all Xaa locations
  Clone ID: PAT_MRT4577_158355C.1.pep
PTLSAAAAIGRNSAVVFAWKGETLEEHWWCTERWLNWREGVGHHLIVDDGGVPTLFIHKGVKAXDAYEMTGNIQEPGSTDSAEIKNVLTIIRDRLKVDPMKYRKMNEWLVGLSEETTTGVKRLYQM

SEQ ID NO: 4893 - protein, 79 aa, Zea mays
  Clone ID: PAT_MRT4577_158398C.1.pep
CVNIPTKMKNSEPDFLKLYLVNQNNYHSIKQKLECYRCSTTSPPHCPHRHLMQKRDEQYARICFPQIQRHPLFNTKYYF

SEQ ID NO: 4894 - protein, 222 aa, Zea mays
  unsure (1)..(222): unsure at all Xaa locations
  Clone ID: PAT_MRT4577_15848C.1.pep
MSDSSEPSKEGSSANGSSALQKTGAWSSILSTLVQQASVYGLAAGYCLSASLLSIINKWAIMKFPYPGALTALQYLTSVVGVLLCGQAKLIEHDGLNFATMWKFLPAAVMFYISIFTNSELLLHANVDTFIVFRSAVPIFVAIGETLYLHQPWPSFKTWLSLSTILGGSVIYVFTDNQFTVTAYSWAVAYLASMSIDFVYIKHVVMTIXLNTWGLVLYXNLE

SEQ ID NO: 4895 - protein, 365 aa, Zea mays
  Clone ID: PAT_MRT4577_158569C.1.pep
MVMMMRSCLGGGLLPVAVMLCLNVVAAVMVSLVKVAMDGGMKPLVIVTLQQLTAAVFLAPIAFFKERKSRPKLTLEIFAYIFVSAALGAALRQYMIFVALRYTTATFVTAFSNIAPVLTFLLAVATRSEALDLKSRTGLAKLLGTLVSLAGAMVLTLYKGVALTHAAAASQDHQQHSHGRLPPSAADSRGKWTLGTVAILGNCVCLSCWFLLHGRLAKKYPHVYSCNALMSLLSFLQVAVVGLCTQRSISPWIVTSKFNILTVLYAGIVGCGVSFVLVTWCIEKRGAVFVAAFIPVVQIIVSVIDFSILHEQLYLGSVLGSVLVIGGLYLLLWGKRQEALHCPPPPPKVAEEDPADKEQQQVQHN

SEQ ID NO: 4896 - protein, 121 aa, Zea mays
  unsure (1)..(121): unsure at all Xaa locations
  Clone ID: PAT_MRT4577_158709C.1.pep
IASSSCMLAMCSGQPKMSQSVLIAFRNVGDDATGAALAIDAFFPFACTDAIXEACYNSIGIIAQPVRSNNDEDAVACCIKYGVSLVLTDVRHFKLYPSCSMAGHLSVRSYGLYTNLRQLLL

SEQ ID NO: 4897 - protein, 68 aa, Zea mays
  Clone ID: PAT_MRT4577_15871C.1.pep
MEYGQQGQRGHGATGHVDQYGNPVGGVKHGTGGMRHGTGTGGGMGQMGEHGGAGMGGRQIQPAREEYK

SEQ ID NO: 4898 - protein, 168 aa, Zea mays
  unsure (1)..(168): unsure at all Xaa locations
  Clone ID: PAT_MRT4577_158906C.1.pep
RAIQLSLAAPFQQAELEGGWWGWLSLSLVHGGREKHHHHHLFHHKRDEEQLAAGGYGESAEYTEATVTGGGGTXXEXYHEYKKEEKEHKHKQHLGEGGAIAXGAFALYEKHEAKKDPEHAHRHKSEEEVSAAGGVWSGGFAFHEPHEKKKDHKEAXEAGGEKKHHXFG

SEQ ID NO: 4899 - protein, 78 aa, Zea mays
  unsure (1)..(78): unsure at all Xaa locations
  Clone ID: PAT_MRT4577_158952C.1.pep
MAAADVEYRCFVGRLAWASSNEXLENAIDTYVEVLDSKVITDRXTGMSRGVGNGTFTSENCMLDAIDHMNRKEIHGRN

SEQ ID NO: 4900 - protein, 111 aa, Zea mays
  unsure (1)..(111): unsure at all Xaa locations
  Clone ID: PAT_MRT4577_159050C.1.pep
MAAKIFCLLMLLGISASAATATIFPQCSQAPIASLLTPYLSPAVCSACXNPIRXPYRIQHAIAPGILPLSPXFLQQSSALIQQXPMVHLLSQYIMAQQLQQLVLANLAVYS

SEQ ID NO: 4901 - protein, 472 aa, Zea mays
  Clone ID: PAT_MRT4577_159255C.1.pep
MAFYRGLTAVSRLRSRMAQEATTLGGVRWLQMQSASDLDLKSQLQELIPEQQDRLKKLKSEHGKTQLGNITVDMVLGGMRGMTGMLWETSLLDPEEGIRFRGLSIPECQKVLPTAVKGGEPLPEGLLWLLLTGKVPTKEQVDALSKELLARSTVPAHVYKTIDALPVDAHPMTQFTTGVMALQVESEFQKAYDNGLPKSKFWEPTYEDCLNLIARLPPVASYVYRRIFKSGKSIEADNSLDYAANFSHMLGFDDPKMLELMRLYVTIHTDHEGGNVSAHTGHLVGSALSDPYLSFAAALNGLAGPLHGLANQEVLLWIKSVIEETGSGVTTDQLKDYVWKTLKSGKVVPGFGHGVLRKTDPRYSCQREFALKHLPKDPLFQLVSKLYEVVPPILTELGKVKNPWPNVDAHSGVLLNHFGLSEARYYTVLFGVSRSMGIGSQLIWDRALGLPLERPKSVTMEWLENYCKNKAA

SEQ ID NO: 4902 - protein, 245 aa, Zea mays
  Clone ID: PAT_MRT4577_159256C.1.pep
MAFFRGLTAVSRLRSRMAQEATTLGGVRWLQMQSASDLDLKSQLQELIPEQQDRLKKLKSEHGKVQLGNITVDMVLGGMRGMIGMLWETSLLDPEEGIRFRGLSIPECQKVLPTAVKGGEPLPEGLLWLLLTGKVPTKEQVDALSKELLERSTVPAHVYKAIDALPVTAHPMTQFTTGVMALQVESEFQKAYDNGLPKSKFWEPTYEDCLNLIARLPPVASYVYRRIFKGGKSIETDNSLDYAAI

SEQ ID NO: 4903 - protein, 73 aa, Zea mays
  unsure (1)..(73): unsure at all Xaa locations
  Clone ID: PAT_MRT4577_15928C.1.pep
MSFLQHHSTSYHSGETNARAXDNTGQVMGATHEKGREAKHKASDASDRAMGMGHDSMEATMDKARACSDQTMV

SEQ ID NO: 4904 - protein, 230 aa, Zea mays
  Clone ID: PAT_MRT4577_15942C.1.pep
MSANVGESTSGGSSNDAAGGSFECNICFELPQEPIVTLCGHLFCWPCLYRWLHIHAHSPECPVCKALVEEDKLVPLYGRGKDRVDPRSKNMPEGEIPHRPTGQRPAPAPQADANNNFANANPNANPWFMGTGVPLANARWGNYAFSAAFGGLFPMLSFQVHGFPDAAAYAQPAGFHYGYGHGHGFHGGHMGHAHGVHRQAPLGQQQQADIYLKALLFMIGILVIASLIAF

SEQ ID NO: 4905 - protein, 146 aa, Zea mays
  unsure (1)..(146): unsure at all Xaa locations
  Clone ID: PAT_MRT4577_159546C.1.pep
EAHVASQQSAAKIYXCLWLLGVSESAATGTIXPQGSQAAIGSLLPPYLSPAACSVCENPMLAPYRIQQAISAGILXPYTPLLLQQSSVLLQQIHFGALXLAQNIRAQQLQXLVLANLAAYSQQQQCLTCNQLAALDSASYLLQQQL

SEQ ID NO: 4906 - protein, 92 aa, Zea mays
  unsure (1)..(92): unsure at all Xaa locations
  Clone ID: PAT_MRT4577_159559C.1.pep
EAISKMHNMSAADFTSARTLIDEYDLYGLVAYSKHHIHSEVPDIYRLAARXTQGAFVHVAHFEQFGVTLTEAAMNGXHIIATINGTPAEINQ

SEQ ID NO: 4907 - protein, 54 aa, Zea mays
  unsure (1)..(54): unsure at all Xaa locations
  Clone ID: PAT_MRT4577_159638C.1.pep
FMILPTGASSFKEAMSVGIXVYHNLKSIIKINYCQDATNVVDECVLAXNIKENK

SEQ ID NO: 4908 - protein, 284 aa, Zea mays
  Clone ID: PAT_MRT4577_159688C.1.pep
MAPLGDGGAAAAAASNNLVVSFGEMLIDFVPDVAGLSLAESGGFVKAPGGAPANVACAIAKLGGAGPGPGAAARVFHYGSISLISEPCRSAHMAAMRAAKAAGVLCSYDPNVRLPLWPSPDAAREGILSIWKEADFIKVSDDEVAFLTRGDANDEKNVLSLWFDGLKLLVVTDGDKGCRYFTKDFKGSVPGFKVDTVDTTGAGDAFVGSLLVNVAKDDSIFHNEEKLREALKFSNAWGGICTTKKGAIPALPTVATAQDLIAVPPRHCPPPPRPSSSTSSVSVH

SEQ ID NO: 4909 - protein, 335 aa, Zea mays
  unsure (1)..(335): unsure at all Xaa locations
  Clone ID: PAT_MRT4577_159689C.1.pep
MAPLGDGGAAAAAASNNLVVSFGEMLIDFVPDVAGLSLAESGGFVKAPGGAPANVACAIAKLGGSSAFVGKFGDDEFGHMLVNILKQNNVNSEGCLFDKHARTALAFVTLKHDGEREFMFYRNPSADMLLTEAELDLGLVRRARVFHYGSISLISEPCRSAHMAAMRAAKAAGVLCSYDPNVRLPLWPSPDAAREGILSIWKEADFIKVSDDEVAFLTRGDANDEKNVLSLWFDGLKLLVVTDGDKGCRYFTKDFKGSVPGFKVDTVDTTGAGDAFVGSLLVNVAKDDSIFHNEEKLRXALKFSNACGAICTTXKGAIPALPTVATAQDLIAKAN

SEQ ID NO: 4910 - protein, 335 aa, Zea mays
  Clone ID: PAT_MRT4577_159691C.1.pep
MAPLGDGGAAAAAASNNLVVSFGEMLIDFVPDVAGLSLAESGGFVKAPGGAPANVACAIAKLGGSSAFVGKFGDDEFGHMLVNILKQNNVNSEGCLFDKHARTALAFVTLKHDGEREFMFYRNPSADMLLTEAELDLGLVRRARVFHYGSISLISEPCRSAHMAAMRAAKAAGVLCSYDPNVRLPLWPSPDAAREGILSIWKEADFIKVSDDEVAFLTRGDANDEKNVLSLWFDGLKLLVVTDGDKGCRYFTKDFKGSVPGFKVDTVDTTGAGDAFVGSLLVNVAKDDSIFHNEEKLREALKFSNACGAICTTKKGAIPALPTVATAQDLIAKAN

SEQ ID NO: 4911 - protein, 380 aa, Zea mays
  Clone ID: PAT_MRT4577_159693C.1.pep
MAPPPQPQHNRLAFPSPPAPVSLSLLSDSLSRSRVHLAAASKRDQMAPLGDGGAAAAAASNNLVVSFGEMLIDFVPDVAGLSLAESGGFVKAPGGAPANVACAIAKLGGSSAFVGKFGDDEFGHMLVNILKQNNVNSEGCLFDKHARTALAFVTLKHDGEREFMFYRNPSADMLLTEAELDLGLVRRARVFHYGSISLISEPCRSAHMAAMRAAKAAGVLCSYDPNVRLPLWPSPDAAREGILSIWKEADFIKVSDDEVAFLTRGDANDEKNVLSLWFDGLKLLVVTDGDKGCRYFTKDFKGSVPGFKVDTVDTTGAGDAFVGSLLVNVAKDDSIFHNEEKLREALKFSNACGAICTTKKGAIPALPTVATAQDLIAKAN

SEQ ID NO: 4912 - protein, 109 aa, Zea mays
  Clone ID: PAT_MRT4577_159754C.1.pep
VDFSSPSGSFSGSRGSPGVGFIDKRSQMAASDVQYRSFAGRLSWTTDDHSLHNAFSTYSEVLESKIILHRETQRFRRFRFVTLCTEEAMRNAIEGMNSKVLDGRNINDN

SEQ ID NO: 4913 - protein, 57 aa, Zea mays
  Clone ID: PAT_MRT4577_159790C.1.pep
ARCLLTHNISAVLLHTAPNVGPSYNCTIAAFDQLALQTHSVLPTTHIGGPSLDCYEL

SEQ ID NO: 4914 - protein, 163 aa, Zea mays
  unsure (1)..(163): unsure at all Xaa locations
  Clone ID: PAT_MRT4577_159876C.1.pep
ITMDPTKFRPSSSHDTTXVTTTNAGAPVGNDNEALTVGPRGAILLEDYHLIEKVAHFARERMPQRVGHARGAYDKGLYECTHDETALTCADLLRALGVRTXVIVRLSTAIHERGCPETIRDPRGFPVRLYTREDNWDLVGNNFPVFFIRDGIKFPDVIHAVKP

SEQ ID NO: 4915 - protein, 488 aa, Zea mays
  Clone ID: PAT_MRT4577_159877C.1.pep
MTHRNMLWTHQSVNPEWEQRHVQVQPGSSYYAGTASDPSNLGVQVAVGVPGNTANVGICDLRNHECPHVHNSYPHAGVTSRFVFPTTMYSPSMSAAAVNIYIPQTQSFGLGSVLPPSLHNQVSTGIIDESSSSVNFGDSAIGFMKRKNAVVAGSHNFLHGFAGSSSSVHVPQNPVHGAWNPSSQSNCLPSSAASNLPEYHNSNGWPYLEESSADASNSFSSVAACPELAPHGNYLYPACHISQSNTWVPQPAGYGVPQWGYSNAVVNPPDMSNGPLPHFCQNSMQAPQIQVPHQQSIGNNVVHGLNPSATGLPLHPRMLALPFNAEHTFGHQVHPPLINQANNGALRILPYQNATVMDHSRIYEAGHVIDEHSDMRLDVDNMTYEELVALQEQIGDVNTGLTESYIQENLRSSFHVPGAASMSDQFSELSLENDACIICQEEYKAKELIGTLECGHKYHVNCIKQWLMMKNLCPICKTTALSSDRRNG

SEQ ID NO: 4916 - protein, 493 aa, Zea mays
  Clone ID: PAT_MRT4577_159882C.1.pep
FCLQFRPSSSHDTTVTTTNAGAPVWNDNEALTVGPRGPILLEDYHLIEKVAHFARERIPERVVHARGASAKGFFECTHDVTSLTCADFLRAPGVRTPVIVRFSTVIHERGSPETIRDPRGFAVKFYTREGNWDLLGNNFPVFFIRDGIKFPDVIHAFKPNPRSHVQEYWRVFDFLSHLPESLHTFFFLFDDVGVPSDYRHMEGFGVNTYTFVSAAGKAQYVKFHWKPTCGVRCILTDEEAALVGGRNHSHATQDLYDSIAAGSFPEWTLYVQVMEPDTEEQYDFDPLDDTKTWPEDLLPLRPVGRLVLDRNVDNFFNENEQLAFGPGLVVPGIYYSDDKMLQCRVFAYADTQRYRLGPNYLMLPVNAPRCAHHNNHYDGAMNFMHRDEEVDYYPSRHAPLRQAAPPTPLPPRPVAGRREKATIRKPNDFKQPGERYRSWDADRQDRFVRRFADSLGHPKVSQELRSIWIDLLAKCDASLGMKIATRLNMKANM

SEQ ID NO: 4917 - protein, 496 aa, Zea mays
  Clone ID: PAT_MRT4577_159884C.1.pep
ITMDPTKFRPSSSHDTTVTTTNAGAPVWNDNEALTVGPRGPILLEDYHLIEKVAHFARERIPERVVHARGASAKGFFECTHDVTSLTCADFLRAPGVRTPVIVRFSTVIHERGSPETIRDPRGFAVKFYTREGNWDLLGNNFPVFFIRDGIKFPDVIHAFKPNPRSHVQEYWRVFDFLSHLPESLHTFFFLFDDVGVPSDYRHMEGFGVNTYTFVSAAGKAQYVKFHWKPTCGVRCILTDEEAALVGGRNHSHATQDLYDSIAAGSFPEWTLYVQVMDPDTEEQYDFDPLDDTKTWPEDLLPLRPVGRLVLDRNVDNFFNENEQLAFGPGLVVPGIYYSDDKMLQCRVFAYADTQRYRLGPNYLMLPVNAPRCAHHNNHYDGAMNFMHRDEEVDYYPSRHAPLRQAAPPTPLPPRPVAGRREKATIRKPNDFKQPGERYRSWDADRQDRFVRRFADSLGHPKVSQELRSIWIDLLAKCDASLGMKIATRLNMKPNM

SEQ ID NO: 4918 - protein, 496 aa, Zea mays
  unsure (1)..(496): unsure at all Xaa locations
  Clone ID: PAT_MRT4577_159885C.1.pep
FCFALQFRPSSSHDTTVTTTNAGAPVWNDNEALTVGPRGPILLEDYHLIEKVAHFARERIPERVVHARGASAKGFFECTHDVTSLTCADFLRAPGVRTPVIVRFSTVIHERGSPETIRDPRGFAVKFYTREGNWDLLGNNFPVFFIRDGIKFPDVIHAFKPNPRSHVQEYWRVFDFLSHLPESLHTFFFLFDDVGVPSDYRHMEGFGVNTYTFVSAAGKAQYVKFHWKPTCGVRCILTDEEAALVGGRNHSHATQDLYDSIAAGSFPEWTLYVQVMDPDTEEQYDFDPLDDTKTWPEDLLPLRPVGRLVLDRNVDNFFNENEQLAFGPGLVVPGIYYSDDKMLQCRVFAYADTQRYRLGPNYLMLPVNAPRCAHHNNHYDGAMNFMHRDEEVDYYPSRHAPLRQAAPAHXPLPPRPVAGRREKATIRKPNDFKQPGERYRSWDADRQDRFVRRFADSLGHPKVSQELRSIWIDLLAKCDASLGMKIATRLNMKPNM

SEQ ID NO: 4919 - protein, 497 aa, Zea mays
  unsure (1)..(497): unsure at all Xaa locations
  Clone ID: PAT_MRT4577_159887C.1.pep
ITMDPTKFRPSSSHDTTVTTTNAGAPVWNDNEALTVGPRGPILLEDYHLIEKVAHFARERIPERVVHARGASAKGFFECTHDVTSLTCADFLRAPXGVRTPVIVRFSTVIHERGSPETIRDPRGFAVKFYTREGNWDLLGNNFPVFFIRDGIKFPDVIHAFKPNPRSHVQEYWRVFDFLSHLPESLHTFFFLFDDVGVPSDYRHMEGFGVNTYTFVSAAGKAQYVKFHWKPTCGVRCILTDEEAALVGGRNHSHATQDLYDSIAAGSFPEWTLYVQVMDPDTEEQYDFDPLDDTKTWPEDLLPLRPVGRLVLDRNVDNFFNENEQLAFGPGLVVPGIYYSDDKMLQCRVFAYADTQRYRLGPNYLMLPVNAPRCAHHNNHYDGAMNFMHRDEEVDYYPSRHAPLRQAAPPTPLPPRPVAGRREKATIRKPNDFKQPGERYRSWDADRQDRFVRRFADSLGHPKVSQELRSIWIDLLAKCDASLGMKIATRLNMKPNM

SEQ ID NO: 4920 - protein, 121 aa, Zea mays
  unsure (1)..(121): unsure at all Xaa locations
  Clone ID: PAT_MRT4577_160252C.1.pep
ILLYLSATGFTGTMSPQCSQATIASLLPPYLSPPESSVCXNPILQPYKIQQAITAGILPLSPXLSLQQSSTLLHHLPSMHXLSQNISPQQLQQLCLTYLATYSQQQHFLSFNQLASFNSAS

SEQ ID NO: 4921 - protein, 48 aa, Zea mays
  Clone ID: PAT_MRT4577_160263C.1.pep
GAGHRDVDDGYGGVDDYGDGDGYGGGDAGFAGGNRDDGYRNSHGNWSN

SEQ ID NO: 4922 - protein, 106 aa, Zea mays
  Clone ID: PAT_MRT4577_160335C.1.pep
NKMVVRRLRRWLLCRRIRQLRRALEKMTGGARSTKLSCVASVLFTIVQSVYGRWYRVCCCPSVFLIQGRPVSVVSNVFILRLPADPRIGQHGLRIDGACYPRQALL

SEQ ID NO: 4923 - protein, 165 aa, Zea mays
  Clone ID: PAT_MRT4577_160418C.1.pep
MSSSGPLLATGTHHTGRQPEVLWAQRSEKIFLTISLPDAKDVVLKTDPKGLFNFSAVVHGEPFSFTLELFDSILSEGSKTKTKMGLRNIICSIQKEKKGWWKRLLKSEEKHPYIKVDWNKWCDEDEESEFSGDSDGGFDEANEGDESDDDDGMLYLPDLEKLRGK

SEQ ID NO: 4924 - protein, 481 aa, Zea mays
  unsure (1)..(481): unsure at all Xaa locations
  Clone ID: PAT_MRT4577_160568C.1.pep
MATTRPRGGGGAASGALVMAIVVLLLLPPYGAGAEECEDGGISSRARAGDRVEALPGQPAVAFAQYSGYVAVDRDRGRALFYWLTEAVGDDAAAKPLVLWLNGGPGCSSVAYGASEEIGPFRIKPNGTGLFLNKYSWNREANLLFLESPAGVGFSYANTTSDLKTSGDERTAQDALQFLVSWMSRFPQYRHRDFYIAGESYAGHYVPQLARKIVEYNEASPHPFINLKGILVGNAETGNYYDNIGTVTYWWTHAMISDRTYKAILRWCNFSSSSISRPCNRAMSYAMNHEFGDIDQYSIYTPSCAAXXARANATVLRFKNTLVRRRRSSGYDPCTETYAERYYNRMDVQRAMHANTTGIPYRWTACSDVLIKTWQDSEFSMLPTYKKLMKAGLRIWVFSGDTDSVVPVTATRFAISHLGLKIKTRWYPWYSAGQVGGWSEVYEGLTFASVRGAGHEVPLFQPRRAFRMFRSFLAGEPLPKS

SEQ ID NO: 4925 - protein, 378 aa, Zea mays
  Clone ID: PAT_MRT4577_160779C.1.pep
MSAATACMPLVLDPSPLHGSAAMADAVERRQPGGMETTKTGSEGTLGRVVRSQVFGNEDDDRAGHGDGDEVSKPRAVVHTLTCERKPLFEGFALWRSIGRPELPELDPILSFDEFEFSAPAGFLDHPHRGFENVTYMLEAASGGISYHDFSGHKGTINPGDVQWLTAGRGVVHAEMPAAGQGVQRGINIWINLSAADKMVEPRYQDLASHDIPAAAADAAGGVSVKVIAGECLGARSPLRPRTPALCLDVALRPGARLRQPVPRGWSACAYVIHGEAAFGTASGEGNGASTATARTLVVFGGDGDGVELRGDAAGQGARVMLVAARSHGEAVARDGPFVMNTREEVDQAREDYRHRRNGFEMADGWTSDHASAAEKHS

SEQ ID NO: 4926 - protein, 260 aa, Zea mays
  Clone ID: PAT_MRT4577_160794C.1.pep
MFPPGLIHHRPDAPVPGDGATRSGPGGPSLVLTADPKPRLRWTADLHERFVDAVAQLGGPEKATPKTILRTMGVKGLTLFHLKSHLQKYRLGKQSGKEGSEQSKDASYLLDAQSGMSVSPRVPAQDMKESQEVKEALRAQMEVQRRLHEQVEVQKRVQIRMEAFQKYIDSILESACKMVTEQFASSGFSISDPDLPEISPGGVVMCGGPTDTLSSSVFNQLSVSSIGSHSPGGKPSPSPSGMECPPLLLHKSHELKRRSS

SEQ ID NO: 4927 - protein, 446 aa, Zea mays
  unsure (1)..(446): unsure at all Xaa locations
  Clone ID: PAT_MRT4577_160925C.1.pep
MATRNHRAAAAPQPANRGAARVAGKQKAAAAGTRRALGDIGNVVSDALDRAIKLPEGIHRPITRSFGAQLMKAALANKNADAAVAPAQPVAARAVTKPARKVTTKNVPRPGAGQAPKENKKPSAEGAAAGSGRSVQKNRRKKPACTLSTVLSARSKAACGLTEKPKEPIEDIDKFDGDNQLALVDYVEDIYTFYKTAQHESRPIDYMGNQPELSPRMRSILADWLIESHRRFQLMPETLYLTIYIVDRYLSLQPTPRRELQLVGVAALLIACKYEEIWAPEVNDLIHIADGAFNRSQILAAEKAILNSMEWNLTVPTPYHFLLRFAKAAGSADEQLQHTINFFGELALMDYGMVMTNPSTAAACAVYAARLTLGRSPLWTETLKHHTXPQRAADHGRXAKTLVGSHAASASPDXARLKAVYQKYATEQFGRVALHPPAPTALPDLV

SEQ ID NO: 4928 - protein, 128 aa, Zea mays
  unsure (1)..(128): unsure at all Xaa locations
  Clone ID: PAT_MRT4577_160953C.1.pep
LRAQHIRAQHLQQLVLANLXAGYSQHQRVVTFNQLGPWNYASNAQLLQLQFRQLPAAYREQFLAFNHLTALNSAAYIQQLQLLPFKQLAGVSPATFLTHPQSLPIYHHVXPNAGTLLQVQQSLPFNQL

SEQ ID NO: 4929 - protein, 97 aa, Zea mays
  unsure (1)..(97): unsure at all Xaa locations
  Clone ID: PAT_MRT4577_160962C.1.pep
CRRRRSLHSCSPAVFCGGRLPEPVRCSCALSSRAATCDSGEIGSAAASGSRTAAGPGRCGGKGTGRWRSKPAHSLTPTADHPNRTRRRRRYGLLWXR

SEQ ID NO: 4930 - protein, 79 aa, Zea mays
  Clone ID: PAT_MRT4577_160976C.1.pep
RCSARCLYSYWEEHSKCLTDDYMMLDSLAADLNTEERPYILSLVPSYKGTSSLKLGAVIGPSTGHLAKEAGDVVSLDFI

SEQ ID NO: 4931 - protein, 73 aa, Zea mays
  Clone ID: PAT_MRT4577_161126C.1.pep
RTVTQLLSWYIMGGCCRCWCITSEAVRARARADIYDQQYVDEQESWASIFDGSYSASAIVALYTNMDTFTPDT

SEQ ID NO: 4932 - protein, 558 aa, Zea mays
  Clone ID: PAT_MRT4577_161280C.1.pep
MHAVYELFERMAYYGISSNLIIYLTDKLHQGTVEASNNVTNWSGTVFLTPLLGAYVADAYLGRYWTFVVGSAIYLLGMVLLVLSVSVPALKPPPCGAGGVCPQASALQLGAYFGGLYIVALGNGGTKPNISTIGADQFDEFDPRERTHKLSFFNWWMFTIFLGILFSSTVLVYLQDNVSWSVGYGIPTLGLMVSISVFLAGTRLYRHRVPQGSPFTSMGRVLAAALWKWSVPVPADAKELHELDVEEYARKRRFRMDSTDAMAFLNKAAAVAVPSGGPASTPAWSLCTVTQVEETKQILRLVPLLVAMIVPCTLIAQTNTLFVKQGTTMDRHMGPRFEIPAASLGAFVTLTMLVAVVVYDRVFVRAVRRYTKDPRGITILRRMGTGMLLQVATMAVASAIESRRLAYARSHGLDATGGQLGLTIFALLPQFVLMGLADAFLVVGKIEFFYDQAPESMKSLGTAMSLTAYGIGNFLSSFLLSTVTRVTRDRGHAWVTNNLNASNLDYYYAFLTALGAVNFVAFLALSARYRYKAQSTDTIDAAVGLGTEKAKLQAEPLG

SEQ ID NO: 4933 - protein, 176 aa, Zea mays
  unsure (1)..(176): unsure at all Xaa locations
  Clone ID: PAT_MRT4577_16136C.1.pep
MALRTLASKNALSFALGGAARPSAASARGVTTVALPDLSYDFGALEPAISGEIMRLHHQKHHATYVANYNKALEQLDAAVAKGDASAVVQLQGAIKFNGGGHVNHSIFWKNLKPISEGGGEPPHGKLGWAIDEDFGSFEALVKRMNAEGAALQGSGWVWLALDKRXKKLSVETTAN

SEQ ID NO: 4934 - protein, 100 aa, Zea mays
  unsure (1)..(100): unsure at all Xaa locations
  Clone ID: PAT_MRT4577_161386C.1.pep
PAGPGLPSPSSPVPFPHLHRSDSRVLPPLPAWRSLCEKTSCGREYNVKDLSQEDFRRLQIELXEVEMPGLMACRVKIGPSKTFIDDRISMSLHMTIHTSD

SEQ ID NO: 4935 - protein, 61 aa, Zea mays
  Clone ID: PAT_MRT4577_161406C.1.pep
LLGGSWMLSRRRIEGSMSKTGFWCRSASEFFFLYISLRTRSCPLVISQTTLLAPIMPSLNM

SEQ ID NO: 4936 - protein, 79 aa, Zea mays
  unsure (1)..(79): unsure at all Xaa locations
  Clone ID: PAT_MRT4577_161669C.1.pep
MVLSIENTWAGREYKVKDLSQADLRRLEIELAEVEMPSLMACRTXFSPTKPFASARISGSIHMTIQTGVLIETLSRLGA

SEQ ID NO: 4937 - protein, 369 aa, Zea mays
  Clone ID: PAT_MRT4577_161720C.1.pep
MAMMVDPPNGMASQGKHYYTMWQTLFEIDTKYVPIKPIGRGAYGIVCSSVNRETNEKVAIKKINNVFDNRVDALRTLRELKLLRHLRHENVIALKDIMMPAHRRSFKDVYLVYELMDTDLHQIIKSSQPLSNDHCQYFLFQLLRGPKYLHSAGILHRDLKPGNLLVNANCDLKICDFGLARTNNTKGQFMTEYVVTRWYRAPELLLCCDNYGTSIDVWSVGCIFAELLGRKPIFPGTECLNQLKLIVNVLGTMGEADLAFIDNPKARKYIKSLPYAPGAPFTGMYPQAHPLAIDLLQKMLVFDPSKRISVTEALEHPYMSPLYDPSANPPAQVPIDLDIDENLGVDMIREMMWQEMIHYHPEVLTRISM

SEQ ID NO: 4938 - protein, 369 aa, Zea mays
  Clone ID: PAT_MRT4577_161721C.1.pep
MAMMVDPPNGMASQGKHYYTMWQTLFEIDTKYVPIKPIGRGAYGIVCSSVNRETNEKVAIKKINNVFDNRVDALRTLRELKLLRHLRHENVIALKDIMMPAHRRSFKDVYLVYELMDTDLHQIIKSSQPLSNDHCQYFLFQLLRGLKYLHSAGILHRDLKPGNLLVNANCDLKICDFGLARTNNTKGQFMTEYVVTRWYRAPELLLCCDNYGTSIDVWSVGCIFAELLGRKPIFPGTECLNQLKLIVNVLGTMGEADLAFIDNPKARKYIKSLPYAPGAPFTGMYPQAHPLAIDLLQKMLVFDPSKRISVTEALEHPYMSPLYDPSANPPAQVPIDLDIDENLGVDMIREMMWQEMIHYHPEVLTRISM

SEQ ID NO: 4939 - protein, 74 aa, Zea mays
  Clone ID: PAT_MRT4577_16178C.1.pep
KKKNKKKKLNKKKKKKKKRKGKKKKKKKKKKKKKKKKKKKKKKKKKRGAPFKEPNFTSPSFQNKSFFKGPPNLN

SEQ ID NO: 4940 - protein, 407 aa, Zea mays
  Clone ID: PAT_MRT4577_161959C.1.pep
MASLCDFCGKQRSMIYCRSDAASLCLSCDRNVHSANALSRRHTRTLLCDRCGSQPASVRCLEDNASLCQNCDWNGHDAESGASGHKRQAINCYSGCPSSAELSRIWSFITDIPTVAAEPNCEDGLSMMTIDDSDVTNHHGASDDKRLLEIANTALMSDPPSPDKLKSPTGSSSGDGFDVMTLATDQPAGPVSATPKVPNARDDDKFNDGMYEDLCVDDADLTFEDYEELFGTSHIRTEELFDDAGIDGYFELKETPPFYFNEQPKAMQIECGNVVSADCAMSNPGARADSSLCIPVRQVRSSISHSLSGLTGESSAGDHHDCGVSPMLLMGEPPWHSPGGPEGSVAGGSRDSALTRYKEKKKRRKFDKKIRYASRKARADVRKRVKGRFIKAGEAYDYDPLSQTRSY

SEQ ID NO: 4941 - protein, 364 aa, Zea mays
  Clone ID: PAT_MRT4577_161960C.1.pep
MVPLCGFCGKQRSMIYCRSDAASLCLSCDRSVHSANALSRRHRRTLLCDRCGLQPASVRCLEDNTSLCQNCDWNGHDAASGASGHKRQAINCYSGCPSSAELSRIWSFIIDIPTVAAEPNCEDGLSMMTIDDSDVTNHHGASDDKRLLEIANTALMSDPPSPDKLKPLIGSSSGDGFDVLPLATDQPAGPVSATPKVPYARDDNKFNDGMYEDLCVDDADLTFENYEELFGTSHIRIEELFDDAGIDSYFEMKETPPFDFNEQPKIVQLQCSDVVPADCAMSNPGERADSSLCIPVRQVRSSISHPLSGLTGESSAGDHQDCGVSPILLMGEPPWHSPGPEGSLAGGSRDSALTRYKEKKKRRM

SEQ ID NO: 4942 - protein, 108 aa, Zea mays
  unsure (1)..(108): unsure at all Xaa locations
  Clone ID: PAT_MRT4577_162088C.1.pep
TAPRSTDRWNHSXGXSLVXWPRTWPXAACSRRRXSXVXATCVSSGWXIIKKXLMXPLVIIRXVSXRSSSSXSCTSYVTCXSTYYXSRAXXQXXWXCFAGSLFSSCVAF

SEQ ID NO: 4943 - protein, 154 aa, Zea mays
  unsure (1)..(154): unsure at all Xaa locations
  Clone ID: PAT_MRT4577_162166C.1.pep
GTQPAALPHTKPGGGLPQDRGAGEAQPPPQPPGPAADDAAASGGERQAARDRAQQHRTGGRRPAEKKAGAAETAAAAAAANGKAXXHAAKGPGXATPXEAXEKGPREKXXXXTXXNNGXGXNKPXXXATXXXXPSXPTXXQXXHRXPXTHXGDE

SEQ ID NO: 4944 - protein, 495 aa, Zea mays
  Clone ID: PAT_MRT4577_16218C.1.pep
MTMDPTKFRPSSSHDTTVTTTNAGAPVWNDNEALTVGPRGPILLEDYHLIEKVAHFDRERIPERVVHARGASAKGFFESTHDVTSLTCADFLRAPGVRTPVIVRFSQVIPEPGSGRTIRDARGFAVKFYTREGNWDLLGNNFPVFFIRDGIKFPDVIHAFKPNPRSHVQEYWRVFDFLSHLPESLHTFFFLFDHVGVPSDYRHMEGFGVNTYTFVSAAGKAQYVKFHWKPTCGERSILTDEEARVGGRNHSHTQDLYDSIAAEGSFPEWTLYVQVMDPAQQEQYDFDPLDDTKTWPEDLLPLRPVGRLVLDRNVDNFLNENEQLAFGPGLVVPGIYYSDDKMLQCRVFAYADTQRYRLGPNYLMLPVNAPRCGTHNNHYDGAMNLMHRDEEVDYYPSRHARRCGRAAPTPLPPRPVAGRREKATIRKPNDFKQPGERYRSWDADRQDRFVKAIRRLARTPKRQPELRSIWIDLLAKVDASLGMKIATRLNMKANM

SEQ ID NO: 4945 - protein, 130 aa, Zea mays
  unsure (1)..(130): unsure at all Xaa locations
  Clone ID: PAT_MRT4577_162288C.1.pep
MEDDKKEGKYRGVRKRPWGKFAAEIRDPERGGSRVWLGTFDTAEEAARAYDRAAFTMKGATAVLNFPTXEDQLPRLPAAGPAXGSSSSTTSSAPASRGRARVPDSEKVELECLDDRVLEELLAEDKYNKN

SEQ ID NO: 4946 - protein, 371 aa, Zea mays
  Clone ID: PAT_MRT4577_162559C.1.pep
MSARDRETAEALVRLAASLDGAVLGLGTAAVAVASWVKYLAVSGQLRLVASATTASIADAHSLLSGDGAEPRIAAVRGYVRAHDKFFRAPFSGEAGVVTKHTQMCLFTEWRGIFGWTFDLHALLFRSWKEQIVTSFRSVPFVLVSTELGNPTGVVHINVDKADQPLPLTTVFHKLIPLETTPYTLFQTIIGNGYPIALLDEEKILPIGKKITAIGLCQAKDAESVEITSCPESPFFLSELTKDEMQAQLASRARILFWGSIVLGTLSVCLVGHAIYRGWTRIKLRREARHARQMFEEAEDAIHRDDSSDDDEIGDGQLCVVCLRKRRRAAFIPCGHLVCCSECALTIERTPHPLCPMCRQDIRYMMRVYDS

SEQ ID NO: 4947 - protein, 93 aa, Zea mays
  Clone ID: PAT_MRT4577_162639C.1.pep
KKDLLTGTYMPSTSLTGIYRVITYLDPSEHIHTKAKQLHFTLMRSRNDDVIPTFRSNFFSLFATADAEHAKGGKAEFNKLNDVTSFDFIGDAY

SEQ ID NO: 4948 - protein, 507 aa, Zea mays
  unsure (1)..(507): unsure at all Xaa locations
  Clone ID: PAT_MRT4577_162655C.1.pep
MVSERQQAAGKVAAFNLTEAGFGDGSDLLDDDGRERRTGTLVTASAHIITAVIGSGVLSLAWAIAQLGWVIGPVVLLAFSAITWFCSSLLADCYRAPPGPGQGKRNYTYGQAVRSYLGESKYRLCSLAQYVNLVGVTIGYTITTAISMGAIKRSNCFHSRGHGADCEASNTTNMIIFAGIQILLSQLPNFHKLWWLSIVAAVMSLAYSSIGLGLSIAKIAGXHAWQLLYVRSISHSESRLLIDXGGVHVKTSLTGAAVGVDVTAAEKVWKTFQSLGDIAFAYTYSNVLIEIQDTLRSSPPENVVMKKASFIGVSTTTAFYMLCGVLGYAAFGSDAPGNFLTGFGFYDPFWLIDVGNVCIAVHLVGAYQVFCQPIYQFVEAWARGRWPDCAFLHAELAVVAGSSFTASPFRLVWRTAYVVLTALVATVFPFFNDFLGLIGAVSFWPLTVYFPIQMYMAQAKTRRFSPAWTWMNVLSYACLFVSLLAAAGSVQGLVKDLKGYKPLFKVS

SEQ ID NO: 4949 - protein, 65 aa, Zea mays
  unsure (1)..(65): unsure at all Xaa locations
  Clone ID: PAT_MRT4577_162693C.1.pep
FGFLMLLGLPAIAATATIFPQXRKLPIVSLLPRYXNQGWSSXVCENPILQPYRIHQAFEVGILPL

SEQ ID NO: 4950 - protein, 39 aa, Zea mays
  Clone ID: PAT_MRT4577_162739C.1.pep
RPQRHHMPYFFFFRRKSIVVAISKTCVSPWDQADELTYF

SEQ ID NO: 4951 - protein, 491 aa, Zea mays
  Clone ID: PAT_MRT4577_162877C.1.pep
MAPSPPRRAALLLATVLLLAAAGSTPGATAAGIFQVRRKFTAGVGGGAGANISALRAHDGTRHGRLLAAADLPLGGLGLPTDTGLYYTEIKLGTPPKHYYVQVDTGSDILWVNCITCEQCPHKSGLGLDLTLYDPKASSTGSMVMCDQAFCAATFGGKLPKCGANVPCEYSVTYGDGSSTIGSFVTDALQFDQVTRDGQTQPANASVIFGCGAQQGGDLGSSNQALDGILGFGEANTSMLSQLTTAGKVKKIFAHCLDTIKGGGIFSIGDVVQPKVKTTPLVADKPHYNVNLKTIDVGGTTLQLPAHIFEPGEKKGTIIDSGTTLTYLPELVFKEVMLAVFNKHQDITFHDVQGFLCFQYPGSVDDGFPTITFHFEDDLALHVYPHEYFFANGNDVYCVGFQNGASQSKDGKDIVLMGDLVLSNKLVIYDLENRVIGWTDYNCSSSIKIKDDKTGATSTVNSHDLSSGWKFHWHMSPVLLLVTTVCSYLIC

SEQ ID NO: 4952 - protein, 317 aa, Zea mays
  Clone ID: PAT_MRT4577_163021C.1.pep
MAATVSSFPVVNMEKLETEERATAMEVIRDGCENWGFFELLNHGISHELMDEVERLTKAHYATFREAKFQEFAARTLEAGEKGADVKDVDWESTFFVRHLPASNLADLPDVDDRYRQVMEQFASEIRKLSERLLDLLCENLGLEPGYLKAAFAGSDGPTFGTKVSAYPPCPRPDLVDGLRAHTDAGGIVLLFQDDQVSGLQLLRGGEGGDVPAIRHAIVANVGAGLGVITTGPCTGVMHPVLTRPDGHRMSGPSCPNPRAGALVRRGPALVGAAQERRGEAPHPRFVLEDYMNLYVRHKFEAKEPRFEAMKSAIATA

SEQ ID NO: 4953 - protein, 319 aa, Zea mays
  Clone ID: PAT_MRT4577_163023C.1.pep
MAATVSFPVVNMEKMETEEKATAMEVIRDACENWGFFELLNHGISHELMDEVERLTKAHYANFREAKFQEFAARTLEAGDKGADVKDVDWESTFFVRHLPASNLADLPDVDDHYRQVMKQFASEIQKLSEKLLDLLCENLGLEPGYLKSAFAGSNGPTFGTKVSAYPPCPRPDLVDGLRAHTDAGGIILLFQDDQVSGLQLLKDGEWVDVPPMRHAIVVNIGDQLEVITNGRYKSVMHRVLTRPDGNRMSIASFYNPGADAVIFPAPALVGAAGAEEERAGQARYPRFVFEDYMNLYVRHKFEAKEPRFEAMKSAIATA

SEQ ID NO: 4954 - protein, 323 aa, Zea mays
  Clone ID: PAT_MRT4577_163024C.1.pep
MAATVSFPVVNMEKLETEERDTAMAVIRDACENWGFFELLNHGISHELMDEVERLTKAHYATFREAKFQEFAARTLAAAGDEGADVSDVDWESTFFVRHLPASNLADLPDVDDHYRQVMKQFASEVQKLSEKVLDLLCENLGLEPGYLKAAFAGSDGGPTFGTKVSAYPPCPRPDLVAGLRAHTDAGGLILLLQDDQVSGLQLLRGGDGGEWVDVPPLRHAIVANVGDQLEVVTNGRYKSAVHRVLARPDGNRMSVASFYNPGADAVIFPAPALVGEEERAEKKATTYPRFVFEDYMNLYARHKFEAKEPRFEAMKSSAIATA

SEQ ID NO: 4955 - protein, 318 aa, Zea mays
  unsure (1)..(318): unsure at all Xaa locations
  Clone ID: PAT_MRT4577_163025C.1.pep
MAATVSSFPVVNMEKLETEERATAMEVIRDGCENWGFFELLNHGISHELMDEVERLTKAHYATFREAKFQEFAARTLEAGEKGADVKDVDWESTFFVRHLPASNLADLPDVDDRYRQVMEQFASEIRKLSERLLDLLCENLGLEPGYLKAAFAGXSDGPTFGTKVSAYPPCPRPDLVDGLRAHTDAGGIVLLFQDDQVSGLQLLRGGEWVDVPPMRHAIVANVGDQLEVITNGRYKSVMHRVLTRPDGNRMSVASFYNPGADAVIFPAPALVGAAEEDRAEAAYPSFVFEDYMNLYVRHKFEAKEPRFEAMKSAIATA

SEQ ID NO: 4956 - protein, 226 aa, Zea mays
  Clone ID: PAT_MRT4577_163140C.1.pep
METVVGDLMATELRLGLPGTVDDCSQPQLVKATPPSTPRGKRRATADAVEEAAGAEEASKRDAETAPPAAKAPVVGWPPVRSYRKSCFQQASSKQAAAAKQEAAAAAPGCTASSAAATNTTSSSSAAVVVGSFVKVSMDGAPYLRKVDLRMYRGYRELREALEAMFVSSSSANNLSEFAVTYEDKDGDLMLVGDVPFEMFASTCKKLRIMKRSEATGLGSSSARQQ

SEQ ID NO: 4957 - protein, 122 aa, Zea mays
  Clone ID: PAT_MRT4577_163214C.1.pep
MAVKGGKGLLAAKTTGAKSTDRDKDRKKAPVSRFSRAGLKFRGGRIHRQLKSGAFAHGRVGATAAVYSAAILEYLTAEVLELAGNASRDLKVKRITPRHLKLAIRGDEELDTLIKGTIAGGG

SEQ ID NO: 4958 - protein, 54 aa, Zea mays
  Clone ID: PAT_MRT4577_163449C.1.pep
RQPRHRGREQVHHRGAPLGHPGARGAPPAGRTQGAHIGRNIALRAMQADARTGA

SEQ ID NO: 4959 - protein, 168 aa, Zea mays
  Clone ID: PAT_MRT4577_163452C.1.pep
MAEKKMVTLRSSDHEEFEVEEAVAMKSEIIRLLIEDDCADNAIPLPNVDSKTLALVIEYCNKHVHAVAADDSAAAETSNASSAAGGGDVDLKKWDAEFVKVEQATLFDLILAANYLDIKGLLDLTCQTVADMMKGKSPEEIRRTFNIKNDFTEEEEEEIRRENSWAFD

SEQ ID NO: 4960 - protein, 164 aa, Zea mays
  Clone ID: PAT_MRT4577_163642C.1.pep
PLFLQQSSALLQQLPLVRLLAHNIRAHHIHHLVLANLVAYSQQQQCLPFTQLDALSSASYMHHHHLPFRQLSVAYPQQFLPFTHLSALSSLAYLQQHHLLPLRQLDGVSPVTFLTHPQLWPFYQRAAPIAGTLLHLHHLLPLTQLALSNPPAFYHHPITGGALS

SEQ ID NO: 4961 - protein, 109 aa, Zea mays
  unsure (1)..(109): unsure at all Xaa locations
  Clone ID: PAT_MRT4577_163700C.1.pep
PAGARIGLSRTYLLYYTLGSDTTAIGRPCSALFXLPGXCASATSGDHIPGXHLPPVMXLGTLXPWLQYXMMQQELGSLMACPCLMLQQLXLAYPLQSMAVXMMPQMMTP

SEQ ID NO: 4962 - protein, 135 aa, Zea mays
  unsure (1)..(135): unsure at all Xaa locations
  Clone ID: PAT_MRT4577_163757C.1.pep
MAARGKAIGAGAAKKASLRSSKAGLQFPVGRIARVLKAGKYAERVCAGAPAYLAAVLEYLAAEVLXELAGNAARDTKKTRIVPSHIQLAVRNNQELTKLLCGATITSGGVMPNIHQHLLPKKAAYSKATVLYVHN

SEQ ID NO: 4963 - protein, 134 aa, Zea mays
  Clone ID: PAT_MRT4577_163759C.1.pep
MAGRGKAIGAGAAKKATSRSSKAGLQFPVGRIARFLKAGKYAERVGAGAPVYLAAVLEYLAAEVLELAGNAARDNKKTRIVPRHIQLAVRNDEELTKLLGGATIASGGVMPNIHQHLLPKKAASSKASVDDDDN

SEQ ID NO: 4964 - protein, 672 aa, Zea mays
  Clone ID: PAT_MRT4577_163763C.1.pep
MDQLRPEPAAGAHEIEKTAAPDVESEPAAAVPEPERVPPWREQVTARGMVAALLIGFVYTVIVMKLSLTTGLTPTMNVSAALLAFLALRGWTRALGRLGIACRPFTRQENTVVQTCVVACYTIGFGGGFGSFLLGLDKKTYELSGVSTPGNVPGSYREPAIGWMTGFLLAVSFVGLLTLLPLRKVLVIDYKLTYPSGTATAVLINGFHTPQGDKNAKIQVRGFLKYFGISFLWSFFQWFYTAGDHCGFAQFPTFGLQAFNQTFSFDFSLTYVGAGMICSHLVNLSLLFGAVVSWGVMWPLIGKQKGNWYPADASQNSMTGIYGYKAFLCIALLVGDGLYNFVKVIAITVKNIRERSRRKNLNRVADADTMALDDMQRDEVFNRDNIPTWLSYAGYAALSLIAVIAIPIMFREVRWYYVVVAYALAPALGFCNAYGTGLTDMNMGYNYGKIALFVLAAWAGKDSGVVAGLVGCGLVKQLVLVSADLMHDFKTGHLTLTSPRSMLVGQAVGTLMGCVLAPLTFMLFYRAFDVGEPDGYWKAPYALIYRNMAILGVEGFSALPRHCLQLCAGFFAFAVLANLARDLLPRRLARLVPLPMAMAVPFLVGASFAVDMCVGSLVVFAWHKLDGKKAALLVPAVASGLICGDGIWTFPSSLLALAKVKPPICMKFTPGS

SEQ ID NO: 4965 - protein, 68 aa, Zea mays
  Clone ID: PAT_MRT4577_164044C.1.pep
GSVEGQWGAADVEYRCFVGGLAWATIIESLENAFASYGKILDFKVYTDRQTGGSRGLGYGTFFYVNSM

SEQ ID NO: 4966 - protein, 70 aa, Zea mays
  unsure (1)..(70): unsure at all Xaa locations
  Clone ID: PAT_MRT4577_164214C.1.pep
GKNNGSEKENLAGRAPPVNSSSSRGELPKPPPRVPPPKPPPPPPEPPAPPKPPPPPAKPPPPXXPPPPKP

SEQ ID NO: 4967 - protein, 67 aa, Zea mays
  Clone ID: PAT_MRT4577_164249C.1.pep
GVTRLTGVIVQSLQSDKEVFLHERVSNASGAGEMLGFGSVSGASVLDDGGELVIVSEPDLEAGTITI

SEQ ID NO: 4968 - protein, 159 aa, Zea mays
  Clone ID: PAT_MRT4577_164254C.1.pep
MSRCKPVGGESPAADGPDPRRPMSETPCSVQPGVLPLLGKPYFTCILCKSHVNQPFQVVVPKSLAPFLPGTTVPATVTWHGRSWEMRFTGGRQIQRLEAGWRGFALDNGLKLGDGCVFELVDGRAERVVFRVQVLRADIPAEIRERAGGYTSSSPILID

SEQ ID NO: 4969 - protein, 323 aa, Zea mays
  Clone ID: PAT_MRT4577_164353C.1.pep
MAAGRELVVSFGEMLIDFVPTVAGVSLAEAPAFLKAAGGAPANVAIAVSRLGGGAAFVGKLGDDEFGRMLAAILRDNGVDGGGVVFDAGARTALAFVTLRADGEREFMFYRNPSADMLLTADELNVGLIRRAAVFHYGSISLIAEPCRTAHLRAMEIAKEAGALLSYDPNLREALWPSREEARTQILSIWDQADIVKVSEVELEFLTGINSVEDDVVMKLWRPTMKLLLVTLGDQGCKYYTRDFHGAVPSFKVQQVDTTGAGDAFVGALLRRIVKDPSSLQDEKKLVESIKFANACGAITATKKGAIPSLPTETEVLQLIEKA

SEQ ID NO: 4970 - protein, 85 aa, Zea mays
  unsure (1)..(85): unsure at all Xaa locations
  Clone ID: PAT_MRT4577_16442C.1.pep
KSQSHSSESINKEIEAAHMEALYKEVQAATRDDLSVVKSTKQPPKXHKRYIPKKLTYEQSKAILIERLNQLTSSGGADIDAEDDE

SEQ ID NO: 4971 - protein, 160 aa, Zea mays
  unsure (1)..(160): unsure at all Xaa locations
  Clone ID: PAT_MRT4577_164467C.1.pep
MSDSEEHHFESKADAVASKTYPQQDGTARKNGFIGIRNRPCKGAEVSTSRSGKHGHAKCHFAAIYIFNGRKLEXIVPSSHNXDIPHVNRTEHQXIDISXDGFVSLLTSDGNTKDDRTLPTDDTLVAQIKEGFDSGKDLVETVQSAMGEEQICALNDAAPK

SEQ ID NO: 4972 - protein, 161 aa, Zea mays
  unsure (1)..(161): unsure at all Xaa locations
  Clone ID: PAT_MRT4577_164472C.1.pep
MSDSEEHHFESKADAGAPKTYPHKAGTVRKNGFIVIMNRPCHDVEASTSKTAKHGHAKCHFXVAIDIFNGNELEQIVPSSHNWDIPHVNRTEYQLIDISEDGFASLLTSXGSTKDDLRLPTDETLVAQIREGFQSXKDLVETVQTAMGEEHICAMKDVGPK

SEQ ID NO: 4973 - protein, 193 aa, Zea mays
  unsure (1)..(193): unsure at all Xaa locations
  Clone ID: PAT_MRT4577_164476C.1.pep
VRRSRRSQSIAIRPLFSPCSSASFLIQPTQGSPCRDSEEHHFESKADAGASKTYPQQAGCARRNGFIAIKNRPCKAVEASTSXTGKHGHAKCHFVAIDIFNGKKLEDIVPSSHDCDITHVNRTDYHLIDISEDEFVSLLTSHGYTNDDVILPSDETLVRQIQERLESEKDLVVTDQSAMGEVHICALNDVGPK

SEQ ID NO: 4974 - protein, 151 aa, Zea mays
  unsure (1)..(151): unsure at all Xaa locations
  Clone ID: PAT_MRT4577_164477C.1.pep
SKADVGSLKTYPYXVGTVRKNGFIIINNRPCEVVEVSTSKTGKHGHAKCHFVAIDIFNGKKLEDIVPSSHNCDIPHESRTDYHVIDISKDGLVILLTSHGNTKDDLRLPSDXTLVVQIXEGFESGKDLDVTVXQFAMGEEQICALNDDAPK

SEQ ID NO: 4975 - protein, 197 aa, Zea mays
  unsure (1)..(197): unsure at all Xaa locations
  Clone ID: PAT_MRT4577_164479C.1.pep
PDKPGIAVSDSEEHHFKSKADAGSSKTYPQQDGTVRKNGFIDIKNRPCKVVEVSTSKTGNHGHAKCHFVDIDIFDGKKLQDIVPSSRDCDIPHENRTEYQLIDISXDGFESLLTSDGXTNDDLRLPTDETLEAQIKEGVESAKDLVVTVQSAIAEEHICALNDVAPKELPCLAILLSRNLYRIKKRIKDCYRDIHLA

SEQ ID NO: 4976 - protein, 160 aa, Zea mays
  unsure (1)..(160): unsure at all Xaa locations
  Clone ID: PAT_MRT4577_164482C.1.pep
MSDSEENHFKSKADAGXCKTYPEHDGTVRNNGFISIENRPCKDGEVSTXKTGKHGHAECHFVAIDILHGKKLEDIGPSAHNCDIPHVNRTEHQLIDISEDGFVSLLTSDGNTNDDLTLPTDETLVVQIKEGFESGKDLVVTVQSAMGEEHICALKDVGPK

SEQ ID NO: 4977 - protein, 182 aa, Zea mays
  unsure (1)..(182): unsure at all Xaa locations
  Clone ID: PAT_MRT4577_164510C.1.pep
PLSISLLLRLLLEPAKTEHRHVRSSEEHRFESKADAGASKTYPQQGGTGRKNGFIVIKNRPCKVVEVSTSKTGKHGHAKCHFVXAIDIFNGKRLEDIVPSSHNCDIPHANRTEYQLIDISEDGFVSLLTSHGDTRDDLTLPTDETLVDQIEEGFESGKDLAETVQSAMGEEHICALKDVGPQ

SEQ ID NO: 4978 - protein, 101 aa, Zea mays
  Clone ID: PAT_MRT4577_164511C.1.pep
MGGAVMVAIAASIGNLLQGWDNATIAGAVLYIKKEFNLQSEPLIEGLIVAMSLIGATVITTFSGAAADCVGRRPMLVASAVLYFVSGLVMLWAPSVYILLL

SEQ ID NO: 4979 - protein, 173 aa, Zea mays
  unsure (1)..(173): unsure at all Xaa locations
  Clone ID: PAT_MRT4577_164518C.1.pep
MSDSEEDHFXSKADAGASKTYPQQAATDRKNGFIVIKNRXPARSVEASTSETGKHVHAKCHFVAINIFHGKKLEEIVPSSHNXCDIPDVKRTEYQLIEISEDGFESLLTSDGNTKDDLILPTDETLVAHIKEGFEGGKDLVETVQSAMGEEQICALKELAQVLTCLGILYLKT

SEQ ID NO: 4980 - protein, 160 aa, Zea mays
  unsure (1)..(160): unsure at all Xaa locations
  Clone ID: PAT_MRT4577_164521C.1.pep
MSDSEEHDFESKADAGASRTYPQQGATVRKNGFIVIKNRPCKDAEDSTSKTGKHGHPKCHFVTIDLCTGKKLEDIVPSSHNCDIPHVNRTEHQLIDISEDGFVSLLTSDGNTNDELKVPTDETLVAQIKEGFXAIKDLVVTVQSAMGEDQICAMKDVDPK

SEQ ID NO: 4981 - protein, 161 aa, Zea mays
  unsure (1)..(161): unsure at all Xaa locations
  Clone ID: PAT_MRT4577_164523C.1.pep
MWDSEEHHFESRADAGACKTYPQQAGTVRENGVIVIKNRPCGGGEVSTSKTGKHGHAKCHFVAIDIFNGXKKLEDIVPSSHNCDIPHVNRTEYQLIEISEEGFVSLLTSEGNTKEELRLPTDETLVGQIKEGXESGKDLVVTVQSAMGEEXICALKDVGPK

SEQ ID NO: 4982 - protein, 161 aa, Zea mays
  unsure (1)..(161): unsure at all Xaa locations
  Clone ID: PAT_MRT4577_164524C.1.pep
MSDSEEHHLESKADAGASKTYPQQAGTVRKNXGSIGIKNRPCKAAEGPTXKDWXHGHAKCHFAAIDISNGKKLEDIVPSRHNCDIPHENRTEYQVIDISEDGCVSLLTXDGNTKDDLRLPTEETLVAQIKEGIESGKDPVGTVQSAMGEEQICALKDDGPK

SEQ ID NO: 4983 - protein, 155 aa, Zea mays
  unsure (1)..(155): unsure at all Xaa locations
  Clone ID: PAT_MRT4577_164528C.1.pep
EHHFESKADAGASNTYPQHAATGRKNGFIVIKNRPCKVVQVSTSKTGKHGHAKCHFVAINIFSVKKLGDIVPSSHNCDIPYVNRTEYQLIDISEDVFVSLLTSYGNTKDDLRLPTDDTLVVQINESFXSGKDLVVTVQSAMGXEQICALNDVAPK

SEQ ID NO: 4984 - protein, 124 aa, Zea mays
  unsure (1)..(124): unsure at all Xaa locations
  Clone ID: PAT_MRT4577_164542C.1.pep
IAVSDXXEHHFXSKADSGASKTYPHQAGTVRNNCFIVIKNRPCKVVEVSTSNTVNHGHAKCHFVAIDIFNCKKLXDIVPSSHNCDIPHLNRTEYHLIDISXDGFVSLLTSDGNTNDHLILPTDE

SEQ ID NO: 4985 - protein, 179 aa, Zea mays
  Clone ID: PAT_MRT4577_164545C.1.pep
FLLSLLLRLRLIHPRQGSPCTDSEEHHFESKADAGASKTYPQQAGTVRKNGFIVIKNRPCKVVEDSTSYTVKHEHDECHFVAIHIFHAKKIEDIVPSSHNCDIPHVNRTEYQLIDISEDGFVRLLTSDGNTNDDLRLPTDETLVAHIKEGFESGKDLVVTVQSAMGEEQICALKDVGPK

SEQ ID NO: 4986 - protein, 179 aa, Zea mays
  Clone ID: PAT_MRT4577_164549C.1.pep
MSIFLLIRLLMEPAKPGIAMSDSEEHHFESKADSRASKTYPQKAVTVRKNGFIVIKNRPCKDVEVSTSDTVKHGHATCHFVAIDIFNGKKLEDMDPSSHTCDIPHVNRTEYHLIDISYDGFGSLLTSDGNTKDDLKLPTDETLVGQIKEGFESGKDLVVTVQSDMVEEHICALKDVGPK

SEQ ID NO: 4987 - protein, 175 aa, Zea mays
  unsure (1)..(175): unsure at all Xaa locations
  Clone ID: PAT_MRT4577_164554C.1.pep
MRTCSSARQMLLTRLSSVSCSSTAQQLHAGASKTYPQQAGTXVRKNGFIVIKNRPCKVVEVSTSKTGKHGHAKCHFVAIDIFNGKKLEDIVPSSHNCDIPHVNRTEYQLIDISEDGFVSLLTSDGNTKDDLRLPTDETLVAQIKEGFESGKDLVVTVQSAMGEEQICALKDVGPK

SEQ ID NO: 4988 - protein, 52 aa, Zea mays
  unsure (1)..(52): unsure at all Xaa locations
  Clone ID: PAT_MRT4577_164571C.1.pep
RTYLFKTFYICSLITNVIAVHFQESEYSHSQQCEQLIHGSPXSITFLYTILI

SEQ ID NO: 4989 - protein, 160 aa, Zea mays
  Clone ID: PAT_MRT4577_164577C.1.pep
MSDSEEHHFESKADAGASKTYPQQAGTVRKNGFIVIKNRPCKVVEVSTSKTGKHGHAKCHFVAIDIFNGKKLEDIVPSSHNCDIPHVNRTEYQLIDISEDGFVSLLTSDGNTKDDLRLPTDETLVAQIKEGFESGKDLVVTVQSAMGEEQICALKDVGPK

SEQ ID NO: 4990 - protein, 160 aa, Zea mays; identical to SEQ ID NO: 4989
  Clone ID: PAT_MRT4577_164581C.1.pep

SEQ ID NO: 4991 - protein, 214 aa, Zea mays
  Clone ID: PAT_MRT4577_164582C.1.pep
MRWYKKVAVAFKKKKKKDEVEDYDEKLIAYHPRLYISSLSAPPPPPDPSKTGIAMSDSEEHHFESKADAGASKTYPQQAGTVRKNGFIVIKNRPCKVVEVSTSKTGKHGHAKCHFVAIDIFNGKKLEDIVPSSHNCDIPHVNRTEYQLIDISEDGFVSLLTSDGNTKDDLRLPTDETLVAQIKEGFESGKDLVVTVQSAMGEEQICALKDVGPK

SEQ ID NO: 4992 - protein, 93 aa, Zea mays
  Clone ID: PAT_MRT4577_164782C.1.pep
GPPGFGFLGNRIKMAASDVDYRGFIGGLPWATDDHSLNNAFSTYGKVLESKIILNRETQRSHGFSFVTFSTEEAMRNAIDGMNGNELDGRNIT

SEQ ID NO: 4993 - protein, 144 aa, Zea mays
  Clone ID: PAT_MRT4577_164831C.1.pep
NNNLHKPAWCGTKVQRPAPDSLHRELLPQRAECKPQTRSPSRPRQLRRVGNWALGVALRTRSCLRDRPKKKNGQMNEANQCVMSIRRRNNNGSTGNSRSVAFVVGVGFSRCRAAPPLLERDAHNKHAMCPFGRSYARWDLTVGK

SEQ ID NO: 4994 - protein, 329 aa, Zea mays
  Clone ID: PAT_MRT4577_165073C.1.pep
MAFFSHHHLQQPHAQQPVLPSFRNALPVPVDGQIPAPLTFFNPPPAFPEQPAQAPLVDAVGLTAAAGLGWRQPREQELLGENSQMSSIDFLQTGSAVSTGLALSLEDRRHGGGGAGNSSGDSPLLLLPMLDDDISREVQRLDADMDRFIKAQSERLRQSILEKVQAKQFEALASVEDKILRKIRDKEAEVETINKRNSELEDQIKHLGVEVGAWQHRAKYNESMINALKYNLEQVCAHQSKDFKEGCGDSEVDDTASCRDGGAINFQLTPKENRQPKDLTACRVCKSSEASMLLLPCRHLCLCKECESKLSICHMCQSSKILGMEIYYA

SEQ ID NO: 4995 - protein, 387 aa, Zea mays
  Clone ID: PAT_MRT4577_165077C.1.pep
MFCIPSYHFAICHPQLPRAHFAVFHSITPSPPSLSPQPFPLSHLLPPHLAMAFFSHHHLQQPHPQQAPPPNQQQPVLPSFRNALPVPVDGQIPAPLTFFNPPPAFPEQPAQTTLVDAVGLTAAAGLGWRQPREQELLGENSQMSSIDFLQTGSAVSTGLALSLEDRRHGGGGAGNSSGDSPLLLLPMLDDDISREVQRLDADMDRFIKAQSERLRQSILEKVQAKQFEALASVEDKIFRKIRDKEAEVETINKRNSELEDQIKHLGVEVGAWQQRAKYNESLINALKYNLEQVCAHQSKDFKEGCGDSEVDDTASCPYGGAVNLQLMPKENRQPKNLTACRVCKSSEACMLLLPCRHLCLCKECESKLSICPLCQSSKILGMEIYYA

SEQ ID NO: 4996 - protein, 129 aa, Zea mays
  unsure (1)..(129): unsure at all Xaa locations
  Clone ID: PAT_MRT4577_165108C.1.pep
LTRPRTRGGVCLVLEKPPVTAFAHKTLLEGHYEAEAKAPASFGPVGAVLLENEHHKEIFIKEIKVVTGSDSSTXVTFGCNSWVHSKMDNPEKRMSLTLKSYLACDTPKGLEDLMKKDLHALRGDRHSER

SEQ ID NO: 4997 - protein, 276 aa, Zea mays
  Clone ID: PAT_MRT4577_165280C.1.pep
MEAVARSGDYLWRFVAETEWYNEVVLSAVAPGDWWRGLPHPVQSWMRNCVGGYLLYFISGFLWCFVIYYWKRHAYIPKDAIPTNEAMKKQIVVASKAMPFYCALPTLSEYMIESGWTRCYFNISEIGFSMYLCYMAMYLIFVEFGIYWMHRELHDIKPLYKYLHATHHIYNKENTLSPFAGLAFHPLDGILQAIPHVFALFLFPTHFRTHIALLFLEAVWTTNIHDCIHGKIWPVMGAGYHTIHHTTYRHNYGHYTIWMDWMFGTLNEPDDILKKA

SEQ ID NO: 4998 - protein, 230 aa, Zea mays
  unsure (1)..(230): unsure at all Xaa locations
  Clone ID: PAT_MRT4577_165318C.1.pep
MAATRCCLLMLLGLCESAVTSTIHTTLLQAAIASLLPPYLXSGVIWNGENPNFQPYRIQHGIAAGILPLSPLLLQQXEPYYSQSPSLHLLAQNIRAQQLQQLELAYLAAYCHQQQYVTFNQLTGLNYASYXAQQQLRSSQLCAAYPQHFLPFIQLTALNSPAYLQDQHLLPFSQXLAGXSPATFLTQPQXLLSVYQHAVPNAGTLLPLQQLLPFNQLALKNPTGFXYQQP

SEQ ID NO: 4999 - protein, 111 aa, Zea mays
  unsure (1)..(111): unsure at all Xaa locations
  Clone ID: PAT_MRT4577_1653C.1.pep
GSAGFGFEGEXRIEMASMDVDHRCFLGGLSWATDDHSLHNAFSTYGEVLEFKIILDRETHRSRGFGFVTFSTEEAMXTAIEGMXNCKELDGPNITVNEVHFPCGLGGCRRP

SEQ ID NO: 5000 - protein, 437 aa, Zea mays
  Clone ID: PAT_MRT4577_165462C.1.pep
MDAASRPPPPHGTGVRVRAPLVESVSCYCRLDTGLKTVVEARKFVPGAKMCMQPEVKQNKRKSRGSKKERCRTQAPLLPGLPDDLAIACLIRVPRLEQPKLRMVCKRWNRLLSGNYFYSLRKKIGVAEEWVYVFKRDREGKISWYAFDPLHQLWKSLPPVPQEYSEALGFGCAVLSGCYLYLFGGKDPLRGSMRRVVFYNARTNKWHRAPDMMRKRHFFGSCVINNCLYVAGGECEGIQRTLQSAEVYDPNRNRWACVTEMNNGMVPFIGVVYDGKWFLKGLDSHRQVTSEVYLPSSNTWSAIDDEMVTGWRNPSISFNGRLYSADCRDGCKLRVYDENTGTWTRFMDSKHHLGSSRAFEAAALVSLNGKLCVIRNNMSITLVDVSNPTMSVETDSARMWETVVRKGQHRSFVANLWSSIAGRNLKSHIIHCHVLQV

SEQ ID NO: 5001 - protein, 197 aa, Zea mays
  unsure (1)..(197): unsure at all Xaa locations
  Clone ID: PAT_MRT4577_165711C.1.pep
GPLSPTVFSVXENPIVQPYRTQQAITGGLXPISPLSLQQSSALSPEIPLVHVVAQHFLSQHLQPLALANLAVYSEQQQFLTFKQLAVVNCALYAQQQQVPYRQICGVYPQDFFTYNQLTVLNSSAYSQQSHLLPFSQLAGVSRDTLLTQTQVLPLYQHAAPNAGTLLQLQQLVPLNQLAVTDPAAFYQQPMXGGALF

SEQ ID NO: 5002 - protein, 127 aa, Zea mays
  unsure (1)..(127): unsure at all Xaa locations
  Clone ID: PAT_MRT4577_165843C.1.pep
FHEGSKADLEDFGVHSGDMESEXLGEWADDYGMXIKPLADKSTYFRDGLRTMTTAGYDATAHRVAKGKRXNQYRGIRQRPWGKRAAVISDSHKGAREWLGTLNSPDVDERAYDADARXIHGKKVKVH

SEQ ID NO: 5003 - protein, 70 aa, Zea mays
  Clone ID: PAT_MRT4577_165929C.1.pep
MSLLGRLVRFMVGRLDGMETPFKAVVVCVETKYIHASDGVRENQLLVQGFKLSPPAICWMMYPLPIPITL

SEQ ID NO: 5004 - protein, 158 aa, Zea mays
  unsure (1)..(158): unsure at all Xaa locations
  Clone ID: PAT_MRT4577_166188C.1.pep
TDTNYQHTKHSFLPTTASKILCVLMLLGLCAIAATATILPHCSQAPITSLIAPYLSPALSSVCENXILXPYTIQQAIAAGMLHLSXSFLQQTSVLLQQSLLEHLLTQNIXSHQLQQLVLTNLAAYXSNMQFLPFNQLGXLNSVSYLQQQQLPMSQNTF

SEQ ID NO: 5005 - protein, 146 aa, Zea mays
  unsure (1)..(146): unsure at all Xaa locations
  Clone ID: PAT_MRT4577_166208C.1.pep
HHTKHNRVPTKAGKVFYLLILLALFSSASTATIFPQSSQPPIPFLIPPYLSPAYSSLCXNPILQPYMIQQAIPVGILPLSPLFLQQSLSLLQHLPFVHLFAQNIMAQQLQQLVLSNXLLPYFYYQHFFQFNQLASLNSSFYLQQQQ

SEQ ID NO: 5006 - protein, 344 aa, Zea mays
  Clone ID: PAT_MRT4577_166288C.1.pep
MASSGYEGILLGMGNPLLDISAVVDEGFLAKYDVKPGNVILAEDKHLPMYDELASKSNVEYIAGGATQNSIRVAQWMLQIPGASSYIGCIGKDKFGEEMKKNAQAAGINAHYHEDDNAPTGTCAVCVVGGERSLIANLSAANCYKSEHLKKPENWALVEKAKYIYIAGFFLTVSPDSIQLVAEHAAATNKVFMMNLSAPFICEVFRDAQEKALPYVDYIFGNETEARTFAKVRGWEIENVEEIALKISQLPKASGTHKRITVITQGCDPVVVADDGKVKTFPVILLPKEKLVDTNGAGDAFVGGFLSQLVQEKSIDECVRAACYAANVVIQRSGCTYPEKPDFN

SEQ ID NO: 5007 - protein, 298 aa, Zea mays
  Clone ID: PAT_MRT4577_166289C.1.pep
MARYDELASKSNVEYIAGGATQNSIRVAQWMLQIPGASSYIGCIGKDKFGEEMKKNAQAAGINAHYHEDDNAPTGTCAVCVVGGERSLIANLSAANCYKSEHLKKPENWALVEKAKYIYIAGFFLTVSPDSIQLVAEHAAATNKVFMMNLSAPFICEVFRDAQEKALPYVDYIFGNETEARTFAKVRGWETENVEEIALKISQLPKASGTHKRITVITQGCDPVVVADDGKVKTFPVILLPKEKLVDTNGAGDAFVGGFLSQLVQEKSIDECVRAACYAANVVIQRSGCTYPEKPDFN

SEQ ID NO: 5008 - protein, 115 aa, Zea mays
  unsure (1)..(115): unsure at all Xaa locations
  Clone ID: PAT_MRT4577_166427C.1.pep
APLLPPYLSPELSSVCQNPSLQPHRIXQQAIATGMLPSXPWVLQQSSAPXEGVPLVHLWAQNIRAQHLQQRVLPNLAVYXSNMRVLPVNQLAALNSASYLPQQQVPFNQLAAGYP

SEQ ID NO: 5009 - protein, 76 aa, Zea mays
  unsure (1)..(76): unsure at all Xaa locations
  Clone ID: PAT_MRT4577_166466C.1.pep
SCLGFAMQICTRTDALDVARHTTAAVAKGFAIGSAALVSLALGGAFVSQSASSXTVYVLSLKVFIGLIVGVMLLFW

SEQ ID NO: 5010 - protein, 72 aa, Zea mays
  Clone ID: PAT_MRT4577_166560C.1.pep
RNGAGQHTSTAGTRSPVEQGTRPRHTSAYTPSQEKTTKTLDLVKLRTRAEPSPSVSHPNSHLTVQSSTSWSE

SEQ ID NO: 5011 - protein, 77 aa, Zea mays
  unsure (1)..(77): unsure at all Xaa locations
  Clone ID: PAT_MRT4577_166647C.1.pep
DVEYRCFVXGLTWATDDHSLHNAFSTYGEVLEYKIILDRKTHRSRGFGFNTFSTNDAILNAMEGMNCKELDMSNITE

SEQ ID NO: 5012 - protein, 77 aa, Zea mays
  Clone ID: PAT_MRT4577_166663C.1.pep
LTHHSSKPISIYTSYCMFITKSTVLNGAAALRLCTMLCSDTMMNATEMRRQLYIMVCSLHQRISLRRLLSLASSRIT

SEQ ID NO: 5013 - protein, 63 aa, Zea mays
  Clone ID: PAT_MRT4577_166819C.1.pep
FFPKSKDFIFVRFVCYSPSSVFDCKVALCQLLVLCSSWAPADPCINQHGLWIYECCYSCQDLF

SEQ ID NO: 5014 - protein, 128 aa, Zea mays
  Clone ID: PAT_MRT4577_166846C.1.pep
LVAYFQQQQFFPFNQLAALNFAFYLQQQQFPFSQVPVASPQQFFPFNQLAALNFPVYFQQHQLFPFSQLVGVSPAPFLTHPQLLPFYQPVGPNAGPLLQLQQLLPFTHLVLPTLAVFSPHPIIGGALF

SEQ ID NO: 5015 - protein, 130 aa, Zea mays
  Clone ID: PAT_MRT4577_166849C.1.pep
ANLVAYFQQQRFFPFNQLGALNSAFYLQHQQLPFSQLPVASPQHFFPFNQLAALNFPVFLQQQQLLPFSQLVGVSPAPFLTQPQLLPFYQPVGPNAGPLLQLHQLLPFNHLVLTNLAVFSPHPLIGGALF

SEQ ID NO: 5016 - protein, 86 aa, Zea mays
  unsure (1)..(86): unsure at all Xaa locations
  Clone ID: PAT_MRT4577_166859C.1.pep
NAFSSYHESLGSKVITDRETVRSRGFSFVTFSFENSMLDAIENMNGKELDCRNITVNHTXSRCRSCGGGGYVGCRSGXRGYRGGRR

SEQ ID NO: 5017 - protein, 215 aa, Zea mays
  Clone ID: PAT_MRT4577_166961C.1.pep
LHSRCIFQRMKNYTIYAVSITIRIVLGFMLIALIWKFDFAPFMVLIIAILNDGTIMTISKDRVKPSPLPDSWKLNEIFATGVVLGTYLALVTVVFFWLIHKTDFFTNKFGVESIRNTEFKEMSALYLQVSIVSQALIFVTRSRSWSFVERPGFLLVTAFLLAQLVATLIAVYANWDFARIKGIGWGWAGVIWLFSIVFYFPLDIFKFFIRFVLSG

SEQ ID NO: 5018 - protein, 292 aa, Zea mays
  Clone ID: PAT_MRT4577_167145C.1.pep
MEGKEEDVRLGANKFSERQPIGTAAQGAGAGDDDKDYKEPPPAPLFEPGELKSWSFYRAGIAEFVATFLFLYITVLTVMGVSKSTSKCATVGIQGIAWSFGGMIFALVYCTAGISGGHINPAVTFGLFLARKLSLTRAIFYIIMQCLGAICGAGVVKGFQQGLYMGNGGGANVVAPGYTKGDGLGAEIVGTFILVYTVFSATDAKRNARDSHVPILAPLPIGFAVFLVHLATIPITGTGINPARSLGAAIIYNRDHAWSDHWIFWVGPFIGAALAAIYHQVIIRAIPFKSRS

SEQ ID NO: 5019 - protein, 292 aa, Zea mays; identical to SEQ ID NO: 5018
  Clone ID: PAT_MRT4577_167152C.1.pep

SEQ ID NO: 5020 - protein, 1135 aa, Zea mays
  Clone ID: PAT_MRT4577_167226C.1.pep
MSLPSNNRRTCSRSSSARSKHSARVVAQTPVDAQLHAEFEGSQRHFDYSSSVGAANRPSASTSTVSTYLQNMQRGRYIQPFGCLLAVHPDTFALLAYSENAPEMLDLTPHAVPTIDQRDALGIGVDVRTLFRSQSSVALHKAATFGEVNLLNPILVHARTSGKPFYAILHRIDVGLVIDLEPVNPADVPVTAAGALKSYKLAAKAISRLQSLPSGNLSLLCDVLVREVSELTGYDRVMAYKFHEDEHGEVISECRRSDLEPYLGLHYPATDIPQASRFLFMKNKVRMICDCCATPVKVIQDDSLAQPLSLCGSTLRASHGCHAQYMANMGSVASLAMSVTINEDEEEDGDTGSDQQPKGRKLWGLVVCHHTSPRFVPFPLRYACEFLLQVFGIQLNKEVELAAQAKERHILRTQTLLCDMLLRDAPVGIFTRSPNVMDLVKCDGAALYYQNQLLVLGSTPSESEIKSIATWLQDNHDGSTGLSTDSLVEAGYPGAVALREVVCGMAAIKISSKDFIFWFRSHTTKEIKWGGAKHEPVDADDDGRRMHPRSSFKAFLEVVKWRSVPWEDVEMDAIHSLQLILRGSLPDEDANRNNVRSIVKAPSDDMKKIQGLLELRTVTNEMVRLIETATAPVLAVDIAGNINGWNNKAAELTGLPVMEAIGRPLIDLVVTDSIEVVKQILDSALQGIEEQNMEIKLKTFHEHECNGPVILKVNSCCSRDLSEKVIGVCFVAQDLTRQKMIMDKYTRIQGDYVAIVKNPTELIPPIFMINDLGSCLEWNKAMQKITGIKREDAINKLLIGEVFTLHDYGCRVKDHATLTKLSILMNAVISGQDPEKLFFGFFDTDGKYIESLLTVNKRTDAEGKITGALCFLHVASPELQHALQVQKMSEQAATNSFKELTYIRQELRNPLNGMQFTCNLLKPSELTEEQRQLLSSNVLCQDQLKKILHDTDLESIEQCYMEMNTVEFNLEQALNTVLMQGIPLGKEKQISIERNWPVEVSCMYLYGDNLRLQQILADYLACALQFTQTAEGPIVLQVMSKKENIGSGMQIAHLEFRIVHPAPGVPEALIQEMFQHNPGVSREGLGLYISQKLVKTMSGTVQYLREADTSSFIILMEFPVAQLSSKRSKPSTSKF

SEQ ID NO: 5021 - protein, 85 aa, Zea mays
  unsure (1)..(85): unsure at all Xaa locations
  Clone ID: PAT_MRT4577_167251C.1.pep
QQLLALPSXIMPVMMPQMMRPNMMSPLMIPRMISLMVFPSIIXQMMMPQCHCDAYSHIMLYQQXPFMNNPMAMTNSPMFLQQLIF

SEQ ID NO: 5022 - protein, 290 aa, Zea mays
  Clone ID: PAT_MRT4577_167305C.1.pep
MGKDDVIESGAGGGEFAAKDYTDPPPAPLIDAAELGSWSLYRAVIAEFIATLLFLYITVATVIGYKHQTDASASGADAACGGVGVLGIAWAFGGMIFVLVYCTAGISGGHINPAVTFGLFLARKVSLVRALLYIVAQCLGAICGVGLVKAFQSAYFDRYGGGANSLASGYSRGTGLGAEIIGTFVLVYTVFSATDPKRNARDSHVPVLAPLPIGFAVFMVHLATIPVTGTGINPARSLGAAVIYNKDKPWDDHWIFWVGPLVGAAIAAFYHQYILRAGAIKALGSFRSNA

SEQ ID NO: 5023 - protein, 290 aa, Zea mays; identical to SEQ ID NO: 5022
  Clone ID: PAT_MRT4577_167306C.1.pep

SEQ ID NO: 5024 - protein, 48 aa, Zea mays
  Clone ID: PAT_MRT4577_167427C.1.pep
YRVAVRLCHSVSVRSTCALGVGTPVVPFGCSRYETRRKKNEQGFCSQL

SEQ ID NO: 5025 - protein, 232 aa, Zea mays
  unsure (1)..(232): unsure at all Xaa locations
  Clone ID: PAT_MRT4577_16750C.1.pep
MRKFQDSIKALQADIDHANAMASEFLRDYDGSVIQMRVAYSAVAHFLLQWTDCKLAGALGLLKVMLYKVCADGSSALPDWEMEASIREFYGVIFPSLLQLPSGITELDDRKQRKLCLKKFRSRDEQLSEVDTERELECGICLEXNVLPTCPHXLCMRCFEDWNEKSKSCPFCRACLEEVKPGSLWIYTDDSDVVDMDTLTRENIRRLFMYINKLPLVVLHVVDLDVYKYRIK

SEQ ID NO: 5026 - protein, 43 aa, Zea mays
  Clone ID: PAT_MRT4577_167607C.1.pep
ALLLVNVHIAWLCDHTVDHHIHHQQAIRWFNVEAPSDKHLSCS

SEQ ID NO: 5027 - protein, 673 aa, Zea mays
  unsure (1)..(673): unsure at all Xaa locations
  Clone ID: PAT_MRT4577_167692C.1.pep
METRDTDATPLPYSYTPLPAADAASAEVSGTGRTRSRRRPLCAAALVLSAALLLAVAALVGVGSRPGAVGMTESAASSPTPSRSRGPEAGVSEKTSGASDDGGRLRGAGGNAFPWSNAMLQWQRTGFHFQPQKNWMNDPNGPVYYKGWYHLFYQYNPDGAIWGNKIAWGHAVSRDLIHWRHLPLAMVPDQWYDTNGVWTGSATTLPDGRLAMLYTGSTNASVQVQCLAVPADDADPLLTNWTKYEGNPVLYPPPGIGPKDFRDPTTAWIDPSDGAWRVVIGSKDDDGHAGIAVVYRTTDLVHFELLPGLLHRVDGTGMWECIDFYPVATRGRASANGVDMSDAIASNGAVAGDVLHVMKASMDDDRHDYYALGRYDAAANAWTPIDAGRDVGIGLRYDWGKFYASKTFYDPAKRRRVLWGWVGETDSERADVSKGWASLQGIPRTVLLDTKTGSNLLQWPVEEVETLRTNSTDLSGITIDYGSVFPLNLRRATQLDIEAEFQLDRRAVMSLNEADVGYNCSTSGGAAGRGALGPFGLLVLADRRLRREQTAVYFYVAKGLDGSLATHXCQDESRSSSATDIVKRVVGSAVPVLEDEATLSLRVLVDHSIVESFAQGGRSTATSRVYPTEAIYANAGVFLFNNATAARVTATKLVVHEMDSSYNHDYMAPVADI

SEQ ID NO: 5028 - protein, 332 aa, Zea mays
  Clone ID: PAT_MRT4577_167838C.1.pep
GRDPLLATPHSPLWLFEDRHLLPLDAPAVFEEVQRPRSGNSHTSSKPAEQIRHRWQFHLSLDEDGTDNSSLFKEKLTHALRYFKESTDQHLLVQVWAPVKNGDRYVLTTSGQPFVLDHQSIGLLQYRAVSMTYMFSVDAENVGDLGLPGRVYKQKVPEWTPNVQYYSSGEYQRLNHAISYNVHGTVALPVFDPSAHSCIAVVELIMTSKKINYACEVDKVCKALEAVNLKSTEIHDHPNVQICNEGRQAALVEILEILTVVCEEHKLPLAQTWVPCKYRSVLAHGGGLKKSCLSFDGSCMGEVCMSTSDVAFHVIDAHMWGFRDACVEHHLQ

SEQ ID NO: 5029 - protein, 69 aa, Zea mays
  Clone ID: PAT_MRT4577_167956C.1.pep
TCILHLYTYHRLRSHAYSCITRAHTYVRAHNTSGARYHSSHCTRSTRGGTDDAVASNQPKKWCFFSLPA

SEQ ID NO: 5030 - protein, 105 aa, Zea mays
  unsure (1)..(105): unsure at all Xaa locations
  Clone ID: PAT_MRT4577_168108C.1.pep
MAAADVQHRCFHGGLAWASNYECVENAFAYYGEILDYKVITDRETGRISGFSFGTFCCENYMLDAIENMNGKELDGRNIXRNQAQSRGGGGGSGGYGRGRSGGGY

SEQ ID NO: 5031 - protein, 112 aa, Zea mays
  unsure (1)..(112): unsure at all Xaa locations
  Clone ID: PAT_MRT4577_168134C.1.pep
INAVLKKVXEPNAHKIMEHRMKYYRLRKEMDENISHRDPLRQRSHAQAAYDKANTNEQSSSRSSGGASSISFPGRMPPGGFPXGFPXGFPWGCMPXGFPGGVPGNVHMSKML

SEQ ID NO: 5032 - protein, 112 aa, Zea mays
  Clone ID: PAT_MRT4577_168216C.1.pep
MSGVWVFEDGIVRRADSEPPSGAGAGGSRPNKVLVHVPSGEVVTSYEVLERRLRELGWERYLYDPCLLQFHQRSTVHLITVPRDFSRLKLVHMYDVVVKTRNVFEVRDAAPA

SEQ ID NO: 5033 - protein, 149 aa, Zea mays
  Clone ID: PAT_MRT4577_168274C.1.pep
MLRNFPQARRLLRRMGFEKEDAYFWKQMGKAMLCTYTLFGVVWLWNETSPLGWWTLKPRPKEEREMAHLYERRKFPYPGDDEAVEEFVKSGGALGTTIGPRGFADANMDSENMQKQLQSKKFEQEAQKLWIRMRNEVVQELQEKGFDIE

SEQ ID NO: 5034 - protein, 113 aa, Zea mays
  unsure (1)..(113): unsure at all Xaa locations
  Clone ID: PAT_MRT4577_168364C.1.pep
MSGRGKGGKGLGKGGAKRHHKVLRDNIQGITKPAIRRLAMTGGVKXISGLIYKETRGVLKIFLENDIRDTVTYTEHARRKTVTVMDVCYTLKRQGRTLYSFSGYAPFPYDALM

SEQ ID NO: 5035 - protein, 103 aa, Zea mays; identical to SEQ ID NO: 3555
  Clone ID: PAT_MRT4577_168366C.1.pep

SEQ ID NO: 5036 - protein, 103 aa, Zea mays; identical to SEQ ID NO: 3555
  Clone ID: PAT_MRT4577_168368C.1.pep

SEQ ID NO: 5037 - protein, 103 aa, Zea mays
  Clone ID: PAT_MRT4577_168369C.1.pep
MSGRGKGGKGLGKGGAKRHRKVLRDNIQGITKPAIRRLARRGGVKRISGLVYEETRGVLKIFLENVIRDAVTYTEHARCKTVTAMDVVYALKRQGRTLYGFGG

SEQ ID NO: 5038 - protein, 103 aa, Zea mays; identical to SEQ ID NO: 3555
  Clone ID: PAT_MRT4577_168371C.1.pep

SEQ ID NO: 5039 - protein, 103 aa, Zea mays; identical to SEQ ID NO: 3555
  Clone ID: PAT_MRT4577_168372C.1.pep

SEQ ID NO: 5040 - protein, 103 aa, Zea mays; identical to SEQ ID NO: 3555
  Clone ID: PAT_MRT4577_168374C.1.pep

SEQ ID NO: 5041 - protein, 103 aa, Zea mays; identical to SEQ ID NO: 3555
  Clone ID: PAT_MRT4577_168375C.1.pep

SEQ ID NO: 5042 - protein, 103 aa, Zea mays; identical to SEQ ID NO: 3555
  Clone ID: PAT_MRT4577_168378C.1.pep

SEQ ID NO: 5043 - protein, 103 aa, Zea mays; identical to SEQ ID NO: 3555
  Clone ID: PAT_MRT4577_168396C.1.pep

SEQ ID NO: 5044 - protein, 103 aa, Zea mays; identical to SEQ ID NO: 3555
  Clone ID: PAT_MRT4577_168398C.1.pep

SEQ ID NO: 5045 - protein, 103 aa, Zea mays; identical to SEQ ID NO: 3555
  Clone ID: PAT_MRT4577_168399C.1.pep

SEQ ID NO: 5046 - protein, 103 aa, Zea mays
  Clone ID: PAT_MRT4577_168402C.1.pep
MSGRGKGGKGLGKGGAKRHRKVLRDNIQGITKPAIRRLARRGGVKRISGLIYEESRGVLKIFLENVIRDAVTYTEHARRKTVTAMDVVYALKRQGRTLYGFGG

SEQ ID NO: 5047 - protein, 103 aa, Zea mays; identical to SEQ ID NO: 3555
  Clone ID: PAT_MRT4577_168403C.1.pep

SEQ ID NO: 5048 - protein, 137 aa, Zea mays
  Clone ID: PAT_MRT4577_168407C.1.pep
MVKFLKPGKAVILLQGRFAGRKAVIVRVFEEGTRDRPYGHCLVAGLAKYPKKVIRKDSAKKTAKKSRVKCFIKLVNFTHLMPTRYTLDVDFKDVASGGPDALSTRDKKVEACKAAKARLEERFKTGKNRWFFTKLRF

SEQ ID NO: 5049 - protein, 103 aa, Zea mays; identical to SEQ ID NO: 3555
  Clone ID: PAT_MRT4577_168408C.1.pep

SEQ ID NO: 5050 - protein, 103 aa, Zea mays; identical to SEQ ID NO: 3555
  Clone ID: PAT_MRT4577_168409C.1.pep

SEQ ID NO: 5051 - protein, 109 aa, Zea mays
  Clone ID: PAT_MRT4577_168430C.1.pep
MSGRGKGGKGLGKGGAKRHRKVLRDNIQGITKPAIRRLARRGGVKRISGLIYEETRGVLKIFLENVIRDAVTYTEHARRKTVTAMDVVYALKRQGRTLYGFGRLGRLPF

SEQ ID NO: 5052 - protein, 103 aa, Zea mays; identical to SEQ ID NO: 3555
  Clone ID: PAT_MRT4577_168431C.1.pep

SEQ ID NO: 5053 - protein, 103 aa, Zea mays; identical to SEQ ID NO: 3555
  Clone ID: PAT_MRT4577_168432C.1.pep

SEQ ID NO: 5054 - protein, 103 aa, Zea mays; identical to SEQ ID NO: 3555
  Clone ID: PAT_MRT4577_168433C.1.pep

SEQ ID NO: 5055 - protein, 103 aa, Zea mays; identical to SEQ ID NO: 3555
  Clone ID: PAT_MRT4577_168436C.1.pep

SEQ ID NO: 5056 - protein, 103 aa, Zea mays; identical to SEQ ID NO: 3555
  Clone ID: PAT_MRT4577_168438C.1.pep

SEQ ID NO: 5057 - protein, 103 aa, Zea mays; identical to SEQ ID NO: 3555
  Clone ID: PAT_MRT4577_168439C.1.pep

SEQ ID NO: 5058 - protein, 103 aa, Zea mays; identical to SEQ ID NO: 3555
  Clone ID: PAT_MRT4577_168441C.1.pep

SEQ ID NO: 5059 - protein, 103 aa, Zea mays; identical to SEQ ID NO: 3555
  Clone ID: PAT_MRT4577_168442C.1.pep

SEQ ID NO: 5060 - protein, 103 aa, Zea mays; identical to SEQ ID NO: 3555
  Clone ID: PAT_MRT4577_168443C.1.pep

SEQ ID NO: 5061 - protein, 103 aa, Zea mays; identical to SEQ ID NO: 3555
  Clone ID: PAT_MRT4577_168464C.1.pep

SEQ ID NO: 5062 - protein, 103 aa, Zea mays; identical to SEQ ID NO: 3555
  Clone ID: PAT_MRT4577_168467C.1.pep

SEQ ID NO: 5063 - protein, 103 aa, Zea mays
  Clone ID: PAT_MRT4577_168470C.1.pep
MSGRGKGGKGLGKGGAKRHRKVLRDNIQGITKPAIRRLARRGGVKRISGLIYEETRGVLKIFLENVIRDAVTYTEHARRKTVTAMDVVYAPKRQGRTLYGFGG

SEQ ID NO: 5064 - protein, 103 aa, Zea mays; identical to SEQ ID NO: 3555
  Clone ID: PAT_MRT4577_168471C.1.pep

SEQ ID NO: 5065 - protein, 103 aa, Zea mays; identical to SEQ ID NO: 3555
  Clone ID: PAT_MRT4577_168474C.1.pep

SEQ ID NO: 5066 - protein, 103 aa, Zea mays; identical to SEQ ID NO: 3555
  Clone ID: PAT_MRT4577_168475C.1.pep

SEQ ID NO: 5067 - protein, 103 aa, Zea mays; identical to SEQ ID NO: 3555
  Clone ID: PAT_MRT4577_168476C.1.pep

SEQ ID NO: 5068 - protein, 103 aa, Zea mays; identical to SEQ ID NO: 3555
  Clone ID: PAT_MRT4577_168477C.1.pep

SEQ ID NO: 5069 - protein, 103 aa, Zea mays; identical to SEQ ID NO: 3555
  Clone ID: PAT_MRT4577_168479C.1.pep

SEQ ID NO: 5070 - protein, 103 aa, Zea mays; identical to SEQ ID NO: 3555
  Clone ID: PAT_MRT4577_168497C.1.pep

SEQ ID NO: 5071 - protein, 103 aa, Zea mays; identical to SEQ ID NO: 3555
  Clone ID: PAT_MRT4577_168498C.1.pep

SEQ ID NO: 5072 - protein, 121 aa, Zea mays
  Clone ID: PAT_MRT4577_168501C.1.pep
SRLPRKLTSPPQTRAEEAMSGRGKGGKGLGKGGAKRHRKVLRDNIQGITKPAIRRLARRGGVKRISGLIYEETRGVLKIFLENVIRDAVTYTEHARRKTVTAMDVVYALKRQGRTLYGFGG

SEQ ID NO: 5073 - protein, 103 aa, Zea mays; identical to SEQ ID NO: 3555
  Clone ID: PAT_MRT4577_168502C.1.pep

SEQ ID NO: 5074 - protein, 156 aa, Zea mays
  Clone ID: PAT_MRT4577_168504C.1.pep
SKEEWLCKKKKKKGAYGKKKKNAKKTKKKKKKSTHHLFQIPPANPQFLRVRATMSGRGKGGKGLGKGGAKRHRKVLRDNIQGITKPAIRRLARRGGVKRISGLIYEETRGVLKIFLENVIRDAVTYTEHARRKTVTAMDVVYALKRQGRTLYGFGG

SEQ ID NO: 5075 - protein, 161 aa, Zea mays
  unsure (1)..(161): unsure at all Xaa locations
  Clone ID: PAT_MRT4577_168609C.1.pep
RTRGSSWKXAWKKXGACSGLSEKXYFETALSFRSRINPLVRLKAKGIEPDFGLYGLKAITKVFKSGINATPVIQCSKGPFDKYMLFQLYFCAAGNGTFIDCPAPQQYTCSKEILFHPFKKWMLKQQLNQDDDPFQLPGVAXWTTDTPYRRLCLRFCQVCME

SEQ ID NO: 5076 - protein, 149 aa, Zea mays
  unsure (1)..(149): unsure at all Xaa locations
  Clone ID: PAT_MRT4577_168644C.1.pep
MAGKTLCLLMLLGLSASXAATATIVPQSSQAPIAYVVPPYLSPAESXIVENPIXLQPYRIQQAMAGXILPLSPLLLQQSXALLQQLPWVHLLAQNIMAQQLQQLVLANRADYSHQQQLLPFNQLGSLNSASYLQQQQLPCSQLPAAYPQ

SEQ ID NO: 5077 - protein, 41 aa, Zea mays
  Clone ID: PAT_MRT4577_168736C.1.pep
VCLCVLPLASQQRRLLEPRYLFPWWSSAANIVIMPVWVMLD

SEQ ID NO: 5078 - protein, 788 aa, Zea mays
  unsure (1)..(788): unsure at all Xaa locations
  Clone ID: PAT_MRT4577_168744C.1.pep
MAPALSGTLGASSVAALRPCAGRRAPSAASSVAPRGSGVVRCSRGLRWDAHRSRGRLLRVRCDAAVAEKPAEEEAAGEKFEYQAEVSRLMDLIVHSLYSHKEVFLRELVSNASDALDKLRFLGVTDSSLLADGGELEIRIKPDLDAGTITITDTGVGMTKDELKDCLGTIAQSGTSKFLKALKENKDLGADNGLIGQFGVGFYSAFLVAEKVVVSTKSPKSDKQYVWEAVADSSSYVIKEETDPEKMLTRGTQITLFLRPDDKYEFADPSRIQGLVKNYSQFVSFPIYTWQEKSRTVEVEEDEEPKEVEEATKGEKKKKTITEKYWDWELANETKPIWMRNPKEIENTEYNEFYKKTFNEFLDPLAHTHFTTEGEVEFRSVLYVPGMAPLSNEEIMNPKTKNIRLYVKRVFISDDFDGELFXPRYLSFVKGVVDSNDLPLNVSREILQESRIVRIMRKRLVRKTFDMIEEIAEKEDKEDYKKFWESFGKFVKLGCIEXTGNHKRLAPLLRFHSSKNEGDLISLDQYVESMPESQKAIYYIATDSLQSAKTAPFLEKLVQKDIEVLYLIEPIDEVAIQNLQTYKEKKFVDISKEDLELGDEEEETKETKQEFTLLCDWVKQQLGDKVAKVQISKRLSSSPCVLVSGKFGWSANMERLMKAQTLGDTSSLEFMRGRRIFEINPDHPIIKDLSAACKNEPESTEARRAVELLYEAALISSGYTPESPAELGGKIYEMMAIALGGRWGRSDMEEAEASTGEASAEADSSEGTVAEVIEPSEVRPESDPWRDQ

SEQ ID NO: 5079 - protein, 112 aa, Zea mays
  unsure (1)..(112): unsure at all Xaa locations
  Clone ID: PAT_MRT4577_168951C.1.pep
RIPERVVHARGVSDKGFFECTHDVTSLTCAYLLLAPGVRTPVIVRFSTVIHERRSXRHIRDPRGFVVKMYTREGNCDLLGNNFPGFLIRDGIKLRYVIHSNKPNPWSXVHEY

SEQ ID NO: 5080 - protein, 51 aa, Zea mays
  Clone ID: PAT_MRT4577_169249C.1.pep
KGTEINFSQHNPSYCRQDPDLYIYFTPKKEREINRTTRKGTLYWHIHCLHN

SEQ ID NO: 5081 - protein, 534 aa, Zea mays
  unsure (1)..(534): unsure at all Xaa locations
  Clone ID: PAT_MRT4577_169250C.1.pep
MAGAGAAANGGRNKYAVLDRSEERQTDARTERRRRPLAPESERGRRERFVYACAVFASLNAVLLGYDVGVMSGAIIYMQKDLHITEFQQEILVGCLSVVSLLGSLSGGRTSDAIGRKWTMGLGAIVFQIGATIMTFAPSFTVLMIGRLLAGVGIGFGAMVSGVYIAEISPAGARGTLTSLPEICINXLGILLGYVSNYAFSGLSEHINWRIMPGVGILPSVFIGFALFVIPESPRWLMMEKRVSEARAVLLQISESEAEAEERLAEIEEAAGLMKSMKSEDKEVWRELLNPSPAVRRMLYAGCGIQLFQQITGIDATVYYSPTIFKDAGIKSDQELLAATVAVGFTKTVFILVAIFLIDRVGRKPLLYVSTIGMTICLFLLGVALTLQNHAVGLMSPRVGIDLAIFAVCGNVAFFSIGMGPICWVLSSEVFPLRLRAQGSALGQVGGRVSSGLVSMSFLSMARAISVAGMFFVFAAISTISVLFVYFCVPETKGKTLEQIEMMFESGDEWGGGEIELEDTQHLIPSIKKSVPLG

SEQ ID NO: 5082 - protein, 151 aa, Zea mays
  unsure (1)..(151): unsure at all Xaa locations
  Clone ID: PAT_MRT4577_169326C.1.pep
ASSLVLVFSEPLMKRLRFWPQAYLGLTFNWGALLGWAAIKESIDPAIILPLYTAGICWTLVYDTIYAHQXFAIPTFILILDEVAISCCRGGLILAYLHASQDKEDDLKVGVKSTALRFGDLTKYWISGFGAACFGSLALSGYNADLGWCLV

SEQ ID NO: 5083 - protein, 52 aa, Zea mays
  Clone ID: PAT_MRT4577_16940C.1.pep
RVRSLDSKVITLRETGRSHGFYFITFSSENSKDDAIYNMNGKDLPGRNITVN

SEQ ID NO: 5084 - protein, 133 aa, Zea mays
  unsure (1)..(133): unsure at all Xaa locations
  Clone ID: PAT_MRT4577_169506C.1.pep
GGGAGAATATIFPHCSQAPIASLLPPYLSPVVSSXCENPFIQPHRIQQALGGGVLPLSPLFLQXSSALLQQFPLVRXLAXIIGAHLLLQLVLAYLAAFSLRLRFLPFDQLAALVCGCCLRRRRLLFVLLGGGY

SEQ ID NO: 5085 - protein, 46 aa, Zea mays
  Clone ID: PAT_MRT4577_16960C.1.pep
MGGFIKTHKTNAYFKRFQVKFKIRRACITVYRVSIMLINQDEHKYL

SEQ ID NO: 5086 - protein, 622 aa, Zea mays
  unsure (1)..(622): unsure at all Xaa locations
  Clone ID: PAT_MRT4577_169639C.1.pep
MKREYQNAGGSDGYMXSSKDKSMAAAAAGAGEQEEEVDELLAALGYKVRSSDMADVAQKLEQLEMAMGMGGACPTADDGFVSHLATDTVHYNPSDLSSWVESMLSELNAPPPPLPPATPAPRLASTSSTVTSGTAAGAGYFDLPPAVDSSSSTYALKPIPSPAVAASADPSPDSAREPKRMRTGGGSTSSSSSSSSSMDGGRTRSSVVEAAPPATQAANGPAVPVVVVDTQEAGIRLVHALLACAEAVQQENFSAADALVKQIPVLASSQGGAMRKVAAYFGEALARRVYRLRPAPDGSLLDAAFADLLHAHFYESCPYLKFAHFTANQAILEAFAGCRRVHVVDFGIKQGMQWPALLQALALRPGGPPSFRLTGVGPPQPDETDALQQVGWKLAQFAHTIRVDFQYRGLVAATLADLEPFMLRPEGGGDTDDEPEVIAVNSVCELHRLLAQPGTLDKVLGTVRAVRPRIVTVVEQEANHNSGTFLDRFTESLHYYSTMFDSLEGAGSGSGSGQPTDASPPAGTDQVMSEVYLGRQICNIVACEGAERTERHETLVQWRGRLGGSGFEPVHLGSNAYKQASTLLALFAGGDGYRVEEKDGCLTLGWHTRPLIATSAWRVAAP

SEQ ID NO: 5087 - protein, 633 aa, Zea mays
  unsure (1)..(633): unsure at all Xaa locations
  Clone ID: PAT_MRT4577_169640C.1.pep
MKREYQDAGGSGGDMGSSKDKMMAAAAGAGEQEEEDVDELLAALGYKVRSSDMADVAQKLEQLEMAMGMGGVGGAGATADDGFVSHLATDTVHYNPSDLSSWVESMLSELNAPPAPLPPATPAPRLASTSSTVTSGAAAGAGYFDLPPXAVDSSSSTYALKPIPSXPVAAPSADPSTDSAREPKRMRTGGGSTSSSSSSSSSMDGGRTKEXSVVETAPPATQASAAANGPAVPVVVVDTQEAGIRLVHALLACAEAVQQENFSAAEALVKQIPMLASSQGGAMRKVAAYFGEALARRVYRFRPPPDSSLLDAAFADLLHAHFYESCPYLKFAHFTANQAILEAFAGCRRVHVVDFGIKQGMQWPALLQALALRPGGPPSFRLTGVGPPQPDETDALQQVGWKLAQFAHTIRVDFQYRGLVAATLADLEPFMLQPEGDDTDDEPEVIAVNSVFELHRLLAQPGALEKVLGTVRAVRPRIVTVVEQEANHNSGTFLDRFTESLHYYSTMFDSLEGAGAGSGQSTDASPAAAGGTDQVMSEVYLGRQICNVVACEGAERTERHETLGQWRSRLGGSGFAPVHLGSNAYKQASTLLALFAGGDGYRVEEKDGCLTLGWHTRPLIATSAWRVAAAAAP

SEQ ID NO: 5088 - protein, 120 aa, Zea mays
  unsure (1)..(120): unsure at all Xaa locations
  Clone ID: PAT_MRT4577_169652C.1.pep
MAAKIFGLLMLLGLSACADSATIFPQCSQATIAFIISPNLSPAASTVCENPILQHYKIQQAIAAGISPLSPLLLQQSSALLQQLPFEHLLAQNIMAHQLQQRVLANLAXYSEHQQVHSFN

SEQ ID NO: 5089 - protein, 173 aa, Zea mays
  Clone ID: PAT_MRT4577_169869C.1.pep
MQRGDPLVVGRIIGDVVDPFVRRVPLRVAYAAREVSNGCELRPSAIADQPRVEVGGPDMRTFYTLVMVDPDAPSPSDPNLREYLHWLVTDIPATTGVSFGTEVVCYESPRPVLGIHRVVFLLFQQLGRQTVYAPGWRQNFSTRDFAELYNLGLPVAAVYFNCQRESGTGGRRM

SEQ ID NO: 5090 - protein, 72 aa, Zea mays
  unsure (1)..(72): unsure at all Xaa locations
  Clone ID: PAT_MRT4577_169904C.1.pep
MAAADVEYRCFVGGLAWATSNESLENAFASYGEILNSKEMTDRXTGRSRGFGLRTFYYENCMLDAVDNMNGK

SEQ ID NO: 5091 - protein, 128 aa, Zea mays
  Clone ID: PAT_MRT4577_169911C.1.pep
QHTKHNFVPTIAAKIFGLLILLAISASAATATIFPQYSQAPITYLLPPYLSPTVSSVCENPILQPYTIQHAITADILPLSPLFLQQSSALLHHLPFVHLLSQNIMSQQLQQLVLANLASYSYQHHFLP

SEQ ID NO: 5092 - protein, 50 aa, Zea mays
  Clone ID: PAT_MRT4577_170000C.1.pep
QGGEEEIAVTITWVKARQIFYRRGNPTVEVDVGLNDRRYPRGAVPSGAFT

SEQ ID NO: 5093 - protein, 522 aa, Zea mays
  Clone ID: PAT_MRT4577_17005C.1.pep
LQRSLTVVRVLCICHWWCCADQATAGGRRVCAGPPPSTATRPAAMEVSSVEFGHHAAAASKCFDDDGRLKRTGTMWTASAHIITAVIGSGVLSLAWAIAQLGWVAGPTVMLLFSFVTYYTSALLADCYRSGDACTGKRNYTYMDAVNANLSGVKVWFCGFLQYANIVGVAIGYTIAASISMLAIQRANCFHVEGHGDPCNISSTPYMIIFGVVQIFFSQIPDFDQISWLSILAAVMSFTYSTIGLGLGIAQVVSNKGVQGSLTGISVGAVTPVDKMWRSLQAFGDIAFAYSYSLILIEIQDTIRAPPPSESKVMRRATVVSVAVTTFFYMLCGCMGYAAFGDNAPGNLLTGFGFYEPFWLLDVANAAIAVHLVGAYQVYCQPLFAFVEKWARQRWPKSRYITGEVDVPLPLGTAGGRCYKLSLFRLTWRTAFVVATTVVSMLLPFFNDVVGLLGALGFWPLTVYFPVEMYIVQKKVPRWSTRWVCLQLLSVACLVITVASAAGSVAGIVSDLKVYKPFVTTS

SEQ ID NO: 5094 - protein, 143 aa, Zea mays
  unsure (1)..(143): unsure at all Xaa locations
  Clone ID: PAT_MRT4577_170168C.1.pep
ADRPLPPQPPSALYGRGSSSXQDQWLESGDSRRVPRLSAFVNLLHVRRAMTEPPSRAXNGKRAWTGRNKSPSTEGPVSACGTWRAAAGRVPVVSRGGRRLRAVCGRRDGRWRLRAVCGGYRWTAGAYRGGGGCTCGGIPWRRA

SEQ ID NO: 5095 - protein, 122 aa, Zea mays
  Clone ID: PAT_MRT4577_1701C.1.pep
GKKGGSPDPPEQGGHALRGGRAPQGQGERGAPGPPQGRGREGVTPEPVILLVLLELGGGGRSKQNCLFVGFQPSTLPCLFCWPPVGGSLLVGDPPPPGFGVNETPPGQLLGFFRRGGGAMLL

SEQ ID NO: 5096 - protein, 653 aa, Zea mays
  Clone ID: PAT_MRT4577_170411C.1.pep
LLRSLLNADLIGFHTFDYARHFLSCCSRMLGLKYESQRGYIALEYYGRTVTIKILPVGVDLERVRSGLNDSVAGAKAAELVKPFCQQNRLLLLGVDDMDIFKGISLKLLAFEQLLMQHPEWRGRVVLVQIANPARGRGKDVREVQEESDAMVRRINDAFGQPGYQPVILIDQPLQFYERMAYYVVAECCLVTAVRDGMNLIPYEYVIARQGNERIDSILGLGPASRKKSMLVVSEFIGCSPSLSGAIRVNPWNIDSVADAMDYALEMPEGEKVLRHEKHHRYVSTHDVGYWANSFLQDLERICLDHNRRRCWGIGFGLKFRVVALDPNFKKLAVEHLVLAYRRTKKRVILLDYDGTLMPQTSLGKSPTSRTIDMLNSLCRDRNNMVFLVSAKSRMTLNEWFLPCESLGLAAEHGCFLRLRRDAEWETCVPVIDCSWKQIAEPVMKTYTETTDGSTIEDKETAIVWCYEDADPDFGSCQAKELHDHLESVLANEPVSVKAGPNLVEVKPQGVSKGLVAKRILSTTQERGDADDDLPDFVLCVGDDRSDEDMFEVIAAAAAARGVSSLQAEAEVFACTVGRKPSKAKYYLDDPADIVRLVQGLASVSDDDQTHAPPPPLPRWRRRRTPCRGEPCRRARGAVSSRWHETLWLWWKN

SEQ ID NO: 5097 - protein, 520 aa, Zea mays
  Clone ID: PAT_MRT4577_17042C.1.pep
MAFRNMVCTPQVINLTSDSERGQAQGGNGSEISEQGAQHAVRVVGNAMNIGLSGVRSYYDMSINHHHQSVHNPPPNLGVDSGFVFASNMYNPCMSSTSMNRHVSHAQSFGSGNQVLPQNQVPGTMDESSRNDSIGESAREHIKRKNAAVAGSYHFVNGFASSSSSSHAPQNPMLGPWDPSFESTVSSNVAPFNPSEYHGHNNSWPSLEGSSITGSNGFNSMVVHPDSVQRGNYTFPPTHISHSWMSHATNGIADGVPQWEYANATANIQGRFAHSGATEIANVGFHEYQNGPSTICRGPVPYFHQHAMHGMQALDPTQMQVPYQQCHSNGFLHGGINYPGNRLQLGPRNPVLFTSSERAFGPPQHPFLANPVNHRNIRILPPEHATIMDFSRLYEVSNTVDEHRDMRLDIDSMTYEELLALEEQIGDVNTGLTKSHIVDKLRTSLYVPGISSMSDQPSKSSLENDACIICQEEYQARDCVGTLDCGHRYHAECVKQWLMVKNLCPICKTTALSANRRQGQ

SEQ ID NO: 5098 - protein, 543 aa, Zea mays
  Clone ID: PAT_MRT4577_17046C.1.pep
MAFRNMVCTPQVINLTSDSERGQAQGGNGSEISEQGAQHAVRVVGNAMNIGLSGVRSYYDMSINHHHQSVHNPPPNLGVDSGFVFASNMYNPCMSSTSMNRHVSHAQSFGSGNQVLPQNQVPGTMDESSRNDSIGESAREHIKRKIAAVAGSYHFVNGFASSSSSSHAPQNPMLGPWDPSFESTVSSNVAPFNPSEYHGHNNSWPSLEGSSITGSNGFNSMVVHPDSVQRGNYTFPPTHISHSWMSHATNGIADGVPQWEYANATANIQGRFAHSGATEIANVGFHEYQNGPSTICRGPVPYFHQHAMHGMQALDPTQMQVPYQQCHSNGFLHGGINYPGNRLQLGPRNPVLFTSSERAFGPPQHPFLANPVNHRNIRILPPEQHATIMDFSRLYEVSNTVDEHRDMRLDIDSMTYEELLALEEQIGDVNTGLTKSHIVDKLRTSLYVPGISSMSDQPSKSSLENDACIICQEEYQARDCVGTLDCGHKVHAECVKQWLMVKNLCPICKTTAFVCQQKPRKMSRNEISLLLICFDKRSAQFCT

SEQ ID NO: 5099 - protein, 307 aa, Zea mays
  Clone ID: PAT_MRT4577_170642C.1.pep
MEGTAAARKRSRPETANGAAAAGKRSKDTESFQTGLSSKSKPCTKFFSTIGCPFGEGCHFLHFVPGGYPAVAKMLNLSSSAVSAPSRTHVDHAALTGASHPASTVKTRMCTKYNTTEGCKFGDKCHFAHSERELAKPAYMSQEGPPMGGRYGRAEPMQPAAMGPPAGNFGASATAKISVDASLAGGIIGKGGVNTKQISRITGVKLSIRDHESNPNLKNIELEGNFDQIKQASDLVRDLIATISASMPAKNPSAAAAPAGGGRGGGPGGKSSNYKTKLCENFLKGACTFGDRCHFAHGETEQRRGAA

SEQ ID NO: 5100 - protein, 185 aa, Zea mays
  Clone ID: PAT_MRT4577_170683C.1.pep
MEDGSAPRRSTPPTRRSRSAEFHNFSERRRRDKINEKLKALQELLPNCNKTDKVSMLDEAIDYLKSLQLQLQMLVMGKGMSPVVPLELQQYMHYITADPAQLPPLRPSGQQHRQFQITQANPQRQSNVESDFLSQMQNLHSSEPPQNFLRPPKLQLYTPEQRGGLPSTSHNTGWISGSSSYNFME

SEQ ID NO: 5101 - protein, 74 aa, Zea mays
  Clone ID: PAT_MRT4577_170759C.1.pep
TKRCGPFGQVIMFATVMFTLVQRVYFRSSRLLLPICVFDCKVALCQLLVLCSSSAPADPCINQHALWIDGCCYS

SEQ ID NO: 5102 - protein, 459 aa, Zea mays
  unsure (1)..(459): unsure at all Xaa locations
  Clone ID: PAT_MRT4577_170773C.1.pep
PAGPGTAGSXLLLSPLGIVTKLPQPAAATNAERPPASLHLSEWGLSPPSNRSSGTSSTPSFRRRSLQLLLSFPSFNRCNLHFPWSSLINNVXLNLLFCGQFGTSVLVSDRIQGEMISFNNLFWSSLQPSFKFYRKCLTNCPYFALTMHSTTKPLGSSMPVKRAHLKPHAADIKRNPHVHELYKLVYRLPENLSWLLAPPEIPKRPASKKKKQKDEIVAGNSFGVILEWEGVVVDDDDPDLEPRVWYVLSLEEGKSFPPDALLKKIEGMRTDQAIAEVLCWSEDPAEIQRLATHKEVIYQKLQGGYYQLRPHVLDFLNTLVGFDIPIAIAAPRSRKSLEEGIKTVGLQGYFDAIVALEDFCLGKPDGEMFEVAAEQLGLEPDACVVFGNSNLTTESAHNAGMRCVAVAGRHPAYELQSANHVVRWLDQLSIVDLQRLANGEVIGRRGRESDMDMEIVIEE

SEQ ID NO: 5103 - protein, 192 aa, Zea mays
  Clone ID: PAT_MRT4577_170837C.1.pep
MSLCTIARRLCLSKPSSVNRLSVIWAHLYSTEAAKDTGAKKYKYPDVYDPYGPMSLPSEKVVDLADRIAALPPEEIKQIAPALLFRLNQEPPQAISGQGFSFGAQGGAGVGAGKAEEKKAEKTVFDVKLEKFDAAAKIKIIKEIRTFTDLGLKEAKELVEKAPVILKQSLTKDEAEAIIGKIKAAGGVAVME

SEQ ID NO: 5104 - protein, 194 aa, Zea mays
  unsure (1)..(194): unsure at all Xaa locations
  Clone ID: PAT_MRT4577_171218C.1.pep
MVMVSGGGGNAWAKEMTLRRRIASIFNKTQEHFPTLKDYNDYLEEVEDMTFNLIEGIDVEEIEAKIARYQQENAEQIYLSRAKRAEDLAAALKASRMNPVKAEANDXRLLGVLRVLVAGQEFRASMHLPLFXGVAQPRPTGMAPQLIGSGSDPLQGDDEETRRLRAERAARAGGWTAELSKRRALEEAFSAIFI

SEQ ID NO: 5105 - protein, 521 aa, Zea mays
  unsure (1)..(521): unsure at all Xaa locations
  Clone ID: PAT_MRT4577_171286C.1.pep
MSSEASSVVVADENGAAETVGVGRYVEMEKDQDSSAAKSRLSGLLWHGGSAYDAWFSCASNQVAQVLLTLPYSFSQLGMLSGILFQLLYGLMGSWTAYLISVLYVEYRARKEREKADFRNHVIQWFEVLDGLLGRHWRNVGLAFNCTFLLFGSVIQLIACASNIYYINDKLDKRTWTYIFGACCATTVFIPSFHNYRIWSFLGLVMTTYTAWYLAVASLIHGQVDGVKHSGPTKMVLYFTGATNILYTFGGHAVTVEIMHAMWRPQKFKAIYLMATLYVLTLTLPSAASVYWAFGDQLLTRSNALALLPRTAFRDAAVVLMLAHQFITFGFACTPLYFVWEKLVGLHDCRSLCRRAAARLPVVVPIWFLAIIFPFFGPINSAVGSLLVSFTVYIIPALAHMITFRSATARENAMEPPPRLLGRWTGAYMINAFVVAWVLVVGFGFGGWASMTNFVRQIDTFGLFTKCYQCPPPPPXCRSPAAASATSRCHSTAXGLPPTPAPSPAHYFFRHHRHHSHHRGL

SEQ ID NO: 5106 - protein, 262 aa, Zea mays
  Clone ID: PAT_MRT4577_171287C.1.pep
MSSEASSVVVADENGAAETVGVGRYVEMEKDQESSAAKSRLSGLLWHGGSAYDAWFSCASNQVAQVLLTLPYSFSQLGMLSGILFQLLYGLMGSWTAYLISVLYVEYRARKEREKADFRNHVIQWFEVLDGLLGRHWRNVGLAFNCTFLLFGSVIQLIACASNIYYINDKLDKRTWTYIFGACCATTVFIPSFHNYRIWSFLGLVMTTYTAWYLAVASLIHGQVDGVKHSGPTKMVLYFTGATNILYTFGGHAVTVEIMHAM

SEQ ID NO: 5107 - protein, 27 aa, Zea mays
  Clone ID: PAT_MRT4577_171300C.1.pep
KHTNNHELLLNWAPFYWMINNDIPNTS

SEQ ID NO: 5108 - protein, 197 aa, Zea mays
  unsure (1)..(197): unsure at all Xaa locations
  Clone ID: PAT_MRT4577_171309C.1.pep
MGRGRSEIKRIDNPTQRQSTFYKRRDGLFKKARELAVLCDADLLLLLFSASGKLYQYLAPTVPSVKEFVERYEASTHTKVWSDIRQERRRELEKVAKMCDLLEKELRFMTVDDGERYTVPSLAALEHNLEAAVRKVRSEKDRKIGGEMSYLENMIRGRHEERYGLCNKLAHAQASNNEXEGGSTPPSSGLELKLGLN

SEQ ID NO: 5109 - protein, 488 aa, Zea mays
  Clone ID: PAT_MRT4577_171418C.1.pep
MLNCSRKMGRSASVLQVLLVSATIVVAQTQWASGVWGMYCEDLTASAERPHRASVTDFGAVGDGATLNTKAFQNALFHLDSFAKKGGAQLFVPAGRWLTGSFSLISHLTLSLDKDAVILGSPDSSDWPVIDALPSYGRGRELPGKRHQSLIFGSNLTDVIITGANGTVDGQGAVWWDWFHNHTLNYTRPPLVELMYSTRVVISNLTFINSPFWNIHPVYCSQVLVQHLTILAPISSPNTDGIDPDSSTNVCIEDCYVRNGDDIVVIKSGWDEYGISFAHPSSNISIRNITGQTRNSAGLAFGSEMSGGISDVRAEGVRIVNSVHGIRIKTAPGRGGYVKNVYVADVSFDNVSIAIRITGNYGEHPDDGYDRNALPTISNITIKDVVGVKIGVAGMLQGIPGDSFSGICLSNVSLSVRSTDPWNCSLVEGYSSSVSPEVCEQLRATPGPGQMCYGGNYPAAAAQPQPPQKSGASRLVSPFLSISWFLRR

SEQ ID NO: 5110 - protein, 354 aa, Zea mays
  unsure (1)..(354): unsure at all Xaa locations
  Clone ID: PAT_MRT4577_171422C.1.pep
MGKKKKRVDKVFCYYCDREFDDEKILVQHQKAKHFKCHVCHKKLSTASGMAIHVLQVHKESVTKVPNAKPDRESTEIEIFGMQGIPAHVLAAHYGEEEDPSTKVPKVEVPQVRPVIMPNSLGMAFPPRPAYGVAPPIYNPALNPLMARPPIWPAAPAQAWYPQQAAYPQQSAVSVPPIVAGLPPQQPLFPIQNVPTPMTSAAANVLQTSFPMAPPGVPSPVAPHVSQPLFPVNTSAVNGAVNSPFLASVAPGTIPASSSAAVGVAGIGYGTNNQGTXNPAVGSSPAVSNNKASGAQPATNEVYLVWDDEAMSMEERRLSLPKYQVHDETSQMNSVDAAIDRRISESRLAGRMAL

SEQ ID NO: 5111 - protein, 379 aa, Zea mays
  Clone ID: PAT_MRT4577_171541C.1.pep
MGAELGEAGVPARDMVDALEGVRSILLKPSERLDDKRFTRIAGADFDDAGLGLAGLLGSLASTGFQASNLGDAIDVVNQMLDWRLSHEKPSDDCAEAELDPAYRESVKCKIFLGFTSNLVSSGVREIIRFLVQHRMVDVIVTTAGGIEEDLIKCLAPTYRGDFTLPGALLRSRGLNRIGNLLVPNDNYCKFEHWIMPILDKMLLEQSTQNVWTPSKVIARLGKEINDESSYLYWAYKNNIPVFCPALTDGSIGDMLFCHSVHSPGLVVDIVQDVRLMNAETIHASPRKTGIILLGGGLPKHHICNANMLRDGADYAVYVNTAQEFDGSDSGARPDEAVSWGKIKSSARTVKVHCDATIAFPLLVAATFARKVHGTKSTN

SEQ ID NO: 5112 - protein, 104 aa, Zea mays
  Clone ID: PAT_MRT4577_171547C.1.pep
GFVRFSGVQVSRVTRIEMAASGVEYRCFVCGLPWATDDHSLHNACSTYGEVLESKIILDRETHRFRGFGLRTFSTAEAMPNAIQGMNRTELDRRSITVHQGHSH

SEQ ID NO: 5113 - protein, 91 aa, Zea mays
  unsure (1)..(91): unsure at all Xaa locations
  Clone ID: PAT_MRT4577_171659C.1.pep
MSGKQARASKQYEKAAQYIDYHTSFSEDEKKHPRHLQFSGNLYTAACNLKLTDYKETANLCTNVLELHSXHVNAHYRKVQAYIQLTDLDLA

SEQ ID NO: 5114 - protein, 191 aa, Zea mays
  Clone ID: PAT_MRT4577_171718C.1.pep
MSLCTIARRLCLSKPSSGSRLSAIWAHLYSTEAAKDMGAKKYKYPDVYDPYGPMPPPSEKVVELADRIAALPPEEIKQIAPALLLRLNQEPPQAVSGQGFGFGAQVGSGAGSGKAEKKAEKTVFDVRLEKFDAAAKIKIIKEIRTFTDLGLKEAKELVEKAPVVLKQSLTKEEAEAIIAKIKAAGGVAVME

SEQ ID NO: 5115 - protein, 112 aa, Zea mays
  unsure (1)..(112): unsure at all Xaa locations
  Clone ID: PAT_MRT4577_171748C.1.pep
MFLTRQSEEHLELMDACGAGSKGKKGAAGRTADGPSKKSVTRSDKVGLQFPVGRIGRYLKNGRYAQRVGTGAPGYLXPVLEYLATKVMKLAGNAWHDNXKTLMILRHVLLGI

SEQ ID NO: 5116 - protein, 357 aa, Zea mays
  unsure (1)..(357): unsure at all Xaa locations
  Clone ID: PAT_MRT4577_171760C.1.pep
MDKPVAPGIIKEELMEQQPPMQDGVGGGGDAPRPMEGLHEVGPPPFLTKTFDLVEDPATDAVLSWNSARNSFIVWDPHVFADGLLPRLFKHSNFSSFVRQLNTYGFRKVDPDRWEFANEGFLRGQRHLLKMIKRRKPPSAVAPLRQQRAPASCLEVGEFGFEEEIDRLKRDKNILITEVVKLRQEQQSTKDHVRAMEERLRVAEQKQVQMMGFLARAMRNPEFFQQLAQQQDKRKELEDTISKKRRRPIDNTPFYSDGESEQLDSQLKMFESGVLNGLNEPELENLAVNIQELGKGSIDDGNLTQVSDQSELNDDFXGQSFWSKILETRQDXELEGRTEDVNDLAQQLGYLSSSSPK

SEQ ID NO: 5117 - protein, 262 aa, Zea mays
  unsure (1)..(262): unsure at all Xaa locations
  Clone ID: PAT_MRT4577_171761C.1.pep
PFLVYCNLQGFRKVDPDRWEFANEGFLRGQRHLLKMIKRRKPPSAVAPLRQQRAPASCLEVGEFGFEEEIDRLKRDKNILITEVVKLRQEQQSTKDHVRAMEERLRVAEQKQVQMMGFLARAMRNPEFFQQLAQQQDKRKELEDTISKKRRRPIDNTPFYSDGESEQLDSQLKMFESGVLNGLNEPELENLAVNIQELGKGSIDDGNLTQVSDQSELNDDFXGQSFWSKILETRQDXELEGRTEDVNDLAQQLGYLSSSSPK

SEQ ID NO: 5118 - protein, 96 aa, Zea mays
  Clone ID: PAT_MRT4577_171806C.1.pep
CHMVDPRMVKLSQKFDTLHILRAILDSSTGTFIIAGRDGTEDGNRAISTGYTDLVPFGRVFMANPDLPRTFQLDAHLNTYYRDTFYIPDPVIGSLT

SEQ ID NO: 5119 - protein, 105 aa, Zea mays
  unsure (1)..(105): unsure at all Xaa locations
  Clone ID: PAT_MRT4577_17197C.1.pep
MAAKIFXCLLMLLGLSGSAATATILPKCSQAPITVLVSPYLSKAGCFVYENPILXPYQIQQAITGGMLHLSPFVPPQXSALIHQVPLEHLLGKKIRGQXLQQLWV

SEQ ID NO: 5120 - protein, 176 aa, Zea mays
  unsure (1)..(176): unsure at all Xaa locations
  Clone ID: PAT_MRT4577_172100C.1.pep
AHIILYHILGSTVTTAKEARMLALIALLALWASATRATQIPGHXTADMPLGTMNPCMQLCMMQQGLASXMAKPHLTLQQLWDLPIQTMPEMTPQMMTPNMKTPXMMPTMTTPTTMTNTTTXMKMPQCHCNTVSQIMLQQQXPFMLNPKAMTNPPMFXQQPFSRGWIQHATNLHELQ

SEQ ID NO: 5121 - protein, 72 aa, Zea mays
  Clone ID: PAT_MRT4577_172115C.1.pep
GWHARRFPLVVLPGNVYISKILNDPGLMAAFSDPEVMWALQNVMNHPGVIGKPRTNHKGAPIIGKMMAKFSG

SEQ ID NO: 5122 - protein, 138 aa, Zea mays
  unsure (1)..(138): unsure at all Xaa locations
  Clone ID: PAT_MRT4577_172179C.1.pep
FVFIFRAMDGLRVTMRLRDAPLHEFLPEWNIQVMVSESRAETGANQEDALARIEKLXEVNAKLGYLESMLGISHPELSEMQDRAILEAAIAMTNQRDQVFAEIMRPMAGTPQELGHXVTIIRQVAQKVVAKVGKTIRY

SEQ ID NO: 5123 - protein, 115 aa, Zea mays
  Clone ID: PAT_MRT4577_172255C.1.pep
MRGQANGVEDRRQRGDDHEADNDGEEAEEEEGDDEGRHRGQGPPQQRRHQAQRPNSGPQQQQQPRPPPPLARNVGYVGKHRLSAAIARLDQELQSLQEELDELETMESASAACQE

SEQ ID NO: 5124 - protein, 162 aa, Zea mays
  Clone ID: PAT_MRT4577_172258C.1.pep
MRGQANGVEDRRQRGDDHEADNDGEEAEEEEGDDEGRHRGQGPPQQRRHQAQRPNSGPQQQQQPRPPPPLARNVGYVGKHRLSAAIARLDQELQSLQEELDELETMESASAACQEVVTSTEGKPDPLLPVTSGPENSSWDRWFQRVRSRSNKWWASKGPDFS

SEQ ID NO: 5125 - protein, 251 aa, Zea mays
  Clone ID: PAT_MRT4577_172365C.1.pep
MMEPGAPYFGAMGSSASGAGGGFYQPFNSNLAGAGSSTGIQSFPCVRLRGLPFDCNDIDVCKFFVGLDIVDCLLVNKNGRFTGEAFVVFPTSMQAEFALHRDRQNMGRRYVEVFRCKKHEYYCAIANEVNQGGYFEPEYRRSPPPPRPRKPSEDKGSMEYTEVLKLRGLPYSATTEDIIKFFLEYELAEENVHIAYRTDGKATGEAFVEFPTAEVAKTAMCKDKMTIGTRYVELFPSTPEEASRAKSRGRH

SEQ ID NO: 5126 - protein, 303 aa, Zea mays
  Clone ID: PAT_MRT4577_172366C.1.pep
MNTSPSRYRAMMGGWGGSDGYEGSKRTRMMMESNPYFAVNAGSPLDVSKRARMMEPGAPYFGAMGSSASGAGGGFYQPFNSNLAGAGSSTGIQSFPCVRLRGLPFDCNDIDVCKFFVGLDIVDCLLVNKNGRFTGEAFVVFPTAMQAEFALHRDRQNMGRRYVEVFRCKKHEYYCAIANEVNQGGYFEPEYRRSPPPPRPRKPSEDKGSMEYTEVLKLRGLPYSATTEDIIKFFLEYELTEENVHIAIRSDGKATGEAFVEFPTAEVAKTAMCKDKMTIGTRYVELFPSTPEEASRARTRGRH

SEQ ID NO: 5127 - protein, 295 aa, Zea mays
  Clone ID: PAT_MRT4577_172368C.1.pep
MMGGWGVSDGYEGSKRTRMMMESNPYFAVNAGSPLDVSKRSRIVEPGPPYFGAMGSNTGGASGGFYQPFNSSNLAGAGASTGIQNFPGVRLRGLPFDCNDIDICKFFVGLDIVDCLLVNKNGRFTGEAFVVFPTAMQTEFALHRNRQNMGRRYVEVFRCKKQEYYSAIANEVSQGGYFESEYRRSSPPPRPPKKTAEDKGSMEYTEVLKLRGLPYSATTEDIIKFFLEYELTEENVHIAIRSDGKATGEAFVEFPTAEVAKTAMCKDKMTIGTRYVELFPSTPEEASRARTRGRH

SEQ ID NO: 5128 - protein, 168 aa, Zea mays
  unsure (1)..(168): unsure at all Xaa locations
  Clone ID: PAT_MRT4577_172423C.1.pep
MTREEHHXESNAYAAXSKTYPHDAXAARNNGFFGIKNRPCKAAKAPTSNSAXHGHAKCXLLSIDIFHVKKLEHIVPSSLNCDIPPENRTEHQLIVYIXDGVVXLLTSDDNTKDDLMTPPCMYTLVTLIXEGVESGQDLAATVQPAMTDQQICALKDVFPSNFPALEYC

SEQ ID NO: 5129 - protein, 553 aa, Zea mays
  unsure (1)..(553): unsure at all Xaa locations
  Clone ID: PAT_MRT4577_172472C.1.pep
DSALFNRSLLHRPWYPLSTHCHWLLSWRSLPSPCPCTSQRFQIFGQTKIFSLFHRHPGLDFGGGPSEQAFLLSRTKRPFTPSQWMELEHQALIYKYLNAKAPIPSSLLVSISKSFRSSXEVCMHVLNHKTKKEVLYFKAVMLAPAINKPNEKREKVHILFCTNXKNNQTIIYAIKIDHCIAFLSINVIRXDRLSNAVSWRPLYQGYANADSDPEPGRCRRTDGKKWRCSKEAMPDHKYCERHINRNRHRSRKPVENQPRKATKEVTTAAAGSLPCAGPQGSLKKAKVNDSKPGTGSYWTDSLNRXYHQSHLLVLASYLNNKIPTXLVNPIIRASTMLHFQVLIWNSISMLWFXNVSCHLAFIIIILISTRPYIFXTMLSREKANKPTDDESLLLSSTKNSQPTLSLLTQLKQQNKPDKLGPTPENEPNSDTMLKAWGGSHHKSISSTQRHDAESLQSVLQNFSLAQNDRLESEKNRYSDSVLVSSAFYSADGPQTTCLTPNMTQVQQDCISSSWEMPQGGPLGEILTNSKISEDLSKCGSRSYGWLLNLDHAP

SEQ ID NO: 5130 - protein, 93 aa, Zea mays
  unsure (1)..(93): unsure at all Xaa locations
  Clone ID: PAT_MRT4577_172520C.1.pep
IEKFKIFISYILWVNLKAIDRLEEAEALKMEIIPNPKEVDGVKVLXLXTASGASIRFFDKAIGINVFCSRFFPLNATFDXLLRWQSDLYTIDY

SEQ ID NO: 5131 - protein, 82 aa, Zea mays
  unsure (1)..(82): unsure at all Xaa locations
  Clone ID: PAT_MRT4577_172773C.1.pep
GSPGFGFVGGRIEMAASDVEDRCVVGGLAWATDDHSLHDAFSTYGEVLEARIILDRWTHRSRSXSFGSFSTEEALLYVIDGM

SEQ ID NO: 5132 - protein, 461 aa, Zea mays
  Clone ID: PAT_MRT4577_173322C.1.pep
MDVERKVVEADDDGRVRTGTVWTATTHAITAVIGSGVLALPWSVAQMGWVLGPVALVGCAYITYYTAVLLSDCYRTPDPVHGKRNRTYMDVVRSCLGPRDVVVCGLAQYAILWGTMVGYTITTATSIMAVARTDCRHHRGHDAACASSGTVYMVAFGVVEVVLSQFPSLEKLTIISVVAAVMSCTYSFVGLFLSAAKLASNHGARGSLLGVKIAAGVSASTKTWHSLQALGNVAFAYTYSMLLIEIQDTVKAPPSENVTMKRASFYGISVTTIFYVSLGCIGYAAFGNAAPGNVLTGFDEPFWLVDVANIAVVVHLVGAYQVYAQPIFACYEKWLGSRWPDSAFFHHEYAVRLPGCAVRFTMCKLVLRTAFVAATTVVSLMLPFFNAVLGLLGAIAFWPLTVYFPVTMYIAQAKVAPGSRKWVALQALNVGALLVSLLAAVGSVADMVQRLGHVTIFQTQL

SEQ ID NO: 5133 - protein, 765 aa, Zea mays
  Clone ID: PAT_MRT4577_17336C.1.pep
MAVLGTAAVEVLIPVAALVGIAFALLQWYVVARVPVPSHAGEDGGGGGNKNVREEEEHVEEDGMDYLLVEARCAEIQRAISVGATSFLLTEYKYLAVFTAAFAVVIFVFLGSAQRFSARPGPCAYDPSRECRPALANAAFSAVAFLLGAATSVLSGYLGMRVATFANARTALEARHGVGRAFAAAFRSGAAMGFLLASSALLVLYAAVNLFGLYYGDDWGGLYESITGYGLGGSSVALFGRVGGGIYTKAADVGADLVGKVERNIPEDDPRNPAVIADNVGDNVGDIAGMGSDLFGSYAESSCAALFVASISSFGAEHNLTAMMYPLLISAVGLLVCAITTVVATDVTEVKGSDEVGPALKRQILISTVLMTAGIAAVTFLGLPPSFTLFDFGNDKHVKNWHLFICVSAGLWAGLVIGYVTEYFTSNAYGPVRAVARSCRTGAATNVIFGLALGYKSVIVPILAIAAAIYASFPLAAIYGIALAALGMLSTIATGLAIDAYGPISDNAGGIAEMAGMPHRVRERTDALDAAGNTTAAIGKGFAIGSAALVSLALFGAYVSRAGITAVDVLSPRVFVGLLLGAMLPYWFSAMTMRSVGSAALRMVEEVRRQFDTIPGLAEGLAVPDYATCVRISTDASLKKMMAPGALVMFSPLVAGTLFGVETLAGLLAGALVSGVQVAISASNSGGAWDNAKKYIEAGLSEEARSLGPKGSEAHKAAVIGDTIGDPLKDTSGPSLNILIKLMAVESLVFAPFFAAHGGIIFDHL

SEQ ID NO: 5134 - protein, 77 aa, Zea mays
  Clone ID: PAT_MRT4577_173437C.1.pep
GWTNWALSNGKREHFNRREQPRSPFWGPCCPWAPTGGPFPWQAFVTPGGGSLGTFFCPHPPKKWSKAPSPKWRQGCP

SEQ ID NO: 5135 - protein, 66 aa, Zea mays
  Clone ID: PAT_MRT4577_17351C.1.pep
LMERGFNLPDPKEFASSIYKSVPKSLDFSPHPAVEERDEAEEQPEVEKKEPAAKEGLEPSFDKDEL

SEQ ID NO: 5136 - protein, 120 aa, Zea mays
  unsure (1)..(120): unsure at all Xaa locations
  Clone ID: PAT_MRT4577_173645C.1.pep
MAAKILRLVMLLGLTASXAATATIFPQXXQAPIAFHLHPDLSPAASSEXQNPILXPYMIQQAIAACILPLSPVVLLQSXALLQQLPKEHLLAQNIRAQQLRQPVLAYHADYSQQQQFLPF

SEQ ID NO: 5137 - protein, 519 aa, Zea mays
  Clone ID: PAT_MRT4577_173809C.1.pep
MLGVGMAAAVLLGAVALLLADAAARRAHWWYREAAEAVLVGAVALVVVDAAARRAHGWYREAALGAARRARLPPGEMGWPLVGGMWAFLRAFKSGKPDAFIASFVRRFGRTGVYRSFMFSSPTVLVTTAEGCKQVLMDDDAFVTGWPKATVALVGPRSFVAMPYDEHRRIRKLTAAPINGFDALTGYLPFIDRTVTSSLRAWADHGGSVEFLTELRRMTFKIIVQIFLGGADQATTRALERSYTELNYGMRAMAINLPGFAYRGALRARRRLVAVLQGVLDERRAARAKGVSGGGVDMMDRLIEAQDERGRRLDDDEIIDVLVMYLNAGHESSGHITMWATVFLQENPDMFARAKAEQEAIMRSIPSSQQGLTLRDFRKMEYLSQVIDETLRLVNISFVSFRQATRDVFVNGYLIPKGWKVQLWYRSVHMDPQVYPDPTKFDPSRWEGHSPRAGTFLAFGLGARLCPGNDLAKLEISVFLHHFLLGYKLARTNPRCRVRYLPHPRPVDNCLAKITRVGS

SEQ ID NO: 5138 - protein, 92 aa, Zea mays
  Clone ID: PAT_MRT4577_173816C.1.pep
MATPDNTGHRHPLHIFGEWYVYNPATSEGFIVIFNNASYYKKTTTGPEAGNARTGIPPVFRNSGRDGGYRPDFGDGNQYTQPTLKKLAFCGC

SEQ ID NO: 5139 - protein, 49 aa, Zea mays
  unsure (1)..(49): unsure at all Xaa locations
  Clone ID: PAT_MRT4577_174037C.1.pep
MADYCGGLTVPVVRTCLMAGSGGLIFGYDIGISXGVSEMEDFLNKIFPG

SEQ ID NO: 5140 - protein, 570 aa, Zea mays
  Clone ID: PAT_MRT4577_174085C.1.pep
MDLHQLLKYRLTGANVYYEFPTENNLANTPWPASPLKSEFSSSSYTPLSSQLECDNLSALSNTPDNQSSTETISAQPISPLEVDSSYKQAAILRENTQVRPDPLYTTSRHNMQHALREIETVLMAPDADDAATSTKHEFEEHKPAQLMRQRSRTWSHESRQPSPGVVRTQLASGYPTASYEFRPEKRLRELREDPQSMVKQLLTKCAEALSEERIEEFLNLVQQARGVVSITGEPIQRLGAYLLEGLVARHANSGTNIYRALKCREPESNELLSYMKILYNICPYLKFGYMAANGAIAEALRNEDRIHIIDFQIAQGTQWITLIQALAARPGGPPHVRITGIDDPVSEYARGEGLDLVGKMLKSMSEEFRIPLEFTPLPGIYATQVTKEMLDIRSGEALAVNFTLQLHHTPDESVDVNNPRDGLLRMVKGLSPKVTTLVEQESHTNTTPFLMRFTETLDYYSAMFESIDTNLPRDNKERINVEQHCLAKDIVNIIACEGKDRVERHELLGKWRSRLTMAGFRPYPLSSYVNSVIRKLLACYSDKYTLEEKDGAMLLGWKNRKLISASAWH

SEQ ID NO: 5141 - protein, 539 aa, Zea mays
  Clone ID: PAT_MRT4577_174111C.1.pep
MACLAPQFKWAPSAAAHMPSSSSSSSYSRCSALRVHCAVTSAAVVEDRTNGSAAQLRLAYAAPAIQRNFEATLASEALLNEEAVVAAAAAEAVALARAAAEAAQEVVQIVQRNNHQPVIRPKKCVDNYLANEILRTEMRSSSPDMYANNPLMEYLDSYGIMDAEDELDAYAQYTENIAVKSARQSERKARRTRAAIKASTTLHASQKVALSSKKKRSKGSSSSMNPLGSLWKMTGRRLLTAKEEVEFSEGIQDLLKLEAIQAELIEYNGGQPTFSQWATAAGVDEKTLRKRLNYGIYCKNRMVTSNVRLVISIAREFEGPGMDFYDLIQEGMQGLIRGAEKFDSSKGFRFSTYSHWWIKQAMRKSVSEQSQIFRLPAHMVEASYRVKECTKRLRRKLRRRPTNEEIAVDTGIPIKRVEAAVNLPKYSVSLDSKIGSTDMTYQEVTADPSAETAEEMLNRMSMKKDVHMALDTLTTREKQVVVLRFGLEDGRIRTLQEIGNIMGVSRERIRQIESGAFRKLRSKKKVKALKDYLVPVGNW

SEQ ID NO: 5142 - protein, 345 aa, Zea mays
  unsure (1)..(345): unsure at all Xaa locations
  Clone ID: PAT_MRT4577_174278C.1.pep
MSAGFQLGVIGSLALSVASSVAIVICNKALISTLGFPFATTLTSWHLMVTFCTLHVAHRLHFFEPKAIDGQTVILFGLLNGTSIGLLNLSLGFNSIGFYQMTKLAIIPFTVLLETIFLNKRFSESIKLSLLVLLLGVGIASITDLKLNMLGSILSGLAIATTCVGQILTNTIQKRLKVSSTQLLYQSAPYQAGILFATGPFVDQLLTDRSVFAHKYSAPVLGFIVLSCLIAVSVNFSTFLVIGTTSPVTYQVLGHLKTCLVLSFGYTLLHDPFTLRNILGILIAIFGMALYSYFSVREGKKKSANDALPVSQMADKEAEPLLATKDNNXHQESKWFISRLLRLFL

SEQ ID NO: 5143 - protein, 75 aa, Zea mays
  Clone ID: PAT_MRT4577_174307C.1.pep
VARVKNGTLKAVRGLRYERGPSLAADAVAAVGPPWLMHKHAIRSRPADVRSVKLGLSLARSLARTTDDAQLANRR

SEQ ID NO: 5144 - protein, 193 aa, Zea mays
  unsure (1)..(193): unsure at all Xaa locations
  Clone ID: PAT_MRT4577_17436C.1.pep
AHRKHSTVPTLAAKKFCLLMLLGLSARAATATIXPQCSQAPIASIVPPYLSPAASSGCENPHLQPYRIQQAIAVGILPLSPSILQQSSXALLQQLPLLHLLAQNIRAQHLPQLVLANLADYSQHQQQLPFNQLRSLNSDAYVHQQQLPFSQLPAAYPQQFMAFNXQLAAQNSPAYLQQEQLLPFSQLAGVSPA

SEQ ID NO: 5145 - protein, 83 aa, Zea mays
  unsure (1)..(83): unsure at all Xaa locations
  Clone ID: PAT_MRT4577_174586C.1.pep
LYFRXVIIMDNCEELIPEWLGFVKGLVDSDDLPLNIFRETLQQNKILKVIRKNLVKXKCIEMYFKIPENMDDYAKVYDGFFKN

SEQ ID NO: 5146 - protein, 70 aa, Zea mays
  Clone ID: PAT_MRT4577_174660C.1.pep
SGVARSLAQPNLRTTVATQHDTWCVELPPERVPPTTYASLHCGLIRDECRRCRPPLSGCGSGIIRLTLGC

SEQ ID NO: 5147 - protein, 81 aa, Zea mays
  unsure (1)..(81): unsure at all Xaa locations
  Clone ID: PAT_MRT4577_174833C.1.pep
MAATVSSFPVVNMERAETEERTTAMEVIRNGCENWGFFELLKHGISHELIDEVERLTEGALADXREAKYQEFAARTLETGG

SEQ ID NO: 5148 - protein, 78 aa, Zea mays
  Clone ID: PAT_MRT4577_174881C.1.pep
ENPSRHRRRKRKDTVPWHKGGLSGNNPTPLILARIHIGTGGTNAHQLAMRERYKVRTHIPADILPCPYFYHWPGQTSR

SEQ ID NO: 5149 - protein, 370 aa, Zea mays
  Clone ID: PAT_MRT4577_174940C.1.pep
MSVLTCVIESMGSSCSRSHSFDEAEAAENAKSADIDRRILQETKAEQHIHKLLLLGAGESGKSTIFKQIKLLFQTGFDEAELRSYTSVIHANVYQTIKILYEGAKELAQVEPDSSKYVLSPDNQEIGEKLSEIGARLEYPSLNKERVQDVRKLWQDPAIQETYSRGSILQVPDCAQYFMENLDKLSEEDYVPTKEDVLHARVRTNGVVETQFSPLGESKRGGEVYRLYDVGGQRNERRKWIHLFEGVNAVIFCAAISEYDQMLFEDETKNRMMETKELFDWVLKQRCFEVPLSVCEWFKDYQPTAPGKQEVEHAYEFVKKKFEELYFQSSKPDRVDRVFKIYRTTALDQKLVKKTFKLIDESMRRSREGT

SEQ ID NO: 5150 - protein, 390 aa, Zea mays
  Clone ID: PAT_MRT4577_174943C.1.pep
MSVLTCVIESMGSSCSRSHSFDEAEAAENAKSADIDRRILQETKAEQHIHKLLLLGAGESGKSTIFKQIKLLFQTGFDEAELRSYTSVIHANVYQTIKILYEGAKELAQVEPDSSKYVLSPDNQEIGEKLSEIGARLEYPSLNKERVQDVRKLWQDPAIQETYSRGSILQVPDCAQYFMENLDKLSEEDYVPTKEDVLHARVRTNGVVETQFSPLGESKRGGEVYRLYDVGGQRNERRKWIHLFEGVNAVIFCAAISEYDQMLFEDETKNRMMETKELFDWVLKQRCFEKTSFMLFLNKFDIFERKIQKVPLSVCEWFKDYQPTAPGKQEVEHAYEFVKKKFEELYFQSSKPDRVDRVFKIYRTTALDQKLVKKTFKLIDESMRRSREGT

SEQ ID NO: 5151 - protein, 88 aa, Zea mays
  unsure (1)..(88): unsure at all Xaa locations
  Clone ID: PAT_MRT4577_174972C.1.pep
MHNSVPTVAAKIFCFLMLLGLSASAATATIVPQCSQAPIASLLPPYLXSGVLSMXENPFLEXYRIQQGVGAGILPLSSLFLQRPGSLL

SEQ ID NO: 5152 - protein, 94 aa, Zea mays
  Clone ID: PAT_MRT4577_175212C.1.pep
PRVRPRVRPRVWFVGDRIEMGASDVEYRCFVRRLFWATDYHFLHNGFSTYRVVLESNIILDQETHKSRGFRFLTFFTEDAMRNAIVGMNGTELD

SEQ ID NO: 5153 - protein, 103 aa, Zea mays; identical to SEQ ID NO: 3995
  Clone ID: PAT_MRT4577_175238C.1.pep

SEQ ID NO: 5154 - protein, 599 aa, Zea mays
  Clone ID: PAT_MRT4577_175240C.1.pep
MGGEAPEPRRLTRALSIGGGDGGWVPEEMLQLVMGFVEDPRDREAASLVCHRWHRVDALSRKHVTVPFCYAVSPARLLARFPRLESLAVKGKPRAAMYGLIPDDWGAYARPWITELAAPLECLKALHLRRMVVTDDDLAELVRARGHMLQELKLDKCTGFSTHGLRLVARSCRSLRTLFLEECQIDDKGSEWIHDLAVCCPVLTTLNFHMTELEVMPADLKLLAKSCKSLISLKISDCDLSDLIEFFQFATALEEFAGGTFNEQGELSKYVNVKFPSRLCSLGLTYMGTNEMPIMFPFSAILKKLDLQYTFLTTEDHCQLIAKCPNLLVLAVRNVIGDRGLGVVADTCKKLQRLRIERGDDEGGVQEEQGGVSQVGLTAIAVGCRELEYIAAYVSDITNGALESIGTFCKKLYDFRLVLLDREERITDLPLDNGVRALLRGCTKLRRFALYLRPGGLSDAGLGYIGQCSGNIQYMLLGNVGETDDGLISFALGCVNLRKLELRSCCFSERALALAILHMPSLRYVWVQGYKASQTGRDLMLMARPFWNIEFTPPNPKNGGWLMEDGEPCVDSHAQILAYHSLAGKRLDCPQSVVPLYPA

SEQ ID NO: 5155 - protein, 599 aa, Zea mays
  Clone ID: PAT_MRT4577_175243C.1.pep
MGGEAPEPRRLTRALSIGGGGGGWVPDEMLQLVLGFVEDPRDREALSLVCRRWHRVDALSRKHVTVPFCYAVSPARLLARFPRLESLAVKGKPRAAMYGLIPDDWGAYARPWVTELAAPFECLKALHLRRMVVTDDDLAELIRARGHMLQELKLDKCTGFSTDGLRLVARSCSSLRTLFLEECQINDKGSEWIRDLAVNCPVLATLNFHMTELEVMPVDLELLAKSCKSLISLKIGDCDLSDLIGFFQSATSLEEFAGGTFNGQGELTKYGDVKFPSRICSLGLTFMGASEMPIIFPFAAILKKLDLQYTFLTTEDHCQLIAKCPNLLVLAVRNVIGDRGLGVVADTCKKLQRLRIERGDDEGGVQEEQGGVSQVGLTAIAVGCRELEYIAAYVSDITNGALESIGTFCKKLYDFRLVLLDREERITDLPLDNGVRALLRGCTMLRRFALYLRPGGLSDAGLGYIGQCSGNIQYMLLGNVGETDDGLISFALGCVNLRKLELRSCCFSERALALAILSMPSLRYVWVQGYKASQTGRDLMLMARPFWNIEFTPPSSQNAGRLIEDGEPCVDSHAQILAYGSLAGKRLDCPQSVVTLYPA

SEQ ID NO: 5156 - protein, 87 aa, Zea mays
  unsure (1)..(87): unsure at all Xaa locations
  Clone ID: PAT_MRT4577_175247C.1.pep
GSRIHLQLFLDDGPGALXSSAXDGDDGGSVAGMTDLVIGYVLLRRRLGLLGTSTSTFWPPPQPCCCLVERLSCSVSGGVVVCRPTSR

SEQ ID NO: 5157 - protein, 107 aa, Zea mays
  unsure (1)..(107): unsure at all Xaa locations
  Clone ID: PAT_MRT4577_17540C.1.pep
RVRIHLTQMTFWFSRHDVGKVIGGYLAQGILQHDPFEVLDQRGVGELLKLATYWGPIARPNLKVGTCGXHCGEPYSEALFAKAGLDYVSRSPFTVPIAMLAATQVLV

SEQ ID NO: 5158 - protein, 129 aa, Zea mays
  unsure (1)..(129): unsure at all Xaa locations
  Clone ID: PAT_MRT4577_175419C.1.pep
MAAKTSCFLMLLGLSACVATATILQQCSQPPIAYIVHTYLXPAVYSMCETPRVQPYRIQQAIATGILPLSPLLLQQPSDLLQHIPLVHXVAQNIRAQQLRQLVLANLGAYSQQHQFLPFDQLSALNSAA

SEQ ID NO: 5159 - protein, 89 aa, Zea mays
  Clone ID: PAT_MRT4577_175436C.1.pep
KVWLPGPLKTPARFGGAGVLAGVGGGGAVLVLAGHAEGVNYRVLGSHGGADNRVLGPQGRADNRVLGPQGRANHLFPCLLKKSAVFVLA

SEQ ID NO: 5160 - protein, 202 aa, Zea mays
  unsure (1)..(202): unsure at all Xaa locations
  Clone ID: PAT_MRT4577_175464C.1.pep
MADVDEYRCFIGNLSWSTTDESLKDAFSKFGNLTEAKVVLDKFSGRSRGFGFVTFDEKQAMEDAIEGMNGLDLDGRNITVDKAQPQGPGRDRNGDRDYDRERGSRYERGRDYGGGRAPRGGGGGGGDCFKCGKPGHFARECPSGDGGRGDRYGGRDDRYGGGGGRXGRYGSDRGGDRYSGRSRDGGSYGGGDRYSRDRSGPY

SEQ ID NO: 5161 - protein, 75 aa, Zea mays
  unsure (1)..(75): unsure at all Xaa locations
  Clone ID: PAT_MRT4577_175476C.1.pep
MAAADVEYXCFAXGLALXTSNEVLENAYVCYCXILDSNVIXTDRETVRSYGFGFVTFYYENYMLDAIENMNGNDL

SEQ ID NO: 5162 - protein, 98 aa, Zea mays
  Clone ID: PAT_MRT4577_175574C.1.pep
ASAVATVAAAAATPTETGVAHRWGPCGQVILFAAVMFTLVQRVHLRWSSLLMPICVFDGKVALCTVVSAVFILGSIKACINQHGLWINGCCYSCKDLF

SEQ ID NO: 5163 - protein, 559 aa, Zea mays
  unsure (1)..(559): unsure at all Xaa locations
  Clone ID: PAT_MRT4577_17557C.1.pep
MEGITSSSSRSRTKGPADEMWDVQSTTSEVTFKTADKEEATSADGATNSASQTPKNEIRHERKVHKSLWAYVADIIRLGFIQHGDSHDSSHKSVKKSSSNNSQSTEGWLSSQERDNDGTKKKNGSTNTLGGGEQESGVASMSNEEYLHTDTHGLQISETVVEPQVGRSEGDLLPTSSTDDLHISGGRTKQSDAGELRKGNSIDDSTPTYLDITIGHLPERKTASRITTEGSGEFITGKGMLAGTSSVTISAMEAGRSEDGADSIYDPSGAITPYHDSQTQTVMPHENTSTGILGPPALPVGVSTRFEEKNIMQEAPEIIKTGGKDTELKRRNFQRNKQVLKDTFDEWEEAYQRDAEQRKADELFMREALLEAQRAADIWEVPVGAVLVQNGEIIARGCNLVEDHRDSTAHAEIVCIREASNKLKTWRLADTTLYVTLEPCAMCAGAILQARIDTVVWGAPNKLLGADGSWVRLFPGDGQTSTLXNKPEPXAGPVHPFHPKIAIRRGVLSAECSEIMQQFFQLRRKKKPQSPPQAHRHGHHHPVKFFSKMHHMFGTIFCL

SEQ ID NO: 5164 - protein, 217 aa, Zea mays
  unsure (1)..(217): unsure at all Xaa locations
  Clone ID: PAT_MRT4577_175664C.1.pep
MSSAAPLLGGEAGGGEXRRGRRRRXSSWVGRVVDAAEARAQLGFAVPMVLTSMAYYGIPLVSVMFSGQLGDVHLAGATLGNSWATVTGYAFVTGLSGALETLCGQAYGAGLHRMLGLYLQSSLIMSAAASALVSALWWFTEPVLLLLRQEPEASRAAAAFVRAQAPGLFAFSFVQCLLRYLQTQSVVLPLVACSVAPFALHVALAHLMVNVLGLGLT

SEQ ID NO: 5165 - protein, 377 aa, Zea mays
  Clone ID: PAT_MRT4577_176181C.1.pep
MAQDEAVATQKTGNTTSPSKDYPTPSPYPDWSTMQAYYGPGVLPPTYFTPAIAPGHPPPYMWGPQPIMPPPFGTPYAAVYPHGGAYPHPLVPMMSTPMSVEPAKSANSKEKNSNKKLKEIDRTAVSAGSGNSKRTVSSIEDYSAEGSSDVNDQNVNETSRKRSSDGGPGAETTTGGNTECVLAPNHTLGNATILPQHCFSAPVIKPSATNVANSRAIGTALSPPPGVMVPVHNAVPSDLSVKDERELKREKRKQSNRESARRSRLRKQAETEELATQVESLAAENTSLRSEIGRLTESSEKLRLENSALMVKLKDTAEPSPSKAAASPSSPRASAENFLSMIDSANAPSVSRHTEHGGPRLRQLLDSSPATDVAAVS

SEQ ID NO: 5166 - protein, 388 aa, Zea mays
  unsure (1)..(388): unsure at all Xaa locations
  Clone ID: PAT_MRT4577_176183C.1.pep
SELLLRWWTWRRNHHRETATQKTGNTTSPSKDYPTPSPYPDWSTMQAYYGPGVLPPTYFTPAIAPGHPPPYMWGPQPIMPXXFGTPYAAVYPHGGAYPXXXVPMMSTSMSVEPAKSANSKEXXSNKKLKEIDRTAVSAGSGNSKRTVSSIEDYSAEASSDVNDQNVNETSRKRSSDGGPGAETTTGGNTECVLAPNHTLGNATILPQHCFSAPVIKPSATNVANSRAIGTALSPPPGVMVPVHNAVPSDLSVKDERELKREKRKQSNRESARRSRLRKQAETEELATQVESLAAENTSLRSEIGRLTESSEKLRLENSALMVKLKDTAEPSPSKAXXXXXXXXASAENFLSMIDSANAPSVSRHTEHGGPRLRQLLDSSSATDVAAVS

SEQ ID NO: 5167 - protein, 377 aa, Zea mays
  Clone ID: PAT_MRT4577_176184C.1.pep
MAQDEAVATQKTGNTTSPSKDYPTPSPYPDWSTMQAYYGPGVLPPTYFTPAIAPGHPPPYMWGPQPIMPPPFGTPYAAVYPHGGAYPHPLVPMMSTPMSVEPAKSTNSKEKNSNKKLKEIDRTAVSAGSGNSKRTVSSIEDYSAEASSDVNDQNVNETSRKRSSDGGPGAETTTGGNTECVLAPNHTLGNATILPQHCFSAPVIKPSATNVANSRAIGTALSPPPGVMVPVHNAVPSDLSVKDERELKREKRKQSNRESARRSRLRKQAETEELATQVESLAAENTSLRSEIGRLTESSEKLRLENSALMVKLKDTAEPSPSKAAASPSSPRASAENFLSMIDSANAPSVSRHTEHGGPRLRQLLDSSPATDVAAVS

SEQ ID NO: 5168 - protein, 162 aa, Zea mays
  unsure (1)..(162): unsure at all Xaa locations
  Clone ID: PAT_MRT4577_176191C.1.pep
MAMQDSEEHHFKSKAAAGYSKTYPXQVGSXRKNGFIDYKNRPCTVGEVLTXKTANNAHAKCHFVAIDIFNGQKARRYVTLRKQXDIPYGNRTENQVIVIXEDGFVTLFTXDGDTKDDLRLPTDETLVAQIKEGSETRKDLAGTDQHAMGEEQIXALKDVDPQ

SEQ ID NO: 5169 - protein, 109 aa, Zea mays
  Clone ID: PAT_MRT4577_1762C.1.pep
MSGSGGGVWVFNKKKGVMQLEQPAPASRKALVYVPTDEVVRSVEALERRLGALGWERYYENRSVVQLHRRGGGADLITIPRDFAGLRSTHMYDVVVKNRHHFKVVDRDA

SEQ ID NO: 5170 - protein, 80 aa, Zea mays
  Clone ID: PAT_MRT4577_176389C.1.pep
PWSLNSSAYLQLQQLLLFKQLAGASPTAFFTQPQLLSFYQHAAPNAGTLLQLQQLLTFNQLALSNPAAFYQQPIIGGALF

SEQ ID NO: 5171 - protein, 63 aa, Zea mays
  unsure (1)..(63): unsure at all Xaa locations
  Clone ID: PAT_MRT4577_176479C.1.pep
MASIVASRRAFPLVRALDKLIAASSAPGTVSALIPFADARGLQVYNTCPSLQLYXGAESEDDS

SEQ ID NO: 5172 - protein, 78 aa, Zea mays
  Clone ID: PAT_MRT4577_176683C.1.pep
KGKLIAQKWRFEKWPHGLYSSVRLMLDKPQFGVPVIKLKQIGVPKKNKYGNSTVVENPEKGWRDFIFHGKRGMFGFGI

SEQ ID NO: 5173 - protein, 108 aa, Zea mays
  unsure (1)..(108): unsure at all Xaa locations
  Clone ID: PAT_MRT4577_176748C.1.pep
PARPTRTGWLLLPLRVGFGFVRLSGLGCVHDRIEMAASDVEYRXFVGGLTWATDDHXLHNAFSNYGEVLESKIILDPETHKSADYXYVTFSTEEAMRNAIDGMNCKEL

SEQ ID NO: 5174 - protein, 84 aa, Zea mays
  Clone ID: PAT_MRT4577_176784C.1.pep
VAAEQRAWRKQAFKYWPYRVLFAPAVPSVKIVEHKQQTLLIFFSLSFLFFSFLWLPLSVVKTHAPVSPICKASKGSVTFSCPTE

SEQ ID NO: 5175 - protein, 95 aa, Zea mays
  Clone ID: PAT_MRT4577_176815C.1.pep
MRRRVRRVIGVEDRRVADYIPSPWHAVQLLVLSGAGSVNIYDANAGVLRTLAGTRWAVSIMVPDQITPDLAAYSAAADRWVADNLVPYYPGTRVK

SEQ ID NO: 5176 - protein, 234 aa, Zea mays
  unsure (1)..(234): unsure at all Xaa locations
  Clone ID: PAT_MRT4577_176859C.1.pep
MTAPAELSREENVYMAKLAEQAERYEEMVEFMEKVAKTVDSEELTVEERNLLSVAYKNVIGARRAPWRIISSIEQKEESRGNEDRVTLIKEYRGKIETELSKICDGILKLLETHLVPSSTAPESKVFYLKMKGDYYRYLAEFKSGPERKDAAENTMVAYKAAQDIALAELAPTHPIRLGLAXNFSVFYYEILNSPDRACNLAKQAFDEXIXSELDTLSEKIYQDSTLIMQLLHD

SEQ ID NO: 5177 - protein, 446 aa, Zea mays
  Clone ID: PAT_MRT4577_177068C.1.pep
MAGSSMDTEAAGKELKQGSGGGGGYTMPATAHAVDTDSWQQVGLLLVIGFNCAYVLSFSNLMMVPLGWAWGVACLLLVGAAAWYANWLLAGLHFVDGQRFIRYRDLMGFIFGRNMYYITWFLQFATLLLCNMGFILLGARALKAINTEFTHTPARLQWFITATGIVYFAFAYFVPTISAMRNWLATSAALTLAYDVALLAILIRDGKSNKQKDYDVHAGSQAEKVFNALGAVAAILVCNTSGLLPEIQSTVREPAVRGMRRALLLQYTAGAAGYYGISVAGYWAYGSAVSEYLPNELGGPRWAAVLINATAFLQSIVSQHLFTVPIHEAMDTRLQRLDEGMFSRYNLTRRVCARGLVFGFNVFVTALFPFMGDFVNLVGSLALVPLTFTFPSMAVLKIKGKSGGRCNRLWHWGIIVLSSALCVATTAAAVRLIFNNARIYHFFADM

SEQ ID NO: 5178 - protein, 78 aa, Zea mays
  Clone ID: PAT_MRT4577_17713C.1.pep
MAASDVEYRCFVVGLTWATDDHSLHNAFSTYREVLESKIILDRETQKSRGFCFVTFSTEEAMRNAIDGMNGKELDGRN

SEQ ID NO: 5179 - protein, 64 aa, Zea mays
  unsure (1)..(64): unsure at all Xaa locations
  Clone ID: PAT_MRT4577_177407C.1.pep
MAAKSXSYXMLIGLSSSAATATIFPQCSQAPITSLLPPNLSPAMSSVCXNPILQPYRIQLAITT

SEQ ID NO: 5180 - protein, 181 aa, Zea mays
  unsure (1)..(181): unsure at all Xaa locations
  Clone ID: PAT_MRT4577_17745C.1.pep
MVRGKTQMKRIENPTSRQVTFSKRRNGLLKKAFELSVLCDAEVALVVFSPRGKLYEFASGSAQKTIERYRTYTKDNVSNKTVQQDIERVKADADGLSKRLEALEAYKRKLLGERLEDCSIEELHSLEVKLEKSLHCIRGRKTELLEEQVRKLKQKCKKQPPXVPMASAPPRAPAVDKRRTV

SEQ ID NO: 5181 - protein, 232 aa, Zea mays
  Clone ID: PAT_MRT4577_17749C.1.pep
MVRGKTQMKRIENPTSRQVTFSKRRNGLLKKAFELSVLCDAEVALVVFSPRGKLYEFASGSAQKTIERYRTYTKDNVSNKTVQQDIERVKADADGLSKRLEALEAYKRKLLGERLEDCSIEELHSLEVKLEKSLHCIRGRKTELLEEQVRKLKQKEMSLRKSNEDLREKCKKQPPVPMASAPPRAPAVDNVEDGHREPKDDGMDVETELYIGLPGRDYRSSKDKAAVAVRSG

SEQ ID NO: 5182 - protein, 376 aa, Zea mays
  Clone ID: PAT_MRT4577_17753C.1.pep
MKIQCDACEGAAATVVCCADEAALCARCDVEIHAANKLASKHQRLPLEALSASLPRCDVCVRVPMLIFLGGCWPACLHWKPRPTLGRSRPKGPCHWLSPPGRRAAAGRLEAPFPTGGMRIQCDACEAAAATVVCCADEAALCARCDVEIHAANKLASKHQRLPLGDAAALPASLPRCDVCQERPAFIFCVEDRALLCRDCDEPIHVPGTLSGNHQRYLATGIRVGFSSVCGASAEGLPPAPPKGSSKPAAVVSAPAAGTTTKTRTVKDALPQEVPSSPFLPPSGWAVEDLLELSDYESSDKKDSSLGLKELEWFEDIDLFHAHSPAKTAMAEFFASPQPVSNAGFYKANGARLFKKSRMEVPDDDDEDYFIVPDLG

SEQ ID NO: 5183 - protein, 267 aa, Zea mays
  Clone ID: PAT_MRT4577_17758C.1.pep
MRIQCDACEAAAATVVCCADEAALCARCDVEIHAANKLASKHQRLPLALGDATAASASSLPRCDVCQEKPAFIFCVEDRALFCRDCDEPIHVPGTLSGNHQRYLATGIRVGFSSVCGAGAGAEGLPPPAPPKGSSKPAAVVSAPAAGATKTTTTVKDTLPQEVPSSPFLPPSGWAVEDLLQLSDYESSDKKDSPLGFKELEWFADIDLFHAHSPAKTTTAEVPELFASPQPASNAGFYKTNGARQSKKPRMEVPEDDEDYFIVPDLG

SEQ ID NO: 5184 - protein, 301 aa, Zea mays
  Clone ID: PAT_MRT4577_177639C.1.pep
MGGFVKTQKTNAYFKRFQVKFKRRRAGKTDYRARIRLINQDKNKYNTPKYRFVVRFTNKDIIAQIVSASITGDIILAAAYSRELPRYGLEVGLTNYAAAYCTGLLLARRVLKIRDLDQEYEGNVEATGEDFSVEPAEERRPFRALLDVGLIRTTTGNRVFGALKGALDGGLDIPHSDKRFAGFKKDDKQLDADIHRKYIYGLHVAEYMKNLADEEPEKYQAHFSEYIKKGIEADDMEALYKKVHAAIRADPSMAKSTKAQPKEHKRHNPKKLTYEQRKARLVERLNALNSSGGVDDDEDDE

SEQ ID NO: 5185 - protein, 223 aa, Zea mays
  Clone ID: PAT_MRT4577_177749C.1.pep
LEKPSFSLLGIMLVVSFGVLLTVAKETEFNLWGFIFIMLAAVMSGFRWSMTQILLQKEEYGLKNPFTLMSHVTPVMAIVTAIISIVMDPWHDFRASHFFDSSAHIIRSSLLLLLGGALAFFMVLTEYVLVSVTSAVTVTVAGIVKEAVTILVAVLFFNDPFTWLKALGLAIIIFGVSLFNIYKYKRFKKGHYNENAGTNTQSSNWTSKYVILDEDTEAQDDTG

SEQ ID NO: 5186 - protein, 470 aa, Zea mays
  unsure (1)..(470): unsure at all Xaa locations
  Clone ID: PAT_MRT4577_177750C.1.pep
MGDCVVEDGHGHHYSEAVEGAVSLTVAVGLDERAEESREEEEGGGQRKKMGGIPREPSFSRWCRDPSAASASNTAAAAATSDSDASEEFELPLLPSSSGGGGSPMDIEVGATARSDDLPISPRLLAKVIGLIACWYTLSTCLTLYNKEMLGKHMWKFPAPFLMNTVHFTMQAVASRAIVWFQQRGLEGGPSKMSWKDYCLRVVPTALATALDINLSNISLVFITVTFATMXQICFSNFHSSVCFHVQAXKPSFSLLGIMLVVSFGVLLTVAKETEFNLWGFMFIMLAAVMAGFRWSMTQILLQKEEYALKNPFTLMSHVAPVMAIVTAIISIVMDPWHDFRASHFFDSSTHIIRSSVLLLLGGALAFFMVLTEYVLVSVTSAVTVTVAGIVKEAVTILVAVLFFNDPFTWLKALGLAIIIFGVSLFNIYKYKRFKKGHHSEDAGTNIQSYNGTSKYVILDDDTEDQDDSG

SEQ ID NO: 5187 - protein, 141 aa, Zea mays
  Clone ID: PAT_MRT4577_177789C.1.pep
GVPSSPVVRHALLLSLLCAGALGFLLCCHGAAVAPAYVTVSAASFAPSSTCSASDPVAPQQNDTFTVLRLTHRHGPCAPLRASSLAAPSVADTLRADQRRAEHILRRVSVFFSPQLWDYKAAAVTVPANCGYDIGTSNYVE

SEQ ID NO: 5188 - protein, 249 aa, Zea mays
  Clone ID: PAT_MRT4577_177993C.1.pep
MGALLLFAVCLLAPIVLACAVRGRKRRAAAPAPAPACGKKALPLPPGSMGWPYVGETLQLYSSKNPNVFFARKQNRYGPIFRTHILGCPCVMVSSPEAARFVLVTQAHLFKPTFPASKERMLGPQAIFFQQGDYHARLRRLVSRAFSPQAIRASVPAVEAVALRSLRSWDGRLVNTFQEMKLYALNVALLSIFGEEEMRYIEELKQCYLTLEKGYNSMPVNLPGTLFHKAMKARKRLSAIVAHIIEARR

SEQ ID NO: 5189 - protein, 470 aa, Zea mays
  Clone ID: PAT_MRT4577_177997C.1.pep
MGAFLLFVCLLAPVVVLACAVRGRKRRASSAAAGGKALPLPPGSMGWPYVGETFQLYSSKNPNVFFARKQNRYGPIFKTHILGCPCVMVSSPEAARFVLVTQAHLFKPTFPASKERMLGPQAIFFQQGDYHAHLRRLVSRAFSPEAIRGSVPAIEAIALRSLESWDGRLVNTFQEMKLYALNVALLSIFGEEEMRYIEELKQCYLTLEKGYNSMPVNLPGTLFHKAMKARKRLGAVVAHIIEARREGERQRGSDLLASFLDDREALTDAQIADNVIGVIFAARDTTASVLTWMVKFLGDHPAVLKAVIEEQQEIARSKGSSGEPLTWADTRRMRTTSRVIQETMRVASILSFTFREAVEDVEYQGYLIPKGWKVMPLFRNIHHSPDHFPCPEKFDPSRFEVAPKPNTFLPFGNGTHSCPGNELAKLEMLVLFHHLATKYRWSTSKSESGVQFGPFALPLNGLPMTFVRKD

SEQ ID NO: 5190 - protein, 759 aa, Zea mays
  unsure (1)..(759): unsure at all Xaa locations
  Clone ID: PAT_MRT4577_178070C.1.pep
MMPVPSFNQCLLNYEMALQYVNRALYLLQFSCGLSHPNSAATYINVAMMEEGMGNVHVALRYLHEALKCNKRLLGADHIQTAASYHAIAIALSMMDAYSLSVQHEQTTMQILQEKLGEDDLRTQDAAAWLEYFESKALEQQEAARRGTPKPDSSIGSKGHLRYETXSSEHFQXNIFKFRLKHLPXKVSDLLDFISSVQECRERREKSKGQQGTEGYRGIHGQLKTAKETPAVDXPYLAYFLSCLIATLSVEVXVFEDLQYFERWTFAIXLPLLRGLVAEIFPIQVNCEQRAXVKLYKRFPEXTLFVIKETDVFRSSCSAGYNVPLYVXSQDQKEDSVTAPSQISFGSFLKTDKLNGDSSIAEDKTCNGSANQEQRTKPTGINRPTSIASKFISYKDVAVSPPGTVLKPILEKKEAKEKGSGHDIYLTLSSEEEDPQFTENEKEKPSEDSSKEVLSSQQDLESHVETPDSNSDENPSAPKKASGSKLSASAPPFNPGSLLSMSHPYSTVAIYDASAVIQAVPNQAMEILPHAIDTRVPRGPRSTLYYRTGHSFQRKQGYTHSQSTIVRGSYSPTTMNPHAAEFVPGKTSQQSDVADREPSPANHVANSDLDVVSQTTDEVKAETPATEKAGQVEKVVSGKGKENRGKDIVRNSYKTELARQILLSFIVKSVHDSLGPSRAEPERKPSGSDEASNEQTSVLGKNASGRKDSDKQEKATEVPKGLKDTEGFTVVSKRRRRPQPFMNPINGLYSQPSICTSVS

SEQ ID NO: 5191 - protein, 51 aa, Zea mays
  Clone ID: PAT_MRT4577_178107C.1.pep
SWTKGCADALFYPEGQRKLNLFFLFKFNAGLTGKGKVLLAGRRVKPGAHSG

SEQ ID NO: 5192 - protein, 305 aa, Zea mays
  unsure (1)..(305): unsure at all Xaa locations
  Clone ID: PAT_MRT4577_178188C.1.pep
MKRQSKRPTASRESPETGEKQKLAFAEEEAPPARKVEPDDEAEMDEDEDELGPGLGGGRAARSPCGLGEKKRRLALEQVRALERCFETDNKLDPDRKARIARDLALQPRQVAVWFQNRRARWKTKTLERDKDALAAEIRELRQKLLPKPEATVKLEATTGNXHGGGAPPGDGRRAARGGLXDGSSDSDSSVVFSDVEASPYSGGAAFEPPALAGLGAPFLDTSVAPTGCSSPPVFVETKWQQHGPTQYPFPFDSYKACAGYGFTEEWLASSDLIGSDGGAAGFFSEDHASSLNFNWCPSGIQGWE

SEQ ID NO: 5193 - protein, 326 aa, Zea mays
  unsure (1)..(326): unsure at all Xaa locations
  Clone ID: PAT_MRT4577_178190C.1.pep
MKRQSKRPTASRESPETGEKQKLAFAEEEAPPARKVEPDDEAEMDEDEDELGPGLGGGRAARSPCGLGEKKRRLALEQVRALERCFETDNKLDPDRKARIARDLALQPRQVAVWFQNRRARWKTKTLERDFAALRARHDALRADCDALRRDKDALAAEIRELRQKLLPKPEATVKLEATTGNXHGGGAPPGDGRRAARGGLXDGSSDSDSSVVFSDVEASPYSGGAAFEPPALAGLGAPFLDTSVAPTGCSSPPVFVETKWQQHGPTQYPFPFDSYKACAGYGFTEEWLASSDLIGSDGGAAGFFSEDHASSLNFNWCPSGIQGWE

SEQ ID NO: 5194 - protein, 202 aa, Zea mays
  Clone ID: PAT_MRT4577_178214C.1.pep
QASSVIHLKAPVKIFGDLHGQFGDLMRLFDEYGAPSTAGDIAYIDYLFLGDYVDRGQHSLETITLLLALKVERPRGVNLIRGNHEAADINALFGFRIECIERMGERDGIWTWHRMNRLFNWLPLAALIEKKIICMHGGIGRSINHVEQIENLQRPITMEAGSVVLMDLLWSDPTENDSVEGLRPNARGPGLVTFGPDRVMEF

SEQ ID NO: 5195 - protein, 298 aa, Zea mays
  Clone ID: PAT_MRT4577_178226C.1.pep
MVEEGATAAASRSGPAPFLSKTHQMVEEPGTDEVISWAEQGRSFVVWKPVELARDLLPLHFKHCNFSSFVRQLNTYGFRKVVPDRWEFANENFRRGEQGLLSGIRRRKSTTPQPSKYGGGSVVNTAFPPPLPFPPPASVTTSGGGGGAGAGNERSSSSASSPPRTDDLTSENEQLKKDNRTLSTELAQARRHCEELLGFLSRFLDVRQLDLGLLMQEDVRAGAGDDAAPRRAMVSQLERGGEEGKSVKLFGVLLKDAARKRARCEEAAASERPIKMIRIGEPWIGVPSSGPGRCGGGN

SEQ ID NO: 5196 - protein, 82 aa, Zea mays
  Clone ID: PAT_MRT4577_178395C.1.pep
MELHVVLFLCPVPTFIRIWKKGSKEQYSPIQYVGTLLNCMMWVLYGLTAVHPHRMLVITINGAGMPMQMTYVAHILLYSEVA

SEQ ID NO: 5197 - protein, 37 aa, Zea mays
  Clone ID: PAT_MRT4577_17855C.1.pep
AGMITEFVISFDDRYLYFVNWLHGDIKQYNIEDPAKP

SEQ ID NO: 5198 - protein, 232 aa, Zea mays
  unsure (1)..(232): unsure at all Xaa locations
  Clone ID: PAT_MRT4577_178582C.1.pep
QADFGRLEIELAEVEMPGLMACRTEFGPSQPFKGAKITGSLHMTIQTAVLIETLTALGAEVRWCSCNIFSTQDHAAAAIARDSAAVFAWKGETLQEYWWCTERALDWGPGGGPDLIVDDGGDATLLIHEGVKAEEEFAKNGTIPDPNSTDNAEFQLVLTIIKESLKTDPLKYTKMKERLVGVSEETTTGVKRLYQMQANGTLLFLLLMVMIWYPRASSTTCXDAALTGRWLM

SEQ ID NO: 5199 - protein, 90 aa, Zea mays
  unsure (1)..(90): unsure at all Xaa locations
  Clone ID: PAT_MRT4577_178635C.1.pep
LFLKHNVPTLPVKIFCLLMLLGISASAATATIFPQCSQAPIASLLSPYLLPAVFSLCXNPILXPYMIXCHIVIGILPLSPLFLQQSLSLL

SEQ ID NO: 5200 - protein, 470 aa, Zea mays
  unsure (1)..(470): unsure at all Xaa locations
  Clone ID: PAT_MRT4577_178810C.1.pep
MASRNHNAAAPQLHHHNRAGVPALGKTKAVPARADALNRRPPLGDIGNLVSVRPATGNXRSRSIXPITRSFGAQLVKKAQAKAAIKNAAILPARHAPRQERKAPVKQQPPPEDIIVLSSDSEQSRAQSESSASSVRSRRKAINTLSSVLSARSKAACGIAGKPRQVVDDIDKLDVNNELAVVEYIEDIYTFYKIAQHERRPCDYIDAQLEINSKMRAILADWIIEVHHKFELMPETLYLTMYIIDQYLSLQPVLRKELQLVGVSSMLIACKYEEIWAPEVNDFILISDSAYSREQILSMEKGILNRLEWNLTVPTVYMFLVRFLKAXATLGGKVEKEMENMVFFFAELALMQYXLVTRLPSLVAASAVYAARLTLKRXAPLWTDTLKHHTGFRXQRPELIECTXRCWXAHSTAPESKLRVVYKKYSSEQFGGVALRPPAEXLQVNEGYFIRVCLLLALGEVAMEGESDIR

SEQ ID NO: 5201 - protein, 84 aa, Zea mays
  Clone ID: PAT_MRT4577_178846C.1.pep
MGAGSSCSQAQIVTAVAVLAAVLLLLAAGVETAFAAVSSGEVTSSVAPCLGYAMDIAETPSAACCTEERSLNSRASSTADRQAT

SEQ ID NO: 5202 - protein, 119 aa, Zea mays
  unsure (1)..(119): unsure at all Xaa locations
  Clone ID: PAT_MRT4577_179029C.1.pep
KHNSVSFLAAKIFCLLMLLGISASAATVTIFPQCLQASIDSFLAAYLSPAESLVCENXIFNRYRMQQAXIAACMLPLSPLFLXQQPSALXQELPLRHLLAHIIRAQQLQQLVLGDLAGY

SEQ ID NO: 5203 - protein, 50 aa, Zea mays
  Clone ID: PAT_MRT4577_179182C.1.pep
RWHALTTATIADIQATCFGIPNNVLRNNPSLAVPSYRLLMRYSSIMKFIG

SEQ ID NO: 5204 - protein, 112 aa, Zea mays
  Clone ID: PAT_MRT4577_179244C.1.pep
HASVGFSSHSVSGSGSRGSAVYHFKGERIEMATSDVEYRCFISGLSWATDDHSLHNSFSTYGEVLESKIILNRETHRYHSLCYVTFSTEEAMLNAIKGMNCKELDGRNITVN

SEQ ID NO: 5205 - protein, 80 aa, Zea mays
  Clone ID: PAT_MRT4577_179465C.1.pep
PHVSPIAFLAHLQLFPFYLRAMPSAGTLFQLHQLLPFIQLALSNPAVFYQQPIIGGASFRLLMSYSSIMKFFGCVCGFPE

SEQ ID NO: 5206 - protein, 319 aa, Zea mays
  Clone ID: PAT_MRT4577_179630C.1.pep
MAIKRTKAEKKIAYDKKLCSLLDEYTKVLIALADNVGSKQLQDIRRGLRGDSVVLMGKNTLIRRCIKVYAEKTGNHTFDPLMDLLVGNVGLIFTKGDLKEVREEVAKYKVGAPARVGLVAPVDVVVPPGNTGLDPSQTSFFQVLNIPTKINKGTVEIITPVELIKKGEKVGSSESALLAKLGIRPFSYGLQVTSVYEDGSVFSPEVLDLSEEDLIEKFATGVSMVASLSLALSYPTLAAVPHMFINGYKNVLAVAVETDYSYPHADKIKEYLKDPSKFAVAAPVAAADSSAAAAPKEEEKAPEPAEESDEEMGFSLFDD

SEQ ID NO: 5207 - protein, 319 aa, Zea mays
  Clone ID: PAT_MRT4577_179632C.1.pep
MAIKRTKAEKKIAYDKKLCSLLDEYTKVLIALADNVGSKQLQDIRRGLRGDSVVLMGKNTLIRRCIKVYAEKTGNHTFDPLMDLLVGNVGLIFTKGDLKEVREEVAKYKVGAPARVGLVAPVDVVVPPGNTGLDPSQTSFFQVLNIPTKINKGTVEIITPVELIKKGEKVGSSESALLAKLGIRPFSYGLQVTSVYEDGSVFSPEVLDLSEEDLIEKFATGVSMVASLSLAISYPTLAAVPHMFINGYKNVLAVAVETDYSYPHADKIKEYLKDPSKFAVAAPVAAGDSGAAAAPKEEEKAAEPEEESDEEMGFSLFDD

SEQ ID NO: 5208 - protein, 274 aa, Zea mays
  unsure (1)..(274): unsure at all Xaa locations
  Clone ID: PAT_MRT4577_180097C.1.pep
LTEMWGFASNAWAAGLEKRSSPNRTSSSAAYSDDEASSCTSREEGLECPICWESFNIVENVPYALWCGHTMCKNCILGLQWAVIKVPTVPIQLPFFICCPWCNLLSPRVLYXRGNLTFPRKNYFLLWMVEGMNGERARSRPAIRSEQHTPWLSSSSSVGNGNAGCSNPTRXATSRHHRXTSPTNANHANHGGSPLLNAGRVQASLRKSLSFLVHLTAKFPLVFVFLLIVLYAIPASAAVLLLYILITVLFALPSFLILYFAYPSLDWLVREIFA

SEQ ID NO: 5209 - protein, 86 aa, Zea mays
  unsure (1)..(86): unsure at all Xaa locations
  Clone ID: PAT_MRT4577_180119C.1.pep
KCENDGAMQXRSIRCGLAPHRNFIRHQAPDCKVRVQGGGTPFCLVNFCEAAYAHQRIHSFSVAKKTDFAFWYTLVLQGCGNLSFRY

SEQ ID NO: 5210 - protein, 509 aa, Zea mays
  Clone ID: PAT_MRT4577_180122C.1.pep
MAAGGELAWGEEPVARRRPKTKIVCTLGPASRSVEMISRLLRAGMCVARFNFSHGSHEYHQETLDNLHAAMELTGILCAVMLDTKGPEIRTGFLKDGKPIQLIKGQEITISTDYSIQGDEKMISMSYKKLAVDLKPGSVILCADGTITLTVLHCDKEQGLVRCRCENTFKLGERKNVNLPGVIVDLPTLTDKDKEDILKWGVPNKIDMIALSFVRKGSDLVEVRKVLGEHAKSIMLMSKVENQEGVANFDDILANSDAFMVARGDLGMEIPIEKIFFAQKVMIFKCNIQGKPVVTATQMLESMIKSPRPTRAEATDVANAVLDGTDCVMLSGETAAGAYPELAVQTMAKICLQAESCVDHAAIFKSIMASAPIPMSPLESLASSAVRTANSARAALILVLTRGGTTARLVAKYRPSMPILSVVVPELKTDSFDWACSDEGPARHSLIVRGVIPMLSAATAKAFDNEATDEAIGFAIENAKTMGLCNTGQSVVALHRIGISSVIKLLTVK

SEQ ID NO: 5211 - protein, 127 aa, Zea mays
  unsure (1)..(127): unsure at all Xaa locations
  Clone ID: PAT_MRT4577_180243C.1.pep
CSTKYWSRLMLLGLSAGAATATIXRECSQASMASILPPYLXPAVSSVCENPILQPYRIQQAIXTGILPLSPLYLQQSSALLHQLPLEHXIXQNIMAQQLQQLVLENLAAYSQQQQFLPFNQLAALNS

SEQ ID NO: 5212 - protein, 161 aa, Zea mays
  Clone ID: PAT_MRT4577_180294C.1.pep
MKGAKSKGAAKADAKLAVKSKGAEKPAAKGKKGKAGKDPNKPKRAPSAFFVFMGEFREEFKQKNPKNKSVAAVGKAAGERWKSLSESEKAPYVAKANKLKGEYNKAIAAYNKGESAAAAAPKKAAAKEVEEEDEEESDKSKSEINDDDDDEGSDEDEDDDE

SEQ ID NO: 5213 - protein, 51 aa, Zea mays
  unsure (1)..(51): unsure at all Xaa locations
  Clone ID: PAT_MRT4577_180318C.1.pep
MESKGGXKMXTITRRIMYEASLGYSIEDVRPAGGVKNFQSVGYSNCARKPS

SEQ ID NO: 5214 - protein, 461 aa, Zea mays
  unsure (1)..(461): unsure at all Xaa locations
  Clone ID: PAT_MRT4577_180468C.1.pep
MPTRNHNAAAAAAPQHHHHNRGGAPALGKSKAVPGRADPMNRRAPLGDIGNLVSVRPAEXGSLSCRSRSIXPITRSFGAQLVKNVQANAAIKNAAILPARHAPRQERKAPAKQPPPEDVIVLSSDSEQSRTQLESSASSVRSRKKVINTLSSVLSARSKAACGITDKRRQVVVIEDIDKLDVNNELAVVEYIEDIYTFYKIAQHDRRPCDYIDTQVEINPKMRAILAGWIIEVHHKFELMPETLYLTMYIIDQYLSLQPVLRRELQLVGVSAMLIACKYEEIWAPEVNDFILISDSAYSREQILSMEKGILNSLEWNLTVPTVYMFLVRFLKAAALGNKVEKEMENMVFFFAELALMQYGLVTRLPSLVAASVVYAARLTLKRAPLWTDTLKHHTGFRESETELIECTKXCWSAHTRRPXADSKLRSVYKKYSSEQFGGVALRPPAAAVEMKXTKITSCYK

SEQ ID NO: 5215 - protein, 122 aa, Zea mays
  unsure (1)..(122): unsure at all Xaa locations
  Clone ID: PAT_MRT4577_18052C.1.pep
QQQFLPFNQVGSLTSASCSHHQHLPFSQLRAAYPQLFLPFSHLAALTSPAYXQQHRLLPFSQLAGVSPATLLTXPQLLPFXQRVAPTADTKLHLHXLLPFNQLALTNPAVFYHQPIIGGVLF

SEQ ID NO: 5216 - protein, 247 aa, Zea mays
  unsure (1)..(247): unsure at all Xaa locations
  Clone ID: PAT_MRT4577_180546C.1.pep
MSSAVEAISCPKVDVPAGPEPGEPAKEAAPPAEHCDTAPNGKCAPRCHGEEEEEEEDEEDEEKAPKAIDLGPMVSIKEQLEKDKDDESLRRWKEQLLGGVDLNSVGETLEPDVKIMSLSILSPGRPDIVLPLPVEPNGXGVWLTXKEGSPYRLKFTFSVSNNIVSGLRYXNTVWKTGLKVDRAKEMLGTFSPQLEPYTYVTPEDTTPSGMFARGSYSARTKFLDDDRKCYLEINYTFDIRREWPSTS

SEQ ID NO: 5217 - protein, 247 aa, Zea mays
  Clone ID: PAT_MRT4577_180549C.1.pep
MSSAVEAISCPKVDVPAGPEPGEPAKEAAPPAEHCDTAPNGKCAPRCHGEEEEEEEDEEEEEKAPKAIDLGPMVSIKEQLEKDKDDESLRRWKEQLLGGVDLNSVGETLEPDVKIMSLSILSPGRPDIVLPLPVEPNGKGVWFTLKEGSPYRLKFTFSVSNNIVSGLRYTNTVWKTGLKVDRAKEMLGTFSPQLEPYTYVTPEDTTPSGMFARGSYSARTKFLDDDRKCYLEINYTFDIRREWPSTS

SEQ ID NO: 5218 - protein, 61 aa, Zea mays
  unsure (1)..(61): unsure at all Xaa locations
  Clone ID: PAT_MRT4577_180789C.1.pep
MAPLPMGPTPMAPAPMXNPGLATPASFCAYATDKISVDAYLASGIIGKGGANINQISYVTG

SEQ ID NO: 5219 - protein, 72 aa, Zea mays
  Clone ID: PAT_MRT4577_18087C.1.pep
EGGSLQACPLPVIDSQHTACSSLGPLCDIKFAPRAWQLSLAGICIIKNPVAYQVSLWLSLHLRGREGSFSFC

SEQ ID NO: 5220 - protein, 90 aa, Zea mays
  Clone ID: PAT_MRT4577_180924C.1.pep
AATATPTGTGGTERWGPRVQVILCGCRDVYPSPEGLSSFVSCLVLPIWGFDWKGALCHLVVLGSSSVSSDPCVKQHGLRIDGCSYPRLAL

SEQ ID NO: 5221 - protein, 50 aa, Zea mays
  Clone ID: PAT_MRT4577_181067C.1.pep
SGSRGRVMYRGVTRHHQHGRWQARIGRVSGNKDLYLGTFSTQEEAAEAYD

SEQ ID NO: 5222 - protein, 152 aa, Zea mays
  unsure (1)..(152): unsure at all Xaa locations
  Clone ID: PAT_MRT4577_181072C.1.pep
MASATVLKSSFLPNKCEWIATRQADRSRPPTGSMVRRVSAYADELVKTAKTIASLXCGILTMDESNARCGKRLATIGLENTEANREAYRTLLVTTSALXQYISGAILFEETMYQSAVDGRKIVDILAKHGIVPGIKVDKGLCPIAGSXNESW

SEQ ID NO: 5223 - protein, 60 aa, Zea mays
  unsure (1)..(60): unsure at all Xaa locations
  Clone ID: PAT_MRT4577_18114C.1.pep
PAPHQYTGSKEFFFPPFPKWMFKQQLNREGAPFQLPGVAXWTINTRNRGLCLGFCQVGME

SEQ ID NO: 5224 - protein, 228 aa, Zea mays
  Clone ID: PAT_MRT4577_181169C.1.pep
MARERREIKRIESAAARQVTFSKRRRGLFKKAQELSVLCDADVALIVFSSTGKLSQFASSSMNEIIDKYNTHSKNLGKTEQPSLDLNLEHSKYANLNEQLAEASLRLRQMRGEELEGLNVEELQQLEKNLESGLHRVLQTKDQQFLEQINDLERKSTQLAEENMQLRNQVSQIPPAGKQAVADTENVIAEEGQSSESVMTALHSGSSQDNDDGSDVSLKLGLPCVAWK

SEQ ID NO: 5225 - protein, 228 aa, Zea mays
  Clone ID: PAT_MRT4577_181171C.1.pep
MARERREIKRIESAAARQVTFSKRRRGLFKKAEELSVLCDADVALIVFSSTGKLSQFASSSMNEIIDKYSTHSKNLGKAEQPSLDLNLEHSKYANLNEQLVEASLRLRQMRGEELEGLSVEELQQLEKNLESGLHRVLQTKDQQFLEQISDLEQKSTQLAEENRQLRNQVSHIPPVGKQSVADTENVIAEDGQSSESVMTALHSGSSQDNDDGSDVSLKLGLPCVAWK

SEQ ID NO: 5226 - protein, 93 aa, Zea mays
  unsure (1)..(93): unsure at all Xaa locations
  Clone ID: PAT_MRT4577_181187C.1.pep
GGGGGGPPDPIKGRFSGVNNNNDNNLLTPPSFWXXNHRGGCCTPTRRSRGNRTRRRSRPRRSRRDRQSPTARLAPPPRAFATGFEKSRRTPVA

SEQ ID NO: 5227 - protein, 99 aa, Zea mays
  unsure (1)..(99): unsure at all Xaa locations
  Clone ID: PAT_MRT4577_181204C.1.pep
MGRARSGAAAAPLLLLLAAAAXGLGSAAXPAARGGVRKACRTTXYPSGCEQSLGXYGGAPPPRSPRERGRAXXXGSADRARAAXAYVGRLCGASNGKGA

SEQ ID NO: 5228 - protein, 45 aa, Zea mays
  Clone ID: PAT_MRT4577_181426C.1.pep
LLPICVFDCKVDLCHMLVLRSFYGSSDSCINQHGLYDRWKLLLLS

SEQ ID NO: 5229 - protein, 59 aa, Zea mays
  Clone ID: PAT_MRT4577_181481C.1.pep
KSARGAKKGDCHGRLKEKVAKNEGREAGVFGLCGLQVVFAGESVRRGSAVVGHLAACPF

SEQ ID NO: 5230 - protein, 621 aa, Zea mays
  Clone ID: PAT_MRT4577_18149C.1.pep
MSPNLDSAIKSQVPALLLRRLFGASRRDEAKQLQRTPAPVGRRRVFVQTETGCVLGMDLDRGDNAHTVKRRLQLAFNMPTGGTSLTFGDRVLENDLSFLRPDSPLLLTRNSINRSCSTPCLCPVSKDFEHKDCSGLVEMLGCSSSCARVKRLVDDVVTAIRSGVDPVPISSGLGGSYYFRNVLGDRVAIVKPTDEEPFAPNNPKGFVGRALGQPGLKRSVRVGETGFREVAAFLLDHDNFANVPATALVKITHSIFNINCPVNGGNLAPAHDQQQQVNSKIASFQQFIAHDFDASDHGTSSFPVAAVHRIGILDIRIFNTDRHAGNVLVRKLNGGTGRFGCQTELFPIDHGMCLPENLEDPYFEWIHWAQASIPFSEEELEYIRNLDPRKDVQMLRRELPMIREACLHVLALCTIFLKEAAAFGLCLAEIGEMMTREFRGMEEEPSQLELMCMEARKRVAEWEPFSATAEHGEDTDFQFSVDMLGEYSDVVRSPRFNGSGSKVSSFRSPLSKLVESVDEGSDGHEDQNESDRVLYAGWNTSSVPSKAMGHSGNASKSAMNRSADEQLPSSMCFVRLSDMSADEWDVFLEKFQELLKEALHESARAAAGQRMKQRLGTSCKF

SEQ ID NO: 5231 - protein, 137 aa, Zea mays
  unsure (1)..(137): unsure at all Xaa locations
  Clone ID: PAT_MRT4577_181507C.1.pep
GNRTGILPLLPLFLQQXMGGITQLPLVHLLXQNIGTQLQQLELSNLAATSXQHILPFNQYCMNSAXYLQXQQLPLXQLSAAYPSNYXPLSTDTLNYLLITAAQLLPFXQLTGVSTCYLMTQPQLTTFYQHAVLNAGT

SEQ ID NO: 5232 - protein, 87 aa, Zea mays
  Clone ID: PAT_MRT4577_181515C.1.pep
VHSNQHVRGFITHAEQLRAKGVDEIQHISGNDPFVMMAWAKTYPENKHVKFLADGSVAYTKVLELELDLTVKGLDVRSKRFALLVDD

SEQ ID NO: 5233 - protein, 193 aa, Zea mays
  unsure (1)..(193): unsure at all Xaa locations
  Clone ID: PAT_MRT4577_181634C.1.pep
MAKLHFFLLLLLAAAEAIHGEDGAYIGVNIGTAMSSVPAATQITTLLRSQNIRHIRLYDADPGMLSALANTGIRVIISVPNEQLLAIGNSNATAAKWVARNVAAHYPSVNITAIAVGSEVLSTLPNAAPLIMPAMRYLQNALVAAALDKYIKISTPHSSSIILDSFPPSQGFFNRSLDPVLVPMXQFLQSTGA

SEQ ID NO: 5234 - protein, 132 aa, Zea mays
  Clone ID: PAT_MRT4577_181639C.1.pep
MASRMGMVAILSLFVCALVASTSVNANVWQTDEDAFYSTNKLGVNGNMEMAQQQGGFIGHRPRLALFNRASKQLDREKRPVPSGPDPIHHSIPSHAPQHPPSYGKAPYEDDKSIASPGLSNPIGPPPFLDRY

SEQ ID NO: 5235 - protein, 158 aa, Zea mays
  unsure (1)..(158): unsure at all Xaa locations
  Clone ID: PAT_MRT4577_18164C.1.pep
MGERGAEEDGSGGSSLSLMCLEDGADLDAGGSAESADDGEPAVVAHSDAGEDQEEEYMDYLVSKESSFCCSPSSSPVSSDAGAETRPSSTASSSDEWFRCARHATVAWVLETRAYFGFSHRAAYLAVSYMDRFCLXRCMDVSVMPWAAXLLAVACLSL

SEQ ID NO: 5236 - protein, 42 aa, Zea mays
  Clone ID: PAT_MRT4577_181736C.1.pep
SSALPLTKAWSFFLDLHSSIHRSVPSARGSVHLQRWLSSGAR

SEQ ID NO: 5237 - protein, 96 aa, Zea mays
  unsure (1)..(96): unsure at all Xaa locations
  Clone ID: PAT_MRT4577_181800C.1.pep
AEPGSASTPLLRRRGSYTRTVSHARDELSSFRSGLRWMCVDHSDASSPAVSWLVFAALGVAVPAAAHAAAAPRRAYDTQVQVSLTLSXALAYTTLY

SEQ ID NO: 5238 - protein, 68 aa, Zea mays
  Clone ID: PAT_MRT4577_181814C.1.pep
FCRFYLCKKKKKKKKKKEKKKKKKKKKKKKKKKKKKKKKKKKKKKKKGGAVLKDQSLLPRACKKIVFL

SEQ ID NO: 5239 - protein, 524 aa, Zea mays
  unsure (1)..(524): unsure at all Xaa locations
  Clone ID: PAT_MRT4577_181875C.1.pep
MAGGGIVNTGGGKDYPGKLTLFVLLTCIVAATGGLIFGYDIGISGGVTSMNPFLEKFFPEVYRKKQEAKTNQYCKYDNQLLQTFTSSLYLAALVASFFAATVTRAVGRKWSMLVGGLTFLVGAALNGAAQNIAMLIVGRILLGVGVGFANQSVPVYLSEMAPARLRGMLNIGFQLMITIGILAAELINYGTNKIKAGYGWRVSLALAAVPAAIITLGSLFLPDTPNSLLERGHPEEARRMLRRIRGTDDIGEEYADLVAASEEADKVRHPWRNILRRRYRAQLTMGVAIPVFQQLTGINVIMFYAPVLFDTLVFKNDASLMSSVITGLVNVFATVVSIVTVDRVGRRKLFLQGGAQMIVCQLIVGTLIAAKFGTSGTGDIAKGYAAVVVVFICAYVAGFAWSWGPLGWLVPSEIFPLXEIRPAGQSINVSVNMFFTFCIAQAFLTMLCHFKFGLFYFFAGWVVIMTVFIAFFLPETKNVPIEEMVLVWKSHWFWKRFIADEDVHVGIGNNHPAKNGSDTKGADA

SEQ ID NO: 5240 - protein, 52 aa, Zea mays
  unsure (1)..(52): unsure at all Xaa locations
  Clone ID: PAT_MRT4577_181965C.1.pep
MGLVKEGVDMEEGTLEIRMEXRTVTGVAGPLVNLGKVIGPQYQXSVNIRPGD

SEQ ID NO: 5241 - protein, 99 aa, Zea mays
  unsure (1)..(99): unsure at all Xaa locations
  Clone ID: PAT_MRT4577_181993C.1.pep
PLSQIPAACPKQFLPFSQLAALSSPAYLQQQQLLPFSQLAGVSQCYLLVATTVSPFFQHVAPNAGTLLHLQQXLLPLNRLALSNPSVFYQQPIIGGALF

SEQ ID NO: 5242 - protein, 129 aa, Zea mays
  unsure (1)..(129): unsure at all Xaa locations
  Clone ID: PAT_MRT4577_182189C.1.pep
RSVRSSSSQPQLVAAAAVLTSGLLLLAAAAETASAAVICDKATSSVAPCLGYAMGISASHSAECCTTVRSLNIRAXSAADRQATCNXLKSMTGRLGSLVNMANASNIPGKCCFSVDLPISPTVYCTKIN

SEQ ID NO: 5243 - protein, 134 aa, Zea mays
  Clone ID: PAT_MRT4577_182206C.1.pep
TRNQTLWPNTMMAQACKKRRGVYISTELGGSDTDSDVEGSKPSKKSGVTSISTCEHQSSYNLKAASMKSSRMIRLCGNIVRKLIDHKGGWLFKDPVDPDLYKIPDYFDVIRNPMDLGTVKNKLTKKKYVSIEEF

SEQ ID NO: 5244 - protein, 83 aa, Zea mays
  unsure (1)..(83): unsure at all Xaa locations
  Clone ID: PAT_MRT4577_18220C.1.pep
NTYSESYYQRRPELCEGVQXTARVTTVAVADLKGSMGDAVVCVQRDPDQRLARRPVLGSTPDQVIAPKGVKPTLSADLNTLAL

SEQ ID NO: 5245 - protein, 161 aa, Zea mays
  unsure (1)..(161): unsure at all Xaa locations
  Clone ID: PAT_MRT4577_18233C.1.pep
ADQRWRDADVEYRXFIGGLDWATDDHFVHNAFSTYSEVLESKIILDRXRSMSRRYCSFTFSTEEAMRNXIEGMNGKELDGRNITRNXAQSRGGRGGXXGGGYGGGLGGSSYSGGRRRDGSGSYGSGSGXXGGRGRYGGGGGTYGSRNRGGRYGYSDGNWRN

SEQ ID NO: 5246 - protein, 85 aa, Zea mays
  Clone ID: PAT_MRT4577_182340C.1.pep
LLMLRPPAHDLLIPEVGAGRVVTLGREVPSRRAMRPVRHPSLRVNDAAAVRVRRRHRREQLVPSAVALSSSRVGHDVLRCLWCFR

SEQ ID NO: 5247 - protein, 81 aa, Zea mays
  Clone ID: PAT_MRT4577_182430C.1.pep
YRCFIGGLAWATDDHYLHNAFSTYGEALKSKIILNRDTQTSPGFGLLTFSTEEAMRNPTQGMNGTELDGPNITRNEDQSRL

SEQ ID NO: 5248 - protein, 69 aa, Zea mays
  Clone ID: PAT_MRT4577_182672C.1.pep
GRPSREKEAKGHKWHRVEGNNGQFVGGFPLPENPKTQKVRPPLEKGVLTVPVPKAEVKKPEVKSIQISG

SEQ ID NO: 5249 - protein, 58 aa, Zea mays
  Clone ID: PAT_MRT4577_182740C.1.pep
CAAENAVAPSPKFVFPCFDGENVESAPPPMKKDSKLANFLCWEEEADPMEEKAGVLNE

SEQ ID NO: 5250 - protein, 425 aa, Zea mays
  unsure (1)..(425): unsure at all Xaa locations
  Clone ID: PAT_MRT4577_182743C.1.pep
STGSPVLLLALLPPSPALGSDSPAPRAVLFVAEASPAXVIGFEGYEKRLEITFFEAPVFGDPHGRGLRALSRAQMDFVLDLARGTIVSELSNKDFDSYVLSESSLFIYPVKIVIKTCGTTKLLLTIPRILELAEELSMPLAAVKYSRGTFIFPGAQPAPHRSFSEEVAALNRYFGGLKSGGNAYVIGDPARPGQKWHVFYATEYPEQPMVNLEMCMTGLDKKKASVFFKTNADGNTTCAKEMTKLSGISEIIPEMEICDFDFEPCGYSMNAIHGSAFSTIHVTPEDGFSYASYEVMGLDATALSYGDLVKRVLRCFGPSEFSVAVTIFGGRGHAGTWGKALGAEVYDCNNMVEQELPGGGLLVYQSFCAAEDAVATSPKSVFHCFDGENVESAPPPMKKDYKLANLLCWEEEADAMEEKAGVLDE

SEQ ID NO: 5251 - protein, 345 aa, Zea mays
  Clone ID: PAT_MRT4577_182747C.1.pep
RGHYQAPAHHSNKDFDSYVLSESSLFIYPLKIVIKTCGTTKLLLTIPRILELAEELSMPLAAVKYSRGTFIFPGAQPAPHRSFSEEVAALNRYFGGLKSGGNAYVIGDPARPGQKWHVFYATEYPEQPMVNLEMCMTGLDKKKACVFFKTNADGNTTCAKEMTKLSGISEIIPDMEICDFDFEPCGYSMNAIHGSAFSTIHVTPEDGFSYASYEVMGLDATALSYGDLVKRVLRCFGPSEFSVAVTIFGGRGHAGTWGKALGAEVYDCNNMVEQELPGGGLLVYQSFCAAEDAVATSPKSVFHCFDGENVESAPPPMKKDYKLANLLCWEEEADAMEEKAGVLDE

SEQ ID NO: 5252 - protein, 403 aa, Zea mays
  unsure (1)..(403): unsure at all Xaa locations
  Clone ID: PAT_MRT4577_182762C.1.pep
MASTDRSTPAEDEQQQKRPSLFSPYQMPRFRLTHRXPPXVVLAPMTRCRAPDAIPGPALAEYYAQRSTEGGLLISEGTIISPSGPGFPRVPGIYNQEQTDAWRKVVDAVHAKGAIFFCQLWHVGRASHQVYQPGAAAPISSTDKPISSRWRILMPDGSYGKYPTPRRLATSEIPEIVEQYRQAAVNAIKAGFDGIEIHGAHGYLIDQFLKGGINDRTDEYGGSLSNRCRFLLEVTRAVVSAIGADRVAVRAPPAIDHLDAYDSNPLQLGLAVVDRLNALQEETGRLAYLHVTQPRYTAYGQTESGQHGSAEEESRLMRALRGAYRGTFMCSGGYTRELGVEAVESWDADLVSYGRLFIANPDLVERFRRDAPLNRYVRKTFYTPDPVVGYTDYPFLGQPKARM

SEQ ID NO: 5253 - protein, 631 aa, Zea mays
  Clone ID: PAT_MRT4577_18278C.1.pep
MTVDELKLQARASGGHGAKDQFPVGMRVLAVDDDPTCLKILENLLLRCQYHVTTTGQAATALKLLREKKDQFDLVISDVHMPDMDGFKLLELVGLEMDLPVIMLSANGETQTVMKGITHGACDYLLKPVRIEQLRTIWQHVVRRRSCDAKNSGNDNDDSGKKLQVVSAEGDNGGVNRNKRISRKGRDDNGDDGDDSDDNSNENGDSSSQKKPRVVWSVELHRKFVAAVNQLGIDKAVPKKILDLMNVENITRENVASHLQKYRLYLKRLSADASRQANLTAAFGGRNPAYVNMGLDAFRQYNAYGRYRPVPTTNHSQPNNLLARMNSPAFGMHGLLPSQPLQIGHNQNNLSTSLGNVGGMNNGNLIRGAHMPLQDTSKCFPTGPSGNSFANISNSTQLVTTNNLPLQSLEPSNQQHLGRLHSSADPFNSFVGEPPQFADLGRCNTTWPTAVSSSNVQEIGQKDRIVNRPKLEPLSSFTEASSQIPLLGSEMQSHQVASLASNGLPMPFTQEAVPFAYGSSTNSREMLNNNLALSNSGVNSTLPNLRIDGSVVPGQTLGGSNSGGCVVPPLQDGRIDHQAVSSHLNYNNELMGTGRLQRGLSGGLDDIVVDMFRPDRADDGVSFIDGDWELV

SEQ ID NO: 5254 - protein, 157 aa, Zea mays
  unsure (1)..(157): unsure at all Xaa locations
  Clone ID: PAT_MRT4577_182851C.1.pep
AHVRQRSTSAGTVTMFQKCSGASIASXLMPSTSXPTVSLECENPLLQPYKIQHAIAAVIXPQSPLILQQSLAVLQQLPLVHVLAHNIQAQQLLQHVLSNLAAYSQQQQYLAFDYLAVLNSAXYLQHHQLPFNQLPVDYPQQXLPFKQLAALNSTAYL

SEQ ID NO: 5255 - protein, 139 aa, Zea mays
  unsure (1)..(139): unsure at all Xaa locations
  Clone ID: PAT_MRT4577_18325C.1.pep
IAHKSNLMLCVRXRVFISDEFDDLLPKYLSFLXMGMVDSYTLPLNVSRQTLEQHSSVKTIKKKLIRKALDMIRKLAEEDPDEYSNRQKTDDETSAMEEKKGQCTKFWNEFGXSLKLGMIEDATNRNLVVKLFEFESCNL

SEQ ID NO: 5256 - protein, 464 aa, Zea mays
  Clone ID: PAT_MRT4577_183348C.1.pep
MGGAEALGQPDGHANGAVVEEKLDLLRRQLGKADGDPLRIVGVGAGAWGSVFCALLQDAYGHLRDKAQVRIWRRPGRAVDRATAEHLFDVINAREDVLRRLIRRCAYLKYVEARLGDRTLYADEILRDGFCLNMIDTPLCPLKVVTNLQEAVWDADIVVNGLPSTDTREVFGEIRRYWKERITAPIIISLAKGIEASLDPLPRIITPTQMISNATGVPSENILYLGGPNIASEIYNKEYANARICGADKWRKPLAKFLRQPHFIVWDNSDLITHEVMGGLKNVYAIGAGMVAALTNESATSKSVYFALCTSEMIYITHLLEEEPEKLAGPLLADTYVTLLKGRNAWYGQKLAKGELTLEMGDSIKGKGTIQGVSAVDAFYELLSQDSLSVMHPEANRSVAPVEMCPILKALHRILITRDRPADSILQAIRDETMYDPRERIEMAQGHSLYRPSLLGQPKGDVKT

SEQ ID NO: 5257 - protein, 91 aa, Zea mays
  unsure (1)..(91): unsure at all Xaa locations
  Clone ID: PAT_MRT4577_183709C.1.pep
MEQTFIMIKPDGVQRGLIGDMISXFEKKGFYLKGMKLMNSERAFAQQHYADLYDKPLFTRLNRYIMSGPVVAMVXEANDIMLTGRRIIGAT

SEQ ID NO: 5258 - protein, 138 aa, Zea mays
  unsure (1)..(138): unsure at all Xaa locations
  Clone ID: PAT_MRT4577_183795C.1.pep
MAAKIFCLLILLGLSARAATATIFPQCSHAPITYILPPYLSPSVSXSILXNPILQPYRIQHAISSGILPLSPSVLQQSSTLLQHLPLEHLLAQNIRAQQLQQLVLTNLDAYYHQQQLLPFNQLSSLNSACYLQHQRLP

SEQ ID NO: 5259 - protein, 71 aa, Zea mays
  Clone ID: PAT_MRT4577_1837C.1.pep
ANALTAGNPIRRVNKTKLYLASHINSPLFATPLFLTRSKQLLQSPLISGDKHEKTCYATAYMIMHMRAKDN

SEQ ID NO: 5260 - protein, 428 aa, Zea mays
  Clone ID: PAT_MRT4577_183825C.1.pep
MASAGNSGSGDDDAGGKLLADRYQKGEVLGEGTYGVVFKAIDTKTGNTVAVKRIRIGKDKKEGVNFTALREIKLLKELKDPNIIELIDCFPYKENLHLVFEFMETDLEALIKDKNIILSPADTKSYVQMMLKGLAFCHKKWVLHRDMKPNNLLIGADGQLKLADFGLARVFGSPGRNFTHQVFARWYRAPELLFGSKQYGSGVDIWAAGCIFAELLTRRAFLQGSSDIDQLGKIFAALGTPKSSQWPDMVYLPDYVEYQYVAAPPLRTLFPMASDDALDLLSKMLTYDPKARISAQQALEHRYFSSLPAPTRPSQLPRPRRKGDQGNNKIPDLNLQDGPMVLSPPRKLRRVTAHEGMEGMHRTDKVDEHPSGMRHTDDMPSQSSRIPMSVDVGAVFGTRPAPRPTLNSADKSRLKRKLDMDPEFGYAE

SEQ ID NO: 5261 - protein, 79 aa, Zea mays
  Clone ID: PAT_MRT4577_183858C.1.pep
TYRLGPAAQVILVAAVMFTLVQRVYVRLSRLLSPICVFDCKVAVCQLLVLCSCTAPADPCINQHGLWIDECCYSWQDLL

SEQ ID NO: 5262 - protein, 301 aa, Zea mays
  Clone ID: PAT_MRT4577_183903C.1.pep
METSKSPQSSKNSHIVVPSDSNGPRFDNDGFSSEAASNQMVVFNSEAGDKEQDELGENRLQKSIITRGISPSIGAFTVQCAKCFKWRLIPTKEKYEEIRERIIEEPFVCKRAREWRPDVTCNDPEDISQDGSRLWAIDKPNIAQPPRGWERQIRIRGEGGTKFADVYYTSPTGRKLRSLVEVDRFLQENPEYGAQGVTLAQFSFQIPRPLRQDYVKKKPKLINPSDEASMIASKSFQPEEVKPIAWAVATKHEGDASEEASLTDEAPTSEVMLARKRKAGSSLSIEPNHLSDELEPKLEDA

SEQ ID NO: 5263 - protein, 57 aa, Zea mays
  unsure (1)..(57): unsure at all Xaa locations
  Clone ID: PAT_MRT4577_184060C.1.pep
PTDRPIRFYXDGIYDLFHFVHAKSLXRPRRGLXNTYIIVGCCNDXSTHKFKGRTVMT

SEQ ID NO: 5264 - protein, 356 aa, Zea mays
  Clone ID: PAT_MRT4577_184395C.1.pep
MGRSPCCEKIGLKKGPWTPEEDQKLLAYIQEHGHGSWRALPVKAGLQRCGKSCRLRWTNYLRPDIKRGKFSLQEEQTIIQLHALLGNRWSAIATHLPNRTDNEIKNYWNTHLKKRLAKMGIDPVTHKSISGTRIGTTNDKSTKAAASLSHMAQWESARLEAEARLARESKIRTATPTPTALHAQPTILPASAASPCLDVLHAWQGAKIDLESPTSTLTFTGSNGGTLPTPRTNGLDVSESNCAMSHQRSDELEDEENDWQIFSKHQLLELDSKEREEDFIGCEEPWFSEMAGVGAGFTGMLLGVSNEHDASECWGESNNGQTERSNQASDEEDKNYWNGVLDMVNSELTPKSPPFV

SEQ ID NO: 5265 - protein, 73 aa, Zea mays
  Clone ID: PAT_MRT4577_184607C.1.pep
MLPSFLSPTASAAASVTPPSRPIPSNYGPPVLGPLRDRLDYFWFQNQDQFFLKRAAAHRRTVFLNNIPPTFPF

SEQ ID NO: 5266 - protein, 149 aa, Zea mays
  Clone ID: PAT_MRT4577_184761C.1.pep
MEQTFIMIKPDGVQRGLIGDIISRFEKKGFYLKGMKFMNVERSFAQQHYADLSDKPFFPGLVEYIISGPVVAMVWEGKDVVLTGRRIIGATRPWEAAPGTIRGDYAVEVGRNVIHGSDSVENGKKEIALWFPEGVAQWKSNLHPWIYEA

SEQ ID NO: 5267 - protein, 187 aa, Zea mays
  Clone ID: PAT_MRT4577_185079C.1.pep
MDKSGGEAFGSNAPGNILAAGGLGPLWLVDIANMCLILHLIGAYQVYAQPVFASVERWAASRWPEAKFMSSAYTVSIPLVQRGSVTVAPHKLVLRTVIVGATTAVALAIPFFNAVLGLLGAFSFWPLTVYFPISMHIAQGKIARGTKWWCLLQALSMVCLVISVAVGVGSVTDIVDSLKASSSPFKL

SEQ ID NO: 5268 - protein, 468 aa, Zea mays
  Clone ID: PAT_MRT4577_185080C.1.pep
MDKSAVAAYDVERGDYEEEHERRGTVWTATAHIVTAVIGSGVLALAWSVAQLGWVAGTLALAGFACVTYYTSTLLANAYRAPHPVTGDRNRTYMDAVRSYLSPREVFMCGIAQYVNLWGTMVGYTITATISMAAIRQSNCFRRSGAGAQCDAPGTVLMLAFGVVQVVLSQFPGLEHITWLSVVAAVMSFAYSFIGLGLSVGQWVSHGGGLGGRIAGAAAASPTRKLWNVLLALGNIAFAYTFAEVLIEIQDTLKSPPPENRTMKKAAMYGIGATTIFYISVGCAGYAAFGSDAPGNILTAGGLGPFWLVDIANMCLILHLIGAYQVYAQPIFASVERWAASRWPEAKFISSAYTVSIPLMQRGSVTVAPYKLVLRTVLVAATTVVALMIPFFNAVLGLLGAFSFWPLTVYFPISMHIAQDKITRGTKWYLLQALSMVCLMISVAVGIGSVTDIVDSLKVSSNPLKTVS

SEQ ID NO: 5269 - protein, 484 aa, Zea mays
  Clone ID: PAT_MRT4577_185084C.1.pep
MDKSGGEAAAAAAAADDVERRGGDYEQDEHERRGTVWTATAHIVTAVIGSGVLALAWSVAQLGWVAGPLALAGFACVTYYTSTLLAGAYRAPHPVTGHRNRTYMDAVRSYLSPREVFMCGVAQYVNLWGTMVGYTITATISMAAIRQADCLRRDGAGAGARCDAPGTVLMLAFSVVQVVLSQFPGLEHITWLSVVAAAMSFAYSFAGLGLSVGHWVSRGGGGLGGRVAGAAAASSTRKLWNVLLALGNIAFAYTFAEVLIEIQDTLKSPPPENRTMKKAAMYGIGATTIFYISVGCAGYAAFGSNAPGNILAAGGLGPLWLVDIANMCLILHLIGAYQVYAQPVFASVERWAASRWPEAKFMSSAYTVSVSIPLLQRGSVTVAPHKLVLRTAIVGATTAVALAIPFFNAVLGLLGAFSFWPLTVYFPISMHIAQGKIARGTKWWCLLQALSMVCLVISVAVGVGSVTDIVDSLKASSSPFKIVG

SEQ ID NO: 5270 - protein, 45 aa, Zea mays
  Clone ID: PAT_MRT4577_185199C.1.pep
CRGLRREQFHGTIGALLTKEEDDGVLVWSYTNSVLRFCYMVGPPE

SEQ ID NO: 5271 - protein, 46 aa, Zea mays
  unsure (1)..(46): unsure at all Xaa locations
  Clone ID: PAT_MRT4577_185297C.1.pep
MAPPQTIPRRGLFIGGAWREPCLGRXLXPVVNPATRATXGDIPAGT

SEQ ID NO: 5272 - protein, 50 aa, Zea mays
  Clone ID: PAT_MRT4577_185349C.1.pep
PMKYVIKGAKSKGAEEADAKLAANSKVADKPTKGKKEKAGKDPNKPNTAP

SEQ ID NO: 5273 - protein, 538 aa, Zea mays
  Clone ID: PAT_MRT4577_185399C.1.pep
DVKNSARKAAETVLLVIDEEGVETLIPELLRGITDSQASMRRGSAYLIGFLFKNTKLYLADEASDMMSTLIILLSDTDKATVSAALEAFSRVVASVPKEQLPTHIKLVRDAVSTARDKERRRRKGVPILLPGLCLSKALQPFLPIFQQGLISGSAETKEQAAEGLGELIDVTSEKTLKEVVVPITGPLIRILGDRFPWQVKSAILSTLTIIIMKGGIALKPFLPQLQTTFVKCLQDNNKSVRTRAAAALGKLSALSTRVDPLVSDLLSMLQSGDESVKESVLSALKGVIKHAGKSVSAPIRSRGCALLEDLLQAEADDIRSCAAKVIGTLSQYMDDREIPDLVQILLEVGTSSDWCTRHGALLALSSISMHSPSKLCDLASFPSLVDLLKDSLKDDKFPVREVATRTLGRILVFELQSEADTLQLVQLLVLALRDDSSEVRRRSLSCIKAAAKMNHSALATHHSILGPAIADALKDSSMPVRLAAERCALHVFQLTKGPDNVTTAQKYLGMTGLEVKKIAKLNEESDGSESSDDDRRT

SEQ ID NO: 5274 - protein, 903 aa, Zea mays
  unsure (1)..(903): unsure at all Xaa locations
  Clone ID: PAT_MRT4577_185400C.1.pep
NSARGLLPAIEDGIFSDNWRIRQSSVELLGDLLFKVAGTSGKAILEGGSDDEGASTEAQGRAIIILPDLFFRSLRSGSIARNLDXLQPFRSSSLRVELHLCPPILKVKPLLEILGREKRNEVLAAIYMLRSDVSLTVRQAALHVWKTIVANTPRTLKEIMPVLMDTLISSLASSSSERRQVAGRSLGELVRKLGERVLPSIIPILSQGLKDPSASRRQGVCIGLSEVMGSAGKHQLLSFMDELIPTIRTALCDSTQEVRESAGLAFSTLYKSAGLQAIDEIVPTLLRALEDDDTSATALDGLKQILSVRTAAVLPHILPKLVQPPLSSFNAHALGALAEVAGPGLNSHIGTVLPALILAMDDEDADVQNSARKAAETVLLVIDEEGVETLIPELLRGINDSQASMRRGSAYLIGFLFKNTKLYLADEASDMMSTLIILLSDTDKATVSAALEAFSRVVASVPKEQLPTHIKLVRDAVSTARDKERRRRKGVPILVPGLCLPKALQPFLPIYQQGLISGSAETKEQAAEGLGELIDVTSEKTLKEVVVPITGPLIRILGDRFPWQVKSAILSTLTIIIMKGGIALKPFLPQLQTTFVKCLQDNNSESSDEDRSALGKLSALSTRVDPLVSDLLSMLQSGDESVKESVLSALKGVIKHAGKSVSSAIRSRGCALLEDLLQAEADDVRSCAAKVIGTLSQYMEETEISDLVQILLNMSTSSDWCTRHGALLSFSYISMHSPSKLCHLASFPSLVDLLKGSLKDDKFPVREVATRTLGKILCFELQPEAGTLQLVQLLILALRDDSSEVRRRSLSCIKAAAKTNHSALATHHSILGPAIAEALKDSSMPVRLAAERCALHVFQLTKGPDNVTAAQKYLGMTGLEVKKIAKLDVDSDGSESSDDDKRT

SEQ ID NO: 5275 - protein, 347 aa, Zea mays
  Clone ID: PAT_MRT4577_185453C.1.pep
MEFKRDVWSLLLVLLLGQLVAFSMAASSFASSLIANLGVDAPLTQSFLAYLLLTLVYVPIVLRRRQKLQIAWYWYLALAFFDVQGNYLVVKAYQYSYITSVTLLDCWTVVWVVMLTWYALGTRYSLWQFVGAGTCVAGLALVLLSDAKSQDEQDPKKIPLLGDALVIAGTVGFAFSNVGEEYCVKKKDRVEVVAMLGLFGLLISTVQILVFERKGLEAVTWSPTMISLFAGFAVAIFVFYTVAPFVLKMSGATLFNLSLLTSDMWAVAIRVLFYQQEINRLYYLAFAVVAIGLIIYSLNDRSSDDETAGSTEAPAQYQQLPIEDNSTRIGSSSGSQERTHKEEVHIC

SEQ ID NO: 5276 - protein, 67 aa, Zea mays
  Clone ID: PAT_MRT4577_185609C.1.pep
SSHIHPLKIGIKTCGTTKLLLTIPRILELAEEPSMPLAAVKNSRGTFIFSGAQASPHRRLFEEDAAL

SEQ ID NO: 5277 - protein, 78 aa, Zea mays
  Clone ID: PAT_MRT4577_185727C.1.pep
KPGGAPRSPKRTPALRAFCPAPLKPARGPPSGARSLRSGRSPARGWRLSIRSGLGPNPGRGPKIRAQAQAQPKYPPRF

SEQ ID NO: 5278 - protein, 82 aa, Zea mays
  unsure (1)..(82): unsure at all Xaa locations
  Clone ID: PAT_MRT4577_185754C.1.pep
ENPIVQXYFNQQAIATGMXPLSPLFLQQPSPLLQQLPLFHXMAHNIMAQQLQQLVLTYLAEYSYQHQLFPFNLLSALNSTSY

SEQ ID NO: 5279 - protein, 100 aa, Zea mays
  unsure (1)..(100): unsure at all Xaa locations
  Clone ID: PAT_MRT4577_185782C.1.pep
TTACNGVLRVEMNSGAYGCXVTAGSTATAHRPTSTKFKDGITISTGQRLYQYIHSAVXQVLIRQGVLGTKVKIMLDXDPKRHVAPINPHPDLVTIHNPRR

SEQ ID NO: 5280 - protein, 103 aa, Zea mays
  unsure (1)..(103): unsure at all Xaa locations
  Clone ID: PAT_MRT4577_185827C.1.pep
TVVEANTSYTGNHFHAKCHFGAVDIFNRKKLXYIVPSSHNCDIPHVNRTDYQLIDISPNGFASLLTXDGTTKDDLTLPTDETFVAHIKEGFESGNDLLVTVHP

SEQ ID NO: 5281 - protein, 85 aa, Zea mays
  Clone ID: PAT_MRT4577_185835C.1.pep
YVKFKSQELCVKLLIPELARLIRNRSHEFLPFTTTRRSGPRVDTSKSDSLHRTRPVHRSRHLTGTRSPAAARGGNSLPTRPTTRQ

SEQ ID NO: 5282 - protein, 80 aa, Zea mays
  Clone ID: PAT_MRT4577_185846C.1.pep
KPKQPLGEAGAIPAGAFALYEKPEAKKDPEHAPRPKIKKEVSAAAAVGSGGFAFPEPPEKKKAPKVPEEAGGEKNPHFFG

SEQ ID NO: 5283 - protein, 335 aa, Zea mays
  Clone ID: PAT_MRT4577_185876C.1.pep
MADLIKAVDIRGGKGERDALFINPQTPKPSPTEGQALVRVKAFGINRMDIVQRRGFYPLPPQAPATLGVEFSGTIESLGPGDHGAFKQGDEVFGLAYGGAYAEYLAVSTRMLLHKPSSMDFVTCAGIPETWITATQALHLVLGFTKGKSILWHAGASGVSIAGIQLSKIAGASQVFATAGSQEKCDFITSKLGATAAFNYKTQDWAEEIKKHTDGNGVDYIVDFVGASYFQQNQTAAARDGRIVLLGTLGGVKIPEADISQILYKRLRIEGSTLRSRDEEYQGKLRDRLEEYLPDFESGKLKILVDKVLPWEEIQEAHKHMEEAKNLGKIICTIS

SEQ ID NO: 5284 - protein, 73 aa, Zea mays
  Clone ID: PAT_MRT4577_18590C.1.pep
MDPTKFRPCSRHDTTGTTTNAGAPVWNDNEGLTVGPCGPILVGGYHLSEKVAHFALEGIPERVVHARGATGRG

SEQ ID NO: 5285 - protein, 288 aa, Zea mays
  Clone ID: PAT_MRT4577_18595C.1.pep
MGFVKLIKTKAYFKRYQVKFRRRREGKTDYRQRTRLITQDKNKYNTPKYRLVVRKTNKNIIAQIIYATVQGDRVVNAAYSSELPKFGIKLGLTNYASAYATGLLVARRHLTKIGLASKYQGKVEADGNDYTVEPAEGPRPFKALLDIGLARTSTGARIFAVAKGALDGGINIPHSVKRFAGYNAETKKHNPEVLKKYIYGQHVAEYMKKLQKEEPQAYEKQFSRFVKAGVKAGDIEGIYKNAHKAIRADPTKKANEKKAVEHKRYNPKRLTHAQRAERVAKKKAILGL

SEQ ID NO: 5286 - protein, 249 aa, Zea mays
  Clone ID: PAT_MRT4577_186005C.1.pep
MGKHGHGKCHDVEACYPPGAAGGGKYPYMTENPQLRWAFIRKVYVIVCLQLLLTVAVAATVNLVRAIGDFFLSRTMGAMFAIIGVIVAPILVMIPMIIYRKRHPVNLALLALFTVCISFAVGLSCLTANGPVILEAVVITMVVVLGLTFYTFWAAKRGYEFEFLGPFLVSACLILMLFSLLRIIFPLGRTGTMVYGCIAALVFSGFIIYDTDNLIRVYSYDEYVAAAIELYLDIINLFQAILAVLEGVD

SEQ ID NO: 5287 - protein, 98 aa, Zea mays
  Clone ID: PAT_MRT4577_186057C.1.pep
GGIRAVVLRATLPATGGSDRLGPRVPVILFASVMFSLVQRVYLRSSCLLLPICVFYCKVVLCQLLVLCSFLGLSCPMYHPAWSVDRCILLLLSGFVLC

SEQ ID NO: 5288 - protein, 380 aa, Zea mays
  unsure (1)..(380): unsure at all Xaa locations
  Clone ID: PAT_MRT4577_186155C.1.pep
MATAGKVIKCRAAVAWEAGKPLSIEEVEVAPPQAMEVRIKILYTALCHTDVYFWEAKGQTPVFPRILGHEAGGIVESVGEGVTELAPGDHVLPVFTGECKECAHCKSEESNMCDLLRINVDRGVMIGDGKSRFTISGQPIFHFVGTSTFSEYTVIHVGCLAKINPEAPLDKVCILSCGISTGLGATLNVAKPAKGSTVAIFGLGAVGLAAMEGARLAGASRIIGVXDINPAKYEQAKKFGCTEFVNPQDHDKPVPEVLIELTNGGVDRSVECTGNVNAMISAFECVHDGWGVAVLVGVPHKDDQFKTHPMNFLSEKTLKGTFFGNYKPRTDLPNVVEMYMKKELELEKFITHSVPFSEINTAFDLMLKGESLRCIMRMED

SEQ ID NO: 5289 - protein, 379 aa, Zea mays
  Clone ID: PAT_MRT4577_186156C.1.pep
MATAGKVIKCRAAVAWEAGKPLSIEEVEVAPPQAMEVRVKILYTALCHTDVYFWEAKGQTPVFPRILGHEAGGIVESVGEGVTELAPGDHVLPVFTGECKECAHCKSEESNMCDLLRINVDRGVMIGDGKSRFTISGQPIFHFVGTSTFSEYTVIHVGCLAKINPEAPLDKVCILSCGISIGLGATLNVAKPAKGSTVAIFGLGAVGLAAMEGARLAGASRIIGVDINPAKYEQAKKFGCTEFVNPKDHDKPVQEVLIELTNGGVDRSVECTGNVNAMISAFECVHDGWGVAVLVGVPHKDDQFKTHPMNFLSEKTLKGTFFGNYKPRTDLPNVVEMYMKKELELEKFITHSVPFSEINTAFDLMLKAESLRCIMRMED

SEQ ID NO: 5290 - protein, 381 aa, Zea mays
  unsure (1)..(381): unsure at all Xaa locations
  Clone ID: PAT_MRT4577_186157C.1.pep
MATAGKVIKCRAAVAWEAGKPLSIEEVEVAPPQAMEVRIKILYTALCHTDVYFWEAKGQTPVFPRILGHEAGGIVESVGEGVTELAPGDHVLPVFTGECKECAHCKSEESNMCDLLRINVDRGVMIGDGKSRFTISGQPIFHFVGTSTFSEYTVIHVGCLAKINPEAPLDKVCILSCGISTGLGATLNVAKPAKGSTVAIFGLGXAVGLAAMXEGARLAGASRIIGVDINPAKYEQAKKFGCTEFVNPKDHDKPVQEVLIELTNGGVDRSVECTGNINAMISAFECVHDGWGVAVLVGVPHKDDQFKTHPMNFLSEKTLKGTFFGNYKPRTDLPNVVEMYMKKELELEKFITHSVPFSEINTAFDLMLKGESLRCIMRMED

SEQ ID NO: 5291 - protein, 416 aa, Zea mays
  unsure (1)..(416): unsure at all Xaa locations
  Clone ID: PAT_MRT4577_186160C.1.pep
MATAGKVIKCRAAVAWEAGKPLSIEEVEVAPPQAMEVRVKILYTALCHTDVYFWEAKGQTPVFPRILGHEAGGIVESVGEGVTELAPGDHVLPVFTGECKECAHCKSEESNMCDLLRINVDRGVMIGDGKSRFTISGQPIFHFVGTSTFSEYTVIHVGCLAKINPEAPLDKVCILSCGISTGLGATLNVAKPAKGSTVAIFGLGAVGLAAMEGARLAGASRIIGVDINPAKYEQAKKFGCTEFVNPKDHDKPVQEVLIELTNGGVDRSVECTGNVNAMISAFECVHDGWGVAVLVGVPHKDDQFKTHPMNFLSEKTLKGTFFGNYKPRTDLPNVVEMYMKKXPPPEEPWSTYLTCLRFNRIPDXDQHAMCVFVLCTYXELELEKFITHSVPFSEINTAFDLMLKGESLRCIMRMED

SEQ ID NO: 5292 - protein, 76 aa, Zea mays
  unsure (1)..(76): unsure at all Xaa locations
  Clone ID: PAT_MRT4577_186318C.1.pep
MCCNCGSSCGXSSSCKCGKKYPDLYETSTDAHATVHLSVAPEKNAEPKVVQAVAESGEAAHECSCGCNCKCDPCNC

SEQ ID NO: 5293 - protein, 203 aa, Zea mays
  Clone ID: PAT_MRT4577_1863C.1.pep
IKTGSLRSRRVPSRCSPSCATPATQPLEKHPKLKAAEKLKHFIIWNGVFDFREQMFSFLRDAGDAPLEKHPKLKAHAVTVFVMACESATQLRSTGDVKVREATLKRLGATHARAGVADAHFEVVKTALLDTIRDAVPDMWTPEMKAAWEEAYDQLAAVIKEEMKNAAAAEEQTKNAATAEEEIKNAAPAEEQTKIAAAAVDGS

SEQ ID NO: 5294 - protein, 191 aa, Zea mays
  Clone ID: PAT_MRT4577_1864C.1.pep
MGFSEAQEELVLRSWKAMKSDSESTALKFFLRIFEIAPGAKQMFSFLRDAGDAPLEKHPKLKAHAVTVFVMACESATQLRSTGDVKVREATLKRLGATHARAGVADAHFEVVKTALLDTIRDAVPDMWTPEMKAAWEEAYDQLAAVIKEEMKNAAAAEEQTKNAATAEEEIKNAAAAEEETTNAAAAVDGS

SEQ ID NO: 5295 - protein, 51 aa, Zea mays
  Clone ID: PAT_MRT4577_186537C.1.pep
DLAPSWLIRAATRSAAYQIRAWRSESRSRADESESNRGRNCLWRPSGRWSE

SEQ ID NO: 5296 - protein, 85 aa, Zea mays
  Clone ID: PAT_MRT4577_186561C.1.pep
SVCMARQPRLQVLAASRNKISTLKGFPHFPSLEHLRVEENPLLEMPHLEAASILLIGPTLKKFNDRDLNPNEAEVAKQYPAHTAI

SEQ ID NO: 5297 - protein, 61 aa, Zea mays
  Clone ID: PAT_MRT4577_186651C.1.pep
CISYTTTRKASRALNGRKTPNAMGVGAPSSILEGGVVPGLCLGLDFGPPPGVSAQSRPYWP

SEQ ID NO: 5298 - protein, 257 aa, Zea mays
  unsure (1)..(257): unsure at all Xaa locations
  Clone ID: PAT_MRT4577_18668C.1.pep
IRLLDPPLHEFLPXGNVEEIVRELCAETGANEEEALERVEKLAEVNPMLGFRGCRLGISYPELTEMQARAIFEAAIAMSNQGVEVFPEIMVPLVGTPQELGHQVNVIKQTAEKVFANAGKTIGYKIGTMIEIPRAALVADQIAEQAEFFSFGTNDLTQMTFGYSRDDVGKFIPIYLAQGILQHDPFEVLDQRGVGELVKFATERGRQTRPNLKVGICGEHGGEPSSVAFFAKVGLDYVSCSPFRVPIARLAAAQVLV

SEQ ID NO: 5299 - protein, 235 aa, Zea mays
  unsure (1)..(235): unsure at all Xaa locations
  Clone ID: PAT_MRT4577_186916C.1.pep
MATAGKVIKCKAAVAWEAGKPLSIEEVEVAPPQAMEVRVKILYTALCHTDVYFWEAKGQTPVFPRILGHEAGGIVESVGEGVTELVPGDHVLPVFTGECKDCAHCKSEESNLCDLLRINVDRGVMIGDGQSRFTISGKPIFHFVGTSTFSEYTVIHVGCLAKINPSAPLDKVCVLSCGISTGLGATLNVAKPKKGXTVAIFGLGAVGLAAMQRAKMAGASRIIRVDLNPXKYQQA

SEQ ID NO: 5300 - protein, 246 aa, Zea mays
  Clone ID: PAT_MRT4577_186918C.1.pep
METAGKVIKCKAAVAWEAGKPLSIEEVEVAPPQAMEVRVKILYTALCHTDVYFWEAKGQTPVFPRILGHEAGGIVESVGEGVTELAPGDHVLPVFTGECKDCAHCKSEESNLCDLLRINVDRGVMIGDGQSRFTIGGKPIFHFVGTSTFSEYTVIHVGCLAKINPEAPLDKVCVLSCGISTGLGATLNVAKPKKGSTVAIFGLGAVGLAAMEGAKMAGASRIIGVDLNPAKYEQAKKFGCTDFVNP

SEQ ID NO: 5301 - protein, 95 aa, Zea mays
  Clone ID: PAT_MRT4577_187123C.1.pep
MYGRGKGGKDLSNGGAKRHRKVLRDNIQSITNPAIQRLVRKGSVISISRLIYHETYGVLKIYIENVIRDAVNYTEHARRKTVTAMDVDYALKHYG

SEQ ID NO: 5302 - protein, 542 aa, Zea mays
  Clone ID: PAT_MRT4577_187144C.1.pep
MARGGDGLQVLSALDAAKTQWYHFTAIIVAGMGFFTDAYDLFCISLVTKLLGRIYYTDTSKDSPGSLPPNVAAAVNGVAFCGTLAGQLFFGWLGDKLGRKSVYGMTLMVMVICSVASGLSFGHTPTGVMATLCFFRFWLGFGIGGDYPLSATIMSEYANKRTRGAFIAAVFAMQGFGILAGGIVTLVISAAFRAAYPSPAYRDDHFTSTVPQADFVWRVILMLGAAPALLTYYWRMKMPETARYTALVAKNAKQAAADMSKVLHTEILDEQEKLDGMVAAEGANSFGLFSREFARRHGLHLVGTATTWFLLDIAFYSQNLFQKDIFTSINWIPKANTMSALEEVYRISRAQTLIALCGTVPGYWFTVALIDVVGRFAIQLLGFFMMTVFMLGLAIPYHHWTTPGNHIGFVVMYAFTFFFANFGPNSTTFIVPAEIFPARLRSTCHGISAASGKAGAIIGAFGFLYAAQNQDKSKTDAGYPAGIGVRNSLFVLAASNMLGFVLTFLVPESKGKSLEEMSGEAEDSEEEPVGARAVRPSETQMV

SEQ ID NO: 5303 - protein, 539 aa, Zea mays
  Clone ID: PAT_MRT4577_187145C.1.pep
MARGGDGLQVLSALDAAKTQWYHFTAIIVAGMGFFTDAYDLFCISLVTKLLGRIYYTDTSKDSPGSLPPNVAAAVNGVAFCGTLAGQLFFGWLGDKLGRKSVYGMTLMVMVICSVASGLSFGHTPTGVMATLCFFRFWLGFGIGGDYPLSATIMSEYANKRTRGAFIAAVFAMQGFGILAGGFVTLVISAAFRAAYPSPAYRDDHFTSTVPQADFVWRVILMLGAAPALLTYYWRMKMPETARYTAVVAKNAKQAAADMSKVVQTEIVDEQEKLDAAEGANSFGLFSREFARRHGLHLVGTATTWFLLDIAFYSQNLFQKDIFTSINWIPKANTMSALEEVYRISRAQTLIALCGTVPGYWFTVALIDVVGRFAIQLLGFFMMTVFMLGLAIPYHHWTTPGNHIGFVVMYAFTFFFANFGPNSTTFIVPAEIFPARLRSTCHGISAASGKAGAIIGAFGFLYAAQNQDKSKTDAGYPAGIGVRNSLFVLAASNMLGFVLTFLVPESKGKSLEEMSGEAEDSEEEPVGARAVRPSETQMV

SEQ ID NO: 5304 - protein, 575 aa, Zea mays
  unsure (1)..(575): unsure at all Xaa locations
  Clone ID: PAT_MRT4577_187147C.1.pep
MARGGDGLQVLSALDAAKTQWYHFTAIIVAGMGFFTDAYDLFCISLVTKLLGRIYYTDTSKDNPGSLPPNVAAAVNGVAFCGTLAGQLFFGWLGDKLGRKSVYGMTLMLMVICSVASGLSFGHTXRGVMATLCFFRFWLGFGIGGDYPLSATIMSEYANKKTRGAFIAAVFAMQGFGILAGGIVTLVISAAFRAGYPAPAYRDDHFNSTVPQADYVWRIILILGAAPAMLTYYWRMKMPETARYTALVAKNAKQAAADMSRVLQTEIVDEQEKLDEMXRREQXFGLFSREFARRHGLHLVGTSTTWFLLDIAFYSQNLFQKDIFTSINWIPKANTMSALEEVFRISRAQTLIALCGTVPGYWFTVALIDVVGRFAIQLLGFFMMTVFMLGLAIPYHHWTTPGNHIGFVVMYAFTFFFANFGPNSTTFIVPAEIFPARLRSTCHGISAASGKAGAIIGAFGFLYAAQNQDKSKADAGYPAGIGVRNSLFVLAASNLLGFILTFLVPESKGKSLEEMSGEADDAEDXPSAPARCGRRGPRWCRIEHGDACTRVLHPGARLGRQGAPVQACRCFAVQK

SEQ ID NO: 5305 - protein, 547 aa, Zea mays
  Clone ID: PAT_MRT4577_187148C.1.pep
MARGGDGLQVLSALDAAKTQWYHFTAIIVAGMGFFTDAYDLFCISLVTKLLGRIYYTDTSKDSPGSLPPNVAAAVNGVAFCGTLAGQLFFGWLGDKLGRKSVYGMTLMVMVICSVASGLSFGHTPTGVMATLCFFRFWLGFGIGGDYPLSATIMSEYANKRTRGAFIAAVFAMQGFGILAGGIVTLVISAAFRAAYPSPAYRDDHFTSTVPQADFVWRVILMLGAAPALLTYYWRMKMPETARYTALVAKNAKQAAADMSKVLHTEILDEQEKLDAAEGANSFGLFSREFARRHGLHLVGTATTWFLLDIAFYSQNLFQKDIFTSINWIPKANTMSALEEVYRISRAQTLIALCGTVPIGFVVMYAGYWFTVALIDVVGRFAIQLLGFFMMTVFMLGLAIPYHHWTTPGNHIGFVVMYAFTFFFANFGPNSTTFIVPAEIFPARLRSTCHGISAASGKAGAIIGAFGFLYAAQNQDRSKTDAGYPAGIGVRNSLFVLAASNMLGFVLTFLVPESKGKSLEEMSGEAEDSEEEPVGARAVRPSETQMV

SEQ ID NO: 5306 - protein, 120 aa, Zea mays
  unsure (1)..(120): unsure at all Xaa locations
  Clone ID: PAT_MRT4577_187161C.1.pep
WQAKIFRLMMLLGLAASXATASHFTQCSQAXITFLLTPYLSPSMSSVCENPILLPYRIQQAIAAGILPLSPLFLQQSSSLLQELPLRHLLAQNIRAQQLQQLVLANLAAYSQQQAVTFGA

SEQ ID NO: 5307 - protein, 227 aa, Zea mays
  unsure (1)..(227): unsure at all Xaa locations
  Clone ID: PAT_MRT4577_18853C.1.pep
MPLLADSGHGLVNTFAPTSAAAAAMDSHAGARGGSRSLLFRHRQPDEDLEGGEGAMTLDERVTLXRRIEEESMQQDXLRRLVENKPGPICYYGLEPSXRMHSRQGIAKTINKTRWYNTERKGKIRIADWFEQLNNKMRGDLKKIHTVMQLXDNICKAVEMNXKTGVEVLWLPEEIKRSAYKHWTIAMDIDQKNSEKRTTRCWQNMSRSDQDYMTAGQIFYPCMQCAD

SEQ ID NO: 5308 - protein, 119 aa, Zea mays
  unsure (1)..(119): unsure at all Xaa locations
  Clone ID: PAT_MRT4577_18938C.1.pep
FLPFNKQDAFNLLLYLRQQQLPFSQLRGANRQQYLPFSQLAALNSPAYLQQLHPLPFSQLAGVSPATFLKQPQLSPLDQHAAPNAGTLXQQQQPLPLNQLAFPTPAAFNQQPMIGGALF

SEQ ID NO: 5309 - protein, 64 aa, Zea mays
  Clone ID: PAT_MRT4577_19019C.1.pep
ESCKKTNSDDLSDRGQLVRPGVEQLPHRVHDDADLRQLVRVDRCSGRRRCRLAQALIRLTIECC

SEQ ID NO: 5310 - protein, 161 aa, Zea mays
  unsure (1)..(161): unsure at all Xaa locations
  Clone ID: PAT_MRT4577_1903C.1.pep
MAAKIFCLLXMLLGLSASAAXVTIYPQCSQVPIASLFPPXLSPALSMDCENPILQPYRIQQAIRTGILPLSPLFLQQSSXLLQQIXPLVHLLQQNMRTQQLQQLALANLAAYSQQQQFLXYNQLAVLYSAFYFXQQQLPFNQLFAAYPQAXLAYNQLHRFE

SEQ ID NO: 5311 - protein, 79 aa, Zea mays
  Clone ID: PAT_MRT4577_19079C.1.pep
EGSRRALEEPREQKKNGGLFMRRGSETGRFSHGSFVYLSRACLCLFRALGCVGPVPRFLTRCCFQFANVQGPGTPNNGC

SEQ ID NO: 5312 - protein, 36 aa, Zea mays
  Clone ID: PAT_MRT4577_19105C.1.pep
KQLAVDMLANKLLFEASEYSHVCKHACSKEVPQHQH

SEQ ID NO: 5313 - protein, 105 aa, Zea mays
  unsure (1)..(105): unsure at all Xaa locations
  Clone ID: PAT_MRT4577_19228C.1.pep
MSALDVEYRCFAPGLGWATSNESLENVFVSYGEILDSKVIAXSXTGRSHGFGFDTFSSENCMLHAIENMNGKEVDGRNITGSQADSRGDGVDGGGYGGVLDADGR

SEQ ID NO: 5314 - protein, 899 aa, Zea mays
  unsure (1)..(899): unsure at all Xaa locations
  Clone ID: PAT_MRT4577_19439C.1.pep
MEAEAAAAVVASSASASASAGRSRPSSSAAQVTSNSAVRAGEENAASLYVLSVIDSLKKRITADRLTYIKNRIGENKTNISSYTQRTYNLSKNRQISTSKGTDSASNLLTKRQDDALCTLHSLDIIPVDKDGGTFQDESPFSSSNVMFGGNLGPKNAIIRPIKLPEVPKLPPYTTWIFLDRNQRMTEDQSVLGRRRIYYDTSCGEALICSDSEDEAIEDEEEKKEFKHSEDHIIRMTVQECGMSDAVLQTLARHMERAADDIKARTCVLMDISAXIGDADXVFDCKLHGCSQDLVFPTEKQPAWSGVDDSVPCGIHCHKLASEPDAAAGADHMLFDVEEPTHSSDNVMNQPGSNRKKNGSSGRKTKSQQSESSSTARVISESSDSEVHPISNKSPQHSPSPSKVKIGPKGGIRKITNRRIAERILMSVKKGQREMASSDSNFVSGYLLARDMKLRSDTRNGNKELIVSSQQSSPSTRSSKKKSTPQIGNSSAFAEAHNDSTEEANNRHSATDGYDSSRKEEFVNENLCKQEVYLRSWKAIEQGLLVKGLEIFGRNSCLIARNLLGGMKTCKDVFQYMNYIENNSASGALSGVDSLVKGYIKGTELRTRSRYFRRRGKVRRLKYTWKSAGYNFKRITERKDQPCRQYNPCGCQSTCGKQCPCLSNGTCCEKYCGCPKICKNRFRGCHCAKSQCRSRQCPCFAADRECDPDVCRNCWVGCGDGTLGVPNQRGDNYECRNMKLLLKQQQRVLLGRSDVSGWGAFLKNSVSKHEYLGEYTGELISHKEADKRGKIYDRENSSFLFNLNNEYVLDAYRMGDKLKFANHAPDPNCYAKVIMVTGDHRVGIFAKERILAGEELFYDYRYEPDRAPAWARKPEASGAKDDGQPFNGRAKKLAQNNRG

SEQ ID NO: 5315 - protein, 982 aa, Zea mays
  unsure (1)..(982): unsure at all Xaa locations
  Clone ID: PAT_MRT4577_19440C.1.pep
MEAEAAAAVVASSASASASAGRSRPSSSAAQVTSNSAVRAGEENAASLYVLSVIDSLKKRITADRLTYIKNRIGENKTNISSYTQRTYNLSKNRQISTSKGTDSASNLLTKRQDDALCTLHSLDIIPVDKDGGTFQDESPFSSSNVMFGGNLGPKNAIIRPIKLPEVPKLPPYTTWIFLDRNQRMTEDQSVLGRRRIYYDTSCGEALICSDSEDEAIEDEEEKKEFKHSEDHIIRMTVQECGMSDAVLQTLARHMERAADDIKARYEILHGEKTKDSCKKGTEHNVKVEDLYCDKDLDAALDSFDNLFCRRCLVRLTVTFRYSFLGPVCXGHFCSLVMLIXFDCKLHGCSQDLVFPVSFHKLKELFIKLCVYLICVFFVQTEKQPAWSGVDDSVPCGIHCLLLASEPDSAAGADHMLFDVEEPTHSSDNVMNQPGSNRKKNGSSGRKTKSQQSESSSTARVISESSDSEVHPISNKSPQHSPSPSKVKIGPKGGIRKITNRRIAERILMSVKKGQREMASSDSNFVSGYLLARDMKLRSDTRNGNKELIVSSQQSSPSTRSSKKKSTPQIGNSSAFAEAHNDSTEEANNRHSATDGYDSSRKEEFVNENLCKQEVYLRSWKAIEQGLLVKGLEIFGRNSCLIARNLLGGMKTCKDVFQYMNYIENNSASGALSGVDSLVKGYIKGTELRTRSRYFRRRGKVRRLKYTWKSAGYNFKRITERKDQPCRQYNPCGCQSTCGKQCPCLSNGTCCEKYCGCPKICKNRFRGCHCAKSQCRSRQCPCFAADRECDPDVCRNCWVGCGDGTLGVPNQRGDNYECRNMKLLLKQQQRVLLGRSDVSGWGAFLKNSVSKHEYLGEYTGELISHKEADKRGKIYDRENSSFLFNLNNEYVLDAYRMGDKLKFANHAPDPNCYAKVIMVTGDHRVGIFAKERILAGEELFYDYRYEPDRAPAWARKPEASGAKDDGQPFNGRAKKLAQNNRG

SEQ ID NO: 5316 - protein, 105 aa, Zea mays
  unsure (1)..(105): unsure at all Xaa locations
  Clone ID: PAT_MRT4577_19480C.1.pep
RTHFPLETLPQQCQYCTNNGSQIFCLLMLLDLSASAATATIFPQCSQPPIASLLPPHLSPPASSPCENPILQPYRIQXAMGPAILPLSPSYLHQPSILLLQISFG

SEQ ID NO: 5317 - protein, 312 aa, Zea mays
  Clone ID: PAT_MRT4577_19502C.1.pep
MAESFVLNTGSRIPSVGLGVWQIQPDAANDAIYAAVKAGYRHIDCAAAYNNEEEVGLALKKLFEDGVVKRDDLFITSKLWAANHAPEDVEEGIDTTLQDLQLDYLDLYLIHGPIRIKKGTSTMTPENFLPTDIPATWAAMEKLYDSGKARAIGVSNFSCKKLHDLLAVARVPPAVNQVECHPVWQQDKLRKLCQSNGVHLSAFSPLGSPGSPWINGPSVLKNPIVVSVADKLQKTPAQVALRWGIQMGHSVLPKSANESRIKENIDIFGWSIPEDLMAKFSEIKQVRLLTAEFVVHPQAGYNTLEDFWDGEI

SEQ ID NO: 5318 - protein, 204 aa, Zea mays
  unsure (1)..(204): unsure at all Xaa locations
  Clone ID: PAT_MRT4577_19600C.1.pep
MASATGLKACFLRKKSXEWGATRQDAAPKTPTGSMVVRAYDYDDELXMTAKMIVLSGRCILEMDESNATCGKRLETIGMDNTEDNREAYRKLLVTGPGLGQYISSVILFEETMDQAAVDGRKSVDILAEQGIETGIKEDKGLVPIAGSNNEXWCQGLDGLVYREDVYYQQGARIDKWHTDDSIPNGPSELDVNEAARGLARYDG

SEQ ID NO: 5319 - protein, 95 aa, Zea mays
  unsure (1)..(95): unsure at all Xaa locations
  Clone ID: PAT_MRT4577_19611C.1.pep
AANPAASSPRTHYHPSRSTRRAGPPDMAPAGPYGIAESQRLADLLLLEGNAFVRTERLSAVMVAFTGALTLCPNGADSGPTKHSAIXQRDEWTTV

SEQ ID NO: 5320 - protein, 344 aa, Zea mays
  unsure (1)..(344): unsure at all Xaa locations
  Clone ID: PAT_MRT4577_19712C.1.pep
TRPIGYLEAVRGSASLSPPHFFLRTRSFVREGAPSCPHIRSSLPDTDRPLVRSPPSPIPTAMAAAAAAASSSSSSEXFRSPPAPASPXEVAVGAVATGSGDRVAADCGVCAICLDRIALQETALVKGCDHAYCVTCILRWASYKENPLCPQCKHPFEFLSVHRSLDGCLHDYLFEESVCLLLRAAWFEPLIVEAHEEALEEEEFLHQQYQYDDDEDDLDEESYYMNRSPSIRIGNRRWGDNGYIRGGRKEARPVNTDVAAGPSRTPKKKEKAASSSASVSVSGSGSGSGSVSKDVAGRRAKRAQKREAADKAAAEKHLKHLQRLGLRKSPEPVVPEEVGPQVNE

SEQ ID NO: 5321 - protein, 295 aa, Zea mays
  unsure (1)..(295): unsure at all Xaa locations
  Clone ID: PAT_MRT4577_19785C.1.pep
LINADGIIEESFWPGKYAVELSSVAYGATWQFDTEALPNDLVKRGLAVRRDGDGELELTIKDYPYAHDGLMIWNSIKQWVTDYVGVYYKSDEAVAGDAELKAFWDEVRNVGHGDKKDEPWWPVLNTRDSLVETLTTIMWVTSGHHSAVNFGQYHYGGYFPNRPTTIRKNMPVEXPXDEEMRKFLSQPETTLLDMMPTQMQAIRIMTTLDILSSHSPDEEYMGEFAEPSWLVEPMVKAAFEKFSGRMKEIEGFIDECNNNPENKNRFGAGIVPYELLKPFSKPGVTGRGIPYSISI

SEQ ID NO: 5322 - protein, 914 aa, Zea mays
  unsure (1)..(914): unsure at all Xaa locations
  Clone ID: PAT_MRT4577_19793C.1.pep
MIQMNMKQPLVLPAHRGNVIGSRLASSPSPVAAAAAAASRRRGVVSSPRSRLQRHMRLPRISCSATEEASGAVSAVTVEKMLTVTASVQAAPAIGQMYFQRALDDAGDFFGKTLLMELVSSEVDXVSSKTGLEKPRVTAFAHKTLREGHYEAEFKVPASFGPVGAVLLENEHHKEIFIREIKLVTGSDSSTAVTFGCNSWVHSKFDNPEKRIFFTLKSYLPSDTPKGLEDLRKKDLQALRGDGHGERKASERVYDYDVYNDLGDPDKNPAHQRPVLGGSKRYPYPRRCRTGRPRTRKDPEAEVRHGHNYVPRDEQFSEVKQLTFGATTLRSGLHALLPAIRPMLIKRELRFPHFPAIDDLYSDGIPLPAQTGLGAIRSIVPRVVKLVEDTTEHVLRFELPDMIERDRFSWFKDEEFARQTIAGLNPLCIQLLTEFPIRSKLDPEVYGPAESAITKEILEKHMSGGAAMTVEQALAAKRLFILDYHDVFLPYVHRVRELPDTTLYGSRTVFFLTDLGTLMPLAIELVRPKSPTQPQWKRVFTHGPDATDAWLWKLAKAHVVTHDTGYHQLVSHWLRTHCCVEPYIIAANRQLSRLHPVYRLLHPHFRYTMEINALAREALINADGIIEESFWPGRYAVELSSAAYGATWQFDTEALPNDLVKRGLAVRRDDGELELTIKDYPYAHDGLMVWNTIRQWAADYVNVYYKSDEAVAADPELKAFWDEVRNVGHGDKKDEPWWPVLDTRDSLAETLTTIMWVTSGHHSAVNFGQYHFGGYFPNRPTTIRKSMPVEEEAGRDEEMKKFLKQPETTLLDMLPTQMQAIRVMTTLDILSSHSPDEEYMGELAEPSWLEEPMVKAAFEKFGGRMKEIEGFIDECNNNPELRNRCGAGIVPYELLKPFSKPGVTGRGIPNSISI

SEQ ID NO: 5323 - protein, 102 aa, Zea mays
  unsure (1)..(102): unsure at all Xaa locations
  Clone ID: PAT_MRT4577_19842C.1.pep
LRTRTTRERKKKRRGAATGGGSXAXRSGERRKPADNPXSERKPTGNXGXSAGPRTRAAXXAGHEKANPRGGGGGHXRASPRDGRQQATAAXDPEDTPREKGT

SEQ ID NO: 5324 - protein, 78 aa, Zea mays
  Clone ID: PAT_MRT4577_19845C.1.pep
CMGLLEPRMNTALTTDTERPCNQKHRWAPPNVTTRRYTLWTRVNITVANGITCPVGPQRSIATVSVGVARPPVTDGNC

SEQ ID NO: 5325 - protein, 300 aa, Zea mays
  Clone ID: PAT_MRT4577_20026C.1.pep
MGDLLGSPRVAFHHSIRSSPTTPFLRGPSPGAAPRQEEVCSFNNMSREENVYMAKLAEQAERYEEMVEYMEKVAKTVDVEELTVEERNLLSVAYKNVIGARRASWRIVSSIEQKEESRKNEEHVNLIKEYRGKIEAELSNICDGILKLLDSHLVPSSTAAESKVFYLKMKGDYHRYLAEFKTGAERKESAESTMVAYKAAQDIALAELAPTHPIRLGLALNFSVFYYEILNSPDKACNLAKQAFDEAISELDSLGEESYKDSTLIMQLLRDNLTLWTSDLTEDGADEGKDAQKGDAGEGQ

SEQ ID NO: 5326 - protein, 85 aa, Zea mays
  unsure (1)..(85): unsure at all Xaa locations
  Clone ID: PAT_MRT4577_2019C.1.pep
FSAALNNGYEFWGPLFGKXFFPMWVIKPLDPFLKGFMGPQNSPPTIVVLWSVLLAPVFSLLWGKIDPFVGGTETVNPNNCNPIIC

SEQ ID NO: 5327 - protein, 213 aa, Zea mays
  Clone ID: PAT_MRT4577_20206C.1.pep
MTENLHSRKMVQPKKFRGVRQRHWGSWVSEIRHPLLKRRVWLGTFETAEEAARAYDEAAVLMSGRNAKTNFPIQRSSTGEPTPAAGRDARSNFSSGSSTTNLSQILSAKLRKCCKAPSPSLTCLRLDPEKSHIGVWQKRAGARADSNWVMTVELNKDAASTDAASQSTSATTAPPATPMDEEERIALQMIEELLSSSSPASPSNGDDQGRFII

SEQ ID NO: 5328 - protein, 43 aa, Zea mays
  Clone ID: PAT_MRT4577_20284C.1.pep
TNYLRPDIKRGRFSFDEEEAIIQLHSILGNKWSAIAARLPGRT

SEQ ID NO: 5329 - protein, 60 aa, Zea mays
  unsure (1)..(60): unsure at all Xaa locations
  Clone ID: PAT_MRT4577_20295C.1.pep
MAVSQESLSLVGTMRGHNGEVTGXATPIDNLPFIVSSSRDKYLLVWDLTNLVHSTSEIRR

SEQ ID NO: 5330 - protein, 97 aa, Zea mays
  unsure (1)..(97): unsure at all Xaa locations
  Clone ID: PAT_MRT4577_20297C.1.pep
SQLLRANVQQFLPVKQLAALTYRAYLQQQXLMPFSQLAGVSPATFLTRPQLLPFXQHAAPNAGALLQXLQHMLPFIQLALTNPAAFYQQPIIGGALF

SEQ ID NO: 5331 - protein, 111 aa, Zea mays
  unsure (1)..(111): unsure at all Xaa locations
  Clone ID: PAT_MRT4577_20794C.1.pep
GSAGFGGVGERIEMAASDVEYRCFVCGLGWATDDHLLHNVLSTYGEVLEYKIILDRQTHKYRGLXFDTFCTDDAMQNAIEGMNGKELYCSNITVNEGQSRGGRGSERGGGY

SEQ ID NO: 5332 - protein, 71 aa, Zea mays
  Clone ID: PAT_MRT4577_20797C.1.pep
SRGVGCPIPSARPLDVIPPAALDPYKHRPSSGSNSSFWTTNFGARVWNNNSALIVGRRGSILLADYYLFEK

SEQ ID NO: 5333 - protein, 82 aa, Zea mays
  unsure (1)..(82): unsure at all Xaa locations
  Clone ID: PAT_MRT4577_20809C.1.pep
MAAADVEYRCYVGGLAWATRNESLEKAGASYGEILDSKVITDRXTERTRGFGYVTFSSDNSMLYAIENMNGKVLDCRNIIVN

SEQ ID NO: 5334 - protein, 406 aa, Zea mays
  Clone ID: PAT_MRT4577_21027C.1.pep
MKKLHWLVRFLFGPVPVYFSALAILIVLTNAQYFGLVGVGVAPRTAKLASSAPVVSVMKYCDIFRGEWVPDAEAPYYNHKTCHMIQEHQNCLKYGRPDLGFLKWRWRPSGCELPRFDPLQFLQFARGKSLAFVGDSLARNHMQSLLCLLSQVAYPKDLSANPSDQNKVYHYRAYNFTISMFWSPFLVRAREPDHDGPAHTGHWSLYLDEPDDKWVSQMPRFDYVLVSAANWFSRPSLFYERRRLVGCSFCSRQYGVPDLTLYYSQRRAWRVALRAINDLERLRGRVIVRMLSPMSHFENGTWDHGGDCRRTQPLRANQTAMEGRDLHFYTAQMEEFRAAEKAAAEKGRRLMLMDATAAMLMRPDGHPSRYGHWPNEKVQLYNDCIHWCLPGPIDIWNDMLFQMLLA

SEQ ID NO: 5335 - protein, 164 aa, Zea mays
  Clone ID: PAT_MRT4577_21028C.1.pep
MKKLHWLVRFLFGPVPVYFSALAILIVLTNAQYFGLVGVGVAPRTAKLASSAPVVSVMKYCDIFRGEWVPDAEAPYYNHKTCHMIQEHQNCLKYGRPDLGFLKWRWRPSGCELPRFDPLQFLQFARGKSLAFVGDSLARNHMQSLLCLLSQVAYPKDLSGNPSD

SEQ ID NO: 5336 - protein, 84 aa, Zea mays
  unsure (1)..(84): unsure at all Xaa locations
  Clone ID: PAT_MRT4577_21080C.1.pep
PERVVHARGASAKGFFXCTHYVTSVRCAYLLRAPDMRTPVIVRFXTVIHERWCLKTMRDPRGFGVKFYTRXGNWNLLGNNCRVF

SEQ ID NO: 5337 - protein, 50 aa, Zea mays
  Clone ID: PAT_MRT4577_21176C.1.pep
MESKGGILSSSSRSMMYEAPLGYCIEDGRPAGGAKKFQSAAYSNCAKKAC

SEQ ID NO: 5338 - protein, 44 aa, Zea mays
  Clone ID: PAT_MRT4577_21206C.1.pep
ARIRVECAQSRDDTAIGMVMFIVDSTLCIPAACSSVPSISVHGP

SEQ ID NO: 5339 - protein, 134 aa, Zea mays
  Clone ID: PAT_MRT4577_21269C.1.pep
ERRPKLFFFLCSFFFLFTFNQLSTLNPAANLQQQLLPLSPLSAAYPQQFLPFNQLTALNSPAYLQQQQLLPFSQLAGVSPATLLTQPQGLPFYQNAAPNAGTLLQLSKSLPFNQLALTNPTNFYQQPIIGGALF

SEQ ID NO: 5340 - protein, 134 aa, Zea mays
  unsure (1)..(134): unsure at all Xaa locations
  Clone ID: PAT_MRT4577_21270C.1.pep
ERRHKLFFFLCSFFFLFTFNQLATLNPAGNLQQQLLPLSQLSAGYPXQFLPFNQLTALNSPAYLQQQQLLPFSQLAGVSPATLLTQPQWLPFYQNAVPKGGTLLQLQKWLAFNQLGLTNPANFYQQPINGGALF

SEQ ID NO: 5341 - protein, 89 aa, Zea mays
  unsure (1)..(89): unsure at all Xaa locations
  Clone ID: PAT_MRT4577_2141C.1.pep
KFHLICSTIACPFVEGCXLLHFAPGGYPAAAKMLNLSSSAVSGPSRTHVDHAALTGASHPASTVKTRMCTMYNTTEVLQFGDTCHFAHS

SEQ ID NO: 5342 - protein, 485 aa, Zea mays
  Clone ID: PAT_MRT4577_21539C.1.pep
MALSVEKTSSGREYKVKDLSQADFGRLELDLAEVEMPGLMACRTEFGPSKPFAGARISGSLHMTIQTAVLIETLTALGAEVRWCSCNIFSTQDHAAAAIARDSAAVFAWKGETLEEYWWCTERCLDWGEAGGPDLIVDDGGDATLLIHEGVKAEEDYEKTGKIPDPESTDNAEFKIVLTIIRDGLKADPKKYRKMKERLVGVSEETTTGVKRLYQMQETGALLFPAINVNDSVTKSKFDNLYGCRHSLPDGLMRATDVMIAGKVAVVCGYGDVGKGCAAALKQAGARVIVTEIDPICALQALMEGLQVLPLEDVVSEADIFVTTTGNKDIIMVDHMRKMKNNAIVCNIGHFDNEIDMLGLETYPGVKRITIKPQTDRWVFPEINTGIIVLAEGRLMNLGCATGHPSFVMSCSFTNQVIAQLELWKEKSSGKYEKKVYVLPKHLDEKVAALHLGKLGAKLTKLTKSQADYISVPIEGPYKPAHYRY

SEQ ID NO: 5343 - protein, 123 aa, Zea mays
  unsure (1)..(123): unsure at all Xaa locations
  Clone ID: PAT_MRT4577_21542C.1.pep
MGLSVEKTSSGREYKVKDLSQADFGRLEIELAEVEMPGLMACRAEFGPSKPFAGARIXGSLHMTIQTGVLIETLTALGAEVRXMXCNIFYTQDHAAADMARDSAAAFGWKAETLXEXWWCNER

SEQ ID NO: 5344 - protein, 131 aa, Zea mays
  Clone ID: PAT_MRT4577_21544C.1.pep
MGQIQFASSPSSAAMALSVEKTSSGREYKVKDLSQADFGRLEIDLAEVKMPGRMACLVVFGPSKPFAGARISGSLHMTIHTAVLIETLTALGAEVRWCSCNIFSTQDHSAACISRDSADVFDMEGETLDEY

SEQ ID NO: 5345 - protein, 486 aa, Zea mays
  unsure (1)..(486): unsure at all Xaa locations
  Clone ID: PAT_MRT4577_21545C.1.pep
MALSVEKTASGREYKVKDLSQADFGRLELELAEVEMPGLMACRAEFGPSQPFKGARISGSLHMTIQTAVLIETLTALGAEVRWCSCNIFSTQDHAAAAIARDSAAVFAWKGETLEEYWWCTERCLDWGAGGXGPDLIVDDGGDATLLIHEGVKAEEEYEKTGKIPDPESTDNAEFKIVLTIIRDGLKADPKKYRKMKERLVGVSEETTTGVKRLYQMQETGALLFPAINVNDSVTKSKFDNLYGCRHSLPDGLMRATDVMIAGKVAVVCGYGDVGKGCAAALKQAGARVIVTEIDPICALQALMEGLQVLPLEDVVSEADIFVTTTGNKDIIMVDHMRKMKNNAIVCNIGHFDNEIDMLGLETYPGVKRITIKPQTDRWVFPETNTGIIVLAEGRLMNLGCATGHPSFVMSCSFTNQVIAQLELWKEKSSGKYEKKVYVLPKHLDEKVAALHLGKLGAKLTKLTKSQADYISVPIEGPYKPAHYRY

SEQ ID NO: 5346 - protein, 201 aa, Zea mays
  unsure (1)..(201): unsure at all Xaa locations
  Clone ID: PAT_MRT4577_21546C.1.pep
MALSVEKTSSGREYKVKDLSQADFGRLEIDLAEVEMPGLMACRAXEFGPSKPFAGARISGSLHMTIXQTAVLXVETLXTALXAEVRWCSCNIFSTQDHALXAVIARDSVSVFAWXKGETLEEYWWCTERCLDWGEAGGPDLIXDDGGDATLLIHEGVQAEEDYEXKTGKIPXDPESTDNARVQXIGLTIIREGLKGDPKKY

SEQ ID NO: 5347 - protein, 120 aa, Zea mays
  Clone ID: PAT_MRT4577_21551C.1.pep
MALSVEKTSSGREYKVKDLSQADFGRLEIELAEVEMPGLMACRAEFGPSKPFAGARISGSLHMTIQTVVLIETLTALGAEVRWCSCNIFSTQDHAVGVIARDLVGGFAWKGETLEEYWWC

SEQ ID NO: 5348 - protein, 78 aa, Zea mays
  unsure (1)..(78): unsure at all Xaa locations
  Clone ID: PAT_MRT4577_21705C.1.pep
MALLALCTSATSATHIPGHLSPLLIPLATMNPSMQYCMQQHVVAHLLAXPTLMLHQLLAXPLQPCQMPIMMPGMMPPM

SEQ ID NO: 5349 - protein, 321 aa, Zea mays
  Clone ID: PAT_MRT4577_2185C.1.pep
MAPAVAAAASAAMRQALRDRQILDAVGTGAAALSLAGSSFIVICYLLFRELRKFSFKLVFYLAVSDMFCSLFTILGGPSNAFYCFAHDYSAHFFCVASFLWTTTISFTLHRTVVKHKTDVEEFGSIFHLYVWGTSLSTTVLRSIGSDYGRPGTWCWIQQGSMAKVLHLITFYLPLWGAILYNGFTYYEVNRMLNNATQMAAGISDQSNQSDIRAGRKAFNRWGYYPLILIGSWAFATINRLYDFANPGHRIVWLSFLDVGFAGLMGLFNSIAYGLNSSVRRAISERIDTFLPERIKRSLPALSRLRSQQENELTSLIVEGN

SEQ ID NO: 5350 - protein, 137 aa, Zea mays
  Clone ID: PAT_MRT4577_21869C.1.pep
MSSTGGGGRGKAKPATKSVSRSSKAGLQFPVGRIARYLKAGKYAERVGAGAPVYLSAVLEYLAAEVLELAGNAARDNKKNRIVPRHIQLAVRNDEELSKLLGTVTIAAGGVMPNIHQTLLPKKAGQKGDIGSASQEF

SEQ ID NO: 5351 - protein, 74 aa, Zea mays
  Clone ID: PAT_MRT4577_22005C.1.pep
VRQERDTRAFFLSLSKSVLLAAVVLAASRPFPPLHAIAAGIRRLHRSLAPAPVCSEAPETGGARGSPAFGADAW

SEQ ID NO: 5352 - protein, 114 aa, Zea mays
  unsure (1)..(114): unsure at all Xaa locations
  Clone ID: PAT_MRT4577_22008C.1.pep
TLRSVFSLESAMNGAKFNGAVKADAKLAAKSKGAEKPAKGMKGKASKDPNKPKRAPTAFFVFMEEFRMEXFMEKNPKNKSAAXVGKXAGDRRKSLSESDKAPYVAKANKLKLEY

SEQ ID NO: 5353 - protein, 137 aa, Zea mays
  unsure (1)..(137): unsure at all Xaa locations
  Clone ID: PAT_MRT4577_22068C.1.pep
DAYGHQLQHTKHNILPTIAAKIFCXLILLGRSANIATATIFPQCSQTPITSLLPPYLSPTVSSMCENPIIQPYKIQHAISTSILPLLPLFLQQPSALLQHLPFVHLVAQNISAQQLQQLVLTNLSSYSHQHNFFSFN

SEQ ID NO: 5354 - protein, 387 aa, Zea mays
  Clone ID: PAT_MRT4577_22093C.1.pep
MLPSHLNGHSALGRRRPRLSAAAGESPAAAGVEAAAPLEEHDRIYFQAYSHLGIHETMIKDRVRTDAYHAAIMRHQKFIEGKVVLDVGCGTGILSVFCARAGAKRVYAVEACEIVVQAREIVKANNLTDQIVVIHGRVEDVDLEEKVDVIISEWMGYMLLYESMLPSVLFARDKWLKPGGLILPSHATLFMAPVTNRERYEDSVDFWRDVYGINMSALVPLAKKFTSEEPSIETIGGENVISWPSVFKRFDCYNFTAEEFKSITSKYKVSSMMLAPIHGFGFWFEVEFNEPIESSHNFPSSLDPLEIIQKKRRRSSEDIVLSTAPEDEPTHWQQTILYFPDPIEVKQDQIIEGSVTVSQSEENPRFLNIHLECFTGGQTLVKDCAMR

SEQ ID NO: 5355 - protein, 160 aa, Zea mays
  unsure (1)..(160): unsure at all Xaa locations
  Clone ID: PAT_MRT4577_22265C.1.pep
MAAEGEKKMITLKSSDGEEFEVEEAVAMESQTIRHMIEDDCADNGIPLPNVNSKILPKVIEYWNKHVHAGGGGGGGLKGGSDDVXAASATGPAAXGEDLKNWDADFVKGDQATLFDLILGGNYLNIKGLVDLTWQTGGGMIKGQTPEEIRKTLNIKNDFT

SEQ ID NO: 5356 - protein, 176 aa, Zea mays
  Clone ID: PAT_MRT4577_22268C.1.pep
MAAEGEKKMITLKSSDGEEFEVEEAVAMESQTIRHMIEDDCADNGIPLPNVNSKILSKVIEYCNKHVHAAAAAAAASKAGSDDVGAAAANSTAASGEDLKNWDADFVKVDQATLFDLILAANYLNIKGLLDLTCQTVADMIKGKTPEEIRKTFNIKNDFTPEEEEEIRRENQWAFE

SEQ ID NO: 5357 - protein, 176 aa, Zea mays
  Clone ID: PAT_MRT4577_22270C.1.pep
MAAEGEKKMITLKSSDGEEFEVEEAVAMESQTIRHMIEDDCADNGIPLPNVNSKILSQGIEYWNKHVHGGAAAAAGSKGGSHDVGGASAKRNGGSGGDLQNWDGDFVKGDQGTLFHLLLGGNYLNIKGLVDLTWQNGGGMVQGKTPEEIRKNFHIQNGFTPEEEEEIRRENQWAFQ

SEQ ID NO: 5358 - protein, 145 aa, Zea mays
  unsure (1)..(145): unsure at all Xaa locations
  Clone ID: PAT_MRT4577_22271C.1.pep
MAAEGEKKMITLKSSDGEEFEVEEAVAMESQXTIRHMIEDDCADNGIPLPNDNSKILFKGIEYWNKHVHAXAAEPAXKGGSDDVGGGFGNRNGGFGEDLKNWDADFVKGDQATLFDLILAGNYLNIKGVVELTCETGGGMIKGQT

SEQ ID NO: 5359 - protein, 305 aa, Zea mays
  Clone ID: PAT_MRT4577_22272C.1.pep
MGASFTKQGSMLEISSCCLRSLSVRCLPLYIYIYIHICMCVAAAWLGWIKSCRVGADRAPRSATEKVNGPSGKKTSNILICSALGTSRPAGPGIPNISPTLRLLSGAARVPSSIRSAECTPPFPTPIESMAAEGEKKMITLKSSDGEEFEVEEAVAMESQTIRHMIEDDCADNGIPLPNVNSKILSKVIEYCNKHVHAAAAAAAASKAGSDDVGAASANSTAASGEDLKNWDADFVKVDQATLFDLILAANYLNIKGLLDLTCQTVADMIKGKTPEEIRKTFNIKNDFTPEEEEEIRRENQWAFE

SEQ ID NO: 5360 - protein, 87 aa, Zea mays
  unsure (1)..(87): unsure at all Xaa locations
  Clone ID: PAT_MRT4577_22369C.1.pep
ATHIQALXTTTDAIGXHESWMQFCMKQQGVXNLYAWXALMLTTVALPLSXCLMXMMMPSLMPPMTMMPMPXMMPSXMVPXMMSPITI

SEQ ID NO: 5361 - protein, 69 aa, Zea mays
  Clone ID: PAT_MRT4577_22410C.1.pep
LEFDYFALSMQWPGNICASISDCCDTNCCCSSEPLQTYTIHGLWPDYDYGTWPSCCHGTQFEMDKILPL

SEQ ID NO: 5362 - protein, 172 aa, Zea mays
  Clone ID: PAT_MRT4577_22488C.1.pep
MDSTFIMIKTDGVQRCLIDEIISRFEKKGFYLKDLKLVNVERSLDDKHYNNLVSKSFFQGLECYIISEPEVCMVWEDKSVVTTVRKIIGATNPLTSETGTIRGDFAGDIGRNVIHGSDSIDSANKEIALCVPEGPGDCQSIQHPCIYYNQTCIASHHILTDRGSMSPLVLSQ

SEQ ID NO: 5363 - protein, 191 aa, Zea mays
  Clone ID: PAT_MRT4577_22672C.1.pep
HKGIFIIEVLTRSCRSSVSISLLPVGPSPDIQRILAGIAYNWPILLGGQAHWTVGLVATLMAISSIIAADTSAFLCGRAFGRTPLTNISPKKTLEGALAGLAGCVLTTVLLSTALRWPRSLLSATAYGILIFLGSLFGDLVESLIKRDAGVKDSGSLIPGHGGILDRVDSYVFTGALCYSFVRVALPLYGV

SEQ ID NO: 5364 - protein, 377 aa, Zea mays
  Clone ID: PAT_MRT4577_22699C.1.pep
MVQQAAKEVIPLLTPYKMGQFELSHRVVLAPLTRCRSYGNVPQPHAAVYYSQRATRGGLLIAEATGVSATAQGFPESPGIWTQEQVEAWKPIVDAVHRKGAIFVCQIWHVGRVSTNELQPNGDAPISSTDKQISPDAKSGTAYSKPRRLRTDEVPGIVDDFRRAARNAIQAGFDAVEIHGAHGYLLEQFMKDSCNDRTDQYGGSLENRCRLAVEVVDAVVREVGARRVGIRLSPFVDFVDCVDSDPVALGHYMVQQLNRHSGLLYCHMVEPRITAHGRRQIPHGLLPFRKAFHGTFIAAGGGGYDREEGNKVVAEGYADLVAYGRLFLANPDLPRRFELDVALNKYDRSTFYTQDPIVGYTDYPFFEEEDGKNEESV

SEQ ID NO: 5365 - protein, 42 aa, Zea mays
  Clone ID: PAT_MRT4577_22775C.1.pep
KDVSSLSRVHVQMIDIPRINVPGSRCSRTHLLLLHQWHFRLF

SEQ ID NO: 5366 - protein, 133 aa, Zea mays
  unsure (1)..(133): unsure at all Xaa locations
  Clone ID: PAT_MRT4577_22776C.1.pep
MAAKICCLLMLLGISASAATATIFPQCSQAPIASLLPPYLSPAVSSVCENPILQPYRIQQAIAAGILTLITLVLPPIITLLPEVPLGPLLAPNIKGQPLPQLGLTKLGGYFXQQQVLSFNQLTALNSASYLQQ

SEQ ID NO: 5367 - protein, 488 aa, Zea mays
  Clone ID: PAT_MRT4577_22832C.1.pep
MAGNALANYVQVYVMLPLDVITVDNTFEKEDETRAQLKKLTEAGADGVMIDVWWGLVEGKEPGVYDWSAYRQVFKLVQEAGLKLQAIMSCHQCGGNVGDVVNIPIPQWVRDVGKSNPDIFYTNRSGLTNIEYLTLGVDDQPLFHGRTAIQLYADYMKSFRENMADFLDAGVVVDIEVGLGPAGEMRYPSYPQSQGWVFPGVGEFICYDKYLQADFKAAAEEAGHPEWDLPDDAGTYNDTPEKTQFFADNGTYQTDKGKFFLTWYSNKLIKHGDKILDEANKVFLGCKVQLAIKVSGIHWWYNVPNHAAELTAGYYNLDDRDGYRTIAHMLTRHRASMNFTCAEMRDSEQSSEAKSAPEELVQQVLSAGWREGLNLACENALNRYDATAYNTILRNARPQGINKNGPPEHKLHGFTYLRVSDELFQEQNYTTFKTFVRRMHANLDYNPNVDPVAPLERSKAEIPIEEILEVAQPKLEPFPFDKDTDLPV

SEQ ID NO: 5368 - protein, 227 aa, Zea mays
  unsure (1)..(227): unsure at all Xaa locations
  Clone ID: PAT_MRT4577_23014C.1.pep
MAAQILRLLMLLGLSASAATATIMPQCSHAAIALLLPPYLSPTEHSVXENPIIQPYRIQQAIAGGMLPLSPLLLQQXSTLSQHIPSEHPLAQNITAQHLQQRALANLAAYSHNQQILPFNQLRSLNSAYYLPQHHLPFSQLSAGYPQXSLPFNQLTVLNSPAYXQQRQLLPLNQLAGVSPATFLTXPQLLTYYQHAVPNAGTIXQLQHKLPCNPLALTYPGAFYQQP

SEQ ID NO: 5369 - protein, 156 aa, Zea mays
  Clone ID: PAT_MRT4577_23077C.1.pep
MAAFNKLGGLLRHSALVSGITGGSSPAVFNAARLMSTKLFIGGLDWGVDDVKLREAFSSFGEVTEARVITDRETGRSRGFGFVNYSDSDAAKEAISAMDGKEIDGRQVRVNMANERPAGNRGGGGYGGGGYGGGGYGGGGGYGGGGYGGGSQSYDA

SEQ ID NO: 5370 - protein, 581 aa, Zea mays
  Clone ID: PAT_MRT4577_23359C.1.pep
MADEAKAKGNAAFSAGRFEEAARHFTDAIALAPDNHVLYSNRSAALASLHRYSDALADAQKTVELKPDWAKGYSRLGAAHLGLGDAASAVAAYEKGLELDPSNEGLKAGLQDAKKAAAAPPRRGSSGPDAIGQMFQGPELWSKIASDPSTRAYLNEPDFMHMMREVQRNPSSISMYLSDPRMMQVLSLMLNVKIQRPEASEPSQSTPPPPKQQQQQQTPPSETKARDVEPEPEAEPMDLTDEEKDRKQTKAAAQKEKELGNAAYKKKDFEVAIQHYTKALELDDEDISYLTNRAAVYIEMGKYDECIKDCDKAVERGRELRADFKMISRALTRKGTALVKLAKTSKDFDIAIETFQKALTEHRNPDTLKKLNEAEKAKKELEQQEYYDPKLADEEREKGNEFFKEQKYPEAIKHYTEALKRNPKDPRVYSNRAACYTKLGAMPEGLKDAEKCLELDPTFTKGYTRKGAIQFFMKEYDKAVETYQAGLKHDPNNQELLDGVKRCVEQINKANRGEISQDELQERQNKAMQDPEIQNILTDPIMRQVLIDFQENPSAAQEHLKNPGVMQKIQKLVSAGIVQMR

SEQ ID NO: 5371 - protein, 581 aa, Zea mays
  Clone ID: PAT_MRT4577_23360C.1.pep
MADEAKAKGNAAFSAGRFEEAARHFTDAIALAPGNHVLYSNRSAALASLHRYSDALADAQKTVELKPDWAKGYSRLGAAHLGLGDAASAVAAYEKGLELDPSNEGLKAGLQDAKKAAAAPPRRGSSGPDAIGQMFQGPELWSKIASDPSTRAYLNEPDFMHMMREVQRNPSSISMYLSDPRMMQVLSLMLNVKIQRPEASEPSQSTPPPPKQQQQQQTPPSETKARDVEPEPEAEPMDLTDEEKDRKQTKAAAQKEKELGNAAYKKKDFEVAIQHYTKALELDDEDISYLTNRAAVYIEMGKYDECIKDCDKAVERGRELRADFKMISRALTRKGTALVKLAKTSKDFDIAIETFQKALTEHRNPDTLKKLNEAEKAKKELEQQEYYDPKLADEEREKGNEFFKEQKYPEAIKHYTEALKRNPKDPRVYSNRAACYTKLGAMPEGLKDAEKCLELDPTFTKGYTRKGAIQFFMKEYDKAMETYQAGLKHDPKNQELLDGVRRCIEQINKANRGEISQDELQERQNKAMQDPEIQNILTDPIMRQVLNDFQENPRAAQEHLKNPGVMQKIQKLVSAGIVQMR

SEQ ID NO: 5372 - protein, 180 aa, Zea mays
  unsure (1)..(180): unsure at all Xaa locations
  Clone ID: PAT_MRT4577_23412C.1.pep
MASSMFSSAAVVTSPAQATMVAPFTGLKSSAAFPVTRKANNDITSITSNGGRVSCMKVWPPIGKKKFETLSYLPDLSDSELAKEVDYLLRNKWIPCVEFELEHGFVYREHGNSPGYYDGRYWTMWKLPXFGCTDSAQVLKEVEECKKEYPNAFIRIIGFDNTRQVQCISFVAYKPPSFTG

SEQ ID NO: 5373 - protein, 129 aa, Zea mays
  Clone ID: PAT_MRT4577_23507C.1.pep
NVVLEIQATMGGTPVMPSKKPMWKGVVVAYLVVALCYFPVSFVGYWAFGDSVDGDILVTLNRPRWLIALANMMVVIHVIGSYQIYAMPVFDMIETVLVKKLRFPTCLTLRLIARTVYVAFTMFIAITFS

SEQ ID NO: 5374 - protein, 162 aa, Zea mays
  Clone ID: PAT_MRT4577_23568C.1.pep
MAPIGMGSTLPDGQLAWFDESDQMQQVSIHSLAAGKKVILFGVPGAFTPTCSNQHVPGFITQAEELKAKGVDEILLVSVNDPFVMKAWAKTYPDNKHVKFLADGAAAYTKALGLELDLTEKGLGLRSRRFALLADDLKVTVANVEEGGQFTISGAEEILKAL

SEQ ID NO: 5375 - protein, 113 aa, Zea mays
  unsure (1)..(113): unsure at all Xaa locations
  Clone ID: PAT_MRT4577_23569C.1.pep
LQQQFPFSXVGVAYPQHFFSFNQLGALNFAVYLKKQQLPPFSQLVYVSPVAFLTQQQLLRFYLHVGPNGGTLLQLQQLLPFNQLVLTNPKRFYQQPIIGGALFLDCLWVIVQK

SEQ ID NO: 5376 - protein, 101 aa, Zea mays
  Clone ID: PAT_MRT4577_23653C.1.pep
PTRASRPSNKCQRALADAERESTFIMIKPDEIQRRLIGEIISRCEKKVLYLKDSNLANVERSFAEKHYSDLECKPFFQGVVDYIISDPVEVMVCEGKSRIT

SEQ ID NO: 5377 - protein, 70 aa, Zea mays
  Clone ID: PAT_MRT4577_2365C.1.pep
PTRPKKNIKKKKKKKKKKKRKKKKKNKKKKKKKKKKKKKKKKGGGRFRGSKFTSACLQSINFFFGSIKLN

SEQ ID NO: 5378 - protein, 43 aa, Zea mays
  unsure (1)..(43): unsure at all Xaa locations
  Clone ID: PAT_MRT4577_23760C.1.pep
WELDYLLLSLQWRGIIXASTRHXCTTNGCXRSEPVYTITIHGL

SEQ ID NO: 5379 - protein, 92 aa, Zea mays
  Clone ID: PAT_MRT4577_23824C.1.pep
VVVVPITSVATVAAATELPTGTGGTERWGPRGQVILFATVMFTLVQRVYLRSSRLLWPMCVFDGKVAMCQLLVWCSSSAPAGHCCQPAWTVD

SEQ ID NO: 5380 - protein, 584 aa, Zea mays
  Clone ID: PAT_MRT4577_2386C.1.pep
MALTDATAFPYGLRVLVVDDDPTWLKILEKMLRKCSYEVTTCGLASVAIQILRERRNKFDIVISDVNMPDMDGFKLLELIGLEMDLPVIMMSIDGETSRVMKGVQHGACDYLLKPVRMKELRNIWQHVYRKKMHEVKEIEGNDSYDDLQMFRNGVEGFDERDLFMRADSDTMRKRKDVNKDHADQDSSDGATVKKARVVWSVDLHQKFVNAVNQIGFDKVGPKKILDLMNVPGLTRENVASHLQKYRLYLSRLQKQNEERIMGAARQDFNQKGPSDHLNLRSSFQEQPGNLSNGCQHSSQKVEAQTNILDPHLDDTKTSMPLKVPDKNGISASDAVDPHNITTASPLSGVFSFERMPVNQDRKLSETMILECESWSGSVPPKQFMQYPKHNHERCDLLGDYSCLPKPDLEHPIAPGHLYAPPPVISMSYNVEKDVRDFSDVKPDLLGCMKSLSPALTCTVESVSAQLSDSVVTSTNTDVRFSSVEGLSSIKDCDFDQERNGAILFTSEEASILCGTDFTCLPEDLSGYQLQGVSFGNKGLNSIDLYQCNDTMLIPGLQNNWYDDDVEFSSETVEFPLLDGGLFA

SEQ ID NO: 5381 - protein, 61 aa, Zea mays
  Clone ID: PAT_MRT4577_24024C.1.pep
SSHACDYLRQLARTIAEYNQACTDPFMNLKGILVGKRATDIYYDNMVTVTYWRTHTMISDR

SEQ ID NO: 5382 - protein, 588 aa, Zea mays
  Clone ID: PAT_MRT4577_24055C.1.pep
MPTKATLRSDNQEMSKEELRRQHQAELARQKNEETARRLAGVGTGSGDGRGPARASNELVAYKNVNDVPFVRDLVIQVDQKNEAVLLPIYGSMVPFHVSTVKSVTSHQDNRTCTIRIFFNVPGMPFSNDSKFNSQGAIYLKEITFRSKDPRHSSEVVQQIKTLRRQVASRESERAERATLVTQEKLQIGSNRMKMMRLSDVWIRPAFGGRGRKLTGNLEAHFNGFRYSTSRSDERVDIMFGNIKHAFFQPAEKEMITLLHFHLHNHIMVGNKKTKDVQFYVEVMDVVQTLGGSRRSALDPDEIEEEQRERDRKNRINMDFQNFVNKVNDHWSQPQFKGLDLEFDVPLRELGFHGVPYKASAFIIPTSTCLVELIETPFLVVSLSEIEIVNLERVGFGTKNFDMAIVFKDFKKDVLRIDSIPSASLDAIKEWLDTTDLKYYESRLNLNWRPILKTIIDDPQKFIDDGGWEFLNMEASDSETEDTEESDQGYVPSDAEPESESEDDDSDSESLVESDDDDEESDEDSEEEKGKTWEELEREASNADREHGAESDSEEERRRRKAKTFGKSRAPERSSFKGAPPSKKPKFR

SEQ ID NO: 5383 - protein, 87 aa, Zea mays
  unsure (1)..(87): unsure at all Xaa locations
  Clone ID: PAT_MRT4577_24378C.1.pep
KRTPAFGEALKNWDADFVKVDQAPLFDLILVSNYFNIKGLLDLSCQTVVDMIKGKTPEEIRKPFNIKNGFPPXEEKEIPRETHWAFE

SEQ ID NO: 5384 - protein, 102 aa, Zea mays
  Clone ID: PAT_MRT4577_24381C.1.pep
SSDLGSQIIMAQLLQQLVLSNLAWISHQQRVVPFNLLGSLNSASYLQQQQLPFTQLPAAYPQQFLPFNQLSALNSPAYLQQQQLLPFSHLAGVNPSTFFTQP

SEQ ID NO: 5385 - protein, 110 aa, Zea mays
  Clone ID: PAT_MRT4577_24661C.1.pep
RVGPGRPSFLVRYRVVFPSPGGLSWFVWCLLLPICVFDCKVVLCQLLVLCSSWVSADPCIKQHGLRLDGCCYPRQGLFSVIFKEKMAVFGVAKKRKLCIRKKKKKERAAA

SEQ ID NO: 5386 - protein, 128 aa, Zea mays
  unsure (1)..(128): unsure at all Xaa locations
  Clone ID: PAT_MRT4577_24765C.1.pep
MAAKISRLQMLLGLSASAATATISPQCSQAPIACLLSPNLLTAVYCVCENAILQPYRIQQATATCIRPLSPSFLQQXSAILQQXPIVHSLVENIKEQQLQKLVLAHLATNSEPHKHREPNQLRALNSA

SEQ ID NO: 5387 - protein, 593 aa, Zea mays
  Clone ID: PAT_MRT4577_24964C.1.pep
MDLLDARHRHTPDLSSSQDAASNMGLPLAGAAYQPYVSELLSFSIERLHKEPELLRVDAERVRRQMQEVAVENYAAFIAASEALSFVRAQLESFDGHLEAMIEEIPNLTSGCTEFVESAQQILEERKLNQTLLANHTTLLDLLEIPQLMDTCIRNGNYDEALDLEAFVSKIWKLHPDLPVVQGLATEVKKTVQSLVSQLLQKLRSNIQLPECLRIVAHLRRIGVFSESELRLQFLRCREAWLSGILEDLDQRNVYDYLKGMVTCHRVHLFDVVNQYRAIFNNDKSGNDENYDGGLLFSWAMQQVSNHLTTLQVMLPNITEGGSLSNILEQCMYCAMGLGLVGLDFRGLLPPIFENAVLNLFSKNMSTAVENFQVILDSHCWVPMPSVGFVANGVVDETSDDVTPPSVLMEHPPLAVFVNGVSAAMNELRPCAPLSLKVVLAQEVVKGLHAVSDSLVRYKAMRMLRGNESALFLSLCQTFIEVAYPYCAACFGRCYPDGATLISECQGTFDAVRQLLTVPARSNSSSIERRQSGGIERRQSGAIERKQSVESTGTAVTDNGLSADGPGLETNSSAATTTSPVDDGGSTHPPASK

SEQ ID NO: 5388 - protein, 122 aa, Zea mays
  Clone ID: PAT_MRT4577_24965C.1.pep
LRGNESALFLSLCQAFIEVVHPYCAACFGRCYSNGATLISECQGTLDAVRQLLTIPARSNSSSIERKQSGAIERKQSVESSGTAVTDNELSADGPGLEINDAATTTTPPVEDDVSTHPPGSK

SEQ ID NO: 5389 - protein, 256 aa, Zea mays
  unsure (1)..(256): unsure at all Xaa locations
  Clone ID: PAT_MRT4577_24969C.1.pep
MDLDARHRHTPDSSSSPHAASDMGLPLAGAAYQPYVSELLSFSIERLHKEPELLRVDAERVRRQMQEVAVENYGAFIAASEALSFVRAQLESFDGHLEAMIEEIPNLTSGCTEFVESAQQILEERKLNQTLLANHTTLLDLLEIPPLMDTCIRNGNYDEALDLEAFVSKISKLHPDLPVVQGLAAEVKKTVQSLISQLLQKLRSNIQLPECLRIVAHLRRIGVFSESELRLQFLRCRESWLSGILEDLDXRNVFDY

SEQ ID NO: 5390 - protein, 238 aa, Zea mays
  Clone ID: PAT_MRT4577_25003C.1.pep
MAADPSAAAAPADPDGPDAVRFTWNAWPRSKVEASRCVVPLAAAISPVRSPESLASPPLPYPPLRCKPPCSALLNPFARVDFTAKIWICPLCFSRNHFPPHYAGISENNVPAELFTQCSTVEYLVAGPPGSPAPLPPVFLFVIDTCVIEEELEYVKLSMRKAVALLPEHALVGLVTFGTQVHLHELGFSELSKIYVFPGSKEISKEQILDQLGLSGGGRPGFPKMTQQPGVQQVNGMH

SEQ ID NO: 5391 - protein, 249 aa, Zea mays
  Clone ID: PAT_MRT4577_25022C.1.pep
MTAGFQLGVIGSLTLSVASSVAIVICNKALISTLGFPFATTLTSWHLMVTFCTLHVAQRLRFFEPKAIDGQTVVLFGLLNGTSIGLLNLSLGFNSIGFYQMTKLAIIPFTVLLETIFLKKRFSETIKFSLLVLLLGVGIASVTDLKLNCLGSVLSGLAIATTCVGQILTNTIQRKLKVSSTQLLYQSAPYQAAILFATGPFVDHLLTGRSVFAHRYTFPVVGFIVLSCLIARTYAHMYYGRKGDPQGTT

SEQ ID NO: 5392 - protein, 340 aa, Zea mays
  Clone ID: PAT_MRT4577_25025C.1.pep
MTAGFQLGVIGSLTLSVASSVAIVICNKALISTLGFPFATTLTSWHLMVTFCTLHVAQRLRFFEPKAIDGQTVVLFGLLNGTSIGLLNLSLGFNSIGFYQMTKLAIIPFTVLLETIFLKKRFSETIKFSLLVLLLGVGIASVTDLKLNCLGSVLSGLAIATTCVGQILTNTIQRKLKVSSTQLLYQSAPYQAAILFATGPFVDHLLTGRSVFAHRYTFPVVGFIVLSCLIAVSVNFSTFLVIGTTSPVTYQVLGHLKTCLVLSFGYTLLHDPFTVRNILGILVAIFGMALYSIFSVREGKKKSAGDALPVSQMPDKETEPLLATKDNSDTKKANGVAHDC

SEQ ID NO: 5393 - protein, 108 aa, Zea mays
  unsure (1)..(108): unsure at all Xaa locations
  Clone ID: PAT_MRT4577_2505C.1.pep
MYISVPTMAAKMFWLLMLLGLSASAATATIFPQCSQAPIAILFSPYLXQRCLSACENPILXPYRIQQAITAGILPLXPLVFHISLSLLHQVPLGHLLTHNIRAQQTQQ

SEQ ID NO: 5394 - protein, 89 aa, Zea mays
  unsure (1)..(89): unsure at all Xaa locations
  Clone ID: PAT_MRT4577_25172C.1.pep
LHASGLPVNKTLKVKGYMGDLCRMDFSKTDFYAFAPPDFYTRFGIVGVKADSVMNKTKXIEDHXLPMLDEEFTFLLSVPELSFLWVEVQ

SEQ ID NO: 5395 - protein, 70 aa, Zea mays
  unsure (1)..(70): unsure at all Xaa locations
  Clone ID: PAT_MRT4577_25345C.1.pep
RDGAHAVPSPERGEMDEVVYADPDTEAEDQDERWARLLPELLCDVVRRVXASGGERWPARKDVDSCACLC

SEQ ID NO: 5396 - protein, 92 aa, Zea mays
  Clone ID: PAT_MRT4577_25349C.1.pep
HIESNARAHMHEDSVLGATTNHRAAQASWSTGQQAQRRHGARLHVDQCRQPTPRPRARPRRHEAPARELTGCMGPLDEHGGAGMAGPQFQPA

SEQ ID NO: 5397 - protein, 208 aa, Zea mays
  Clone ID: PAT_MRT4577_25500C.1.pep
MDPMQSSVRGRRSSLHADAVITIGGVRPAPPPQTSTQHVCQDEAMVSSGDPSWMSGYSTDSCRGGYYTSALNLEGASIRELKLKYQKLKYRNKPNNCNADDHVNAERSPGRKAEEKKVLARKHEDCDDDPFIEEVKKTREAHQEIERDRKARDDKFYELEKIKLDLKRDRLDTMIMQTDTSAMDSEAKQYFKLMKEEILARRFKSRKA

SEQ ID NO: 5398 - protein, 503 aa, Zea mays
  Clone ID: PAT_MRT4577_25719C.1.pep
MDRADPARGRLAVLSSHLRGAGAEEAAGLERSPVSAPAPGPRAGALAVVDGRTGKRHEVKVSEDGTVRATDFKKITTGKDDKGLKIYDPGYLNTAPVRSSICYIDGDEGILRYRGYPIEELAESSSFVEVAYLLMYGNLPTQSQLAGWEFAISQHSAVPQGLLDIIQSMPHDAHPMGVLASAMSTLSVFHPDANPALQGQDLYKSKQVRDKQIVRVLGKAPTIAAAAYLRLAGRPPVLPLNTLSYSENFLYMLDSLGDRTYKPNPRLARALDILFILHAEHEMNCSTAAVRHLASSGVDVFTALSGGVGALYGPLHGGANEAVLKMLNEIGSMENIPDFIVGVKNRKRKMSGFGHRVYKNYDPRAKVIRKLADEVFSIVGRDPLIEVAIALEKAALSDEYFIKRKLYPNVDFYSGLIYRAMGFPTEFFPVLFAIPRMGGWLAHWKESLDDPDTKIIRPQQVYTGFWLRHYTPVRERVLSSQSEELGQVATSNATRRRRAGSAL

SEQ ID NO: 5399 - protein, 212 aa, Zea mays
  unsure (1)..(212): unsure at all Xaa locations
  Clone ID: PAT_MRT4577_25837C.1.pep
FVLEVRNVIGDRGLEVVGDTCKKLRRLRIERGDDDPGLQEEQGGVSQLGLTAVAVGCRDLEYIAAYVSDITNGALESIGTFCKNLYDFRLVLLDRQKQVTDLPLDNGVRALLRSCTKLRRFALYLRPGGLSDTGLDYIGQYSGNIQYMLLGNVGESDHGLIRFAIGCTNLRKLELRSCCFSEQAXSLAVLHMPSLRYIWVQGYKASPAGLEL

SEQ ID NO: 5400 - protein, 47 aa, Zea mays
  Clone ID: PAT_MRT4577_25961C.1.pep
TLLSHEFGGGLDMPSNPLKELHQPPPGPLYGGLGGKPKKAEVGHMFL

SEQ ID NO: 5401 - protein, 74 aa, Zea mays
  unsure (1)..(74): unsure at all Xaa locations
  Clone ID: PAT_MRT4577_25984C.1.pep
MAAKICWLLVLLGLSVSAATATXIFPECSQAPIASHLRPXLSTTVSSVCENPDLQGYRIQQAIESGMLPLSALF

SEQ ID NO: 5402 - protein, 60 aa, Zea mays
  Clone ID: PAT_MRT4577_26014C.1.pep
LRIFFRSLVVWGSRSPPSNVISRCGFPPCLFGYLPVPSARVSETAPFFSFSLEQADPDCD

SEQ ID NO: 5403 - protein, 80 aa, Zea mays
  unsure (1)..(80): unsure at all Xaa locations
  Clone ID: PAT_MRT4577_26151C.1.pep
MAAPMVYSXYLLQVYRSRLLLRALISNKGCSPIMLLLACHDAETYYLNTKTGGANGSIRYXKXYTHGSYAGLXIAIDLLD

SEQ ID NO: 5404 - protein, 79 aa, Zea mays
  unsure (1)..(79): unsure at all Xaa locations
  Clone ID: PAT_MRT4577_26217C.1.pep
GERIEMASXDVEYRCFFSCLAWTTDDHSMHNAFSTYSEVLDSKIIIDRETHRSRGFGFGTXFSTQEXIQNAIQVLNMTE

SEQ ID NO: 5405 - protein, 123 aa, Zea mays
  unsure (1)..(123): unsure at all Xaa locations
  Clone ID: PAT_MRT4577_26254C.1.pep
LESKIILDRXTQRSRGXGVGTFSTXEAMPNAIEGMNSKELDGRNITVNEAQSRGYRGGDRCGRYGGRRGGGRYGDGWRHDSGDGYSGGGGYRDGCGGYGGGGRVYMSNNRGGGYRNSNWNWRN

SEQ ID NO: 5406 - protein, 647 aa, Zea mays
  Clone ID: PAT_MRT4577_26256C.1.pep
MSRDLDCPVQTQMAVAVLDRSFSSEYPGGSRTEGRQLSWKRVFVQTDNGSVLGIELERGENVQTVKKKLQIALNVPTDESSLTFGDLVLNDDLSSIRNDSPLLLKRNQIHRSNSTPCLSPTGQDVWQRDRSGPIEILGCSSPSSRMKQIAKDVIKAIMNGVDPVAINSGMGGAYYFKNIWGERVAIVKPTDEEPFAPNNPKGFVGKALGQPGLKRSVRVGETGFREVAAYLLDYDHFANVPPTMLVKITHTIFNVNDCVGCKSKVFCNKSESVSKIASLQEFIPHDFDASDHGTSSFPVSAVHRIGILDIRIFNTDRHAGNLLIKKVGPGADNFGEQTELIPIDHGLCLPECLEDPYFEWIHWPQSSVPFSVEELEYIAKLDPIKDAEMLRVELPMIREACLRVLVLSTVFLKEAAAFGLCLSEIGDMMSRQFTAKEEEPSQLELLCMETRKWVEERELFLPDEAGVEDGDDDFTQFPLDSDAFEPPAFCKFGSVKTSSRNPLSKLDECDEEDGDLSEEEGEHGDVLTSGALPQKVPPISKLSSSMKGLGFIGKSKPYRTGGVPKGKVTGRTNYSGKASEHQSGSRSANELLPPSASFVKLSDMSRKEWSAFLEKFQELLPSALRTRKHSAGVGQRPMPRLGTSCQF

SEQ ID NO: 5407 - protein, 369 aa, Zea mays
  Clone ID: PAT_MRT4577_26477C.1.pep
MEGGRDVFLGAAARAPPPPPSCPFHGSATATRSGGAQMLSFSSNGVAGLGLCSGASKMQGVLSRVRRPFTPTQWMELEHQALIYKHFAVNAPVPSSLLLPIKRSLNPWSSLGSSSLGWAPFRSGSADAEPGRCRRTDGKKWRCSRDAVGDQKYCERHIKRGCHRSRKHVEGRKATPTTADPTMAVSGGSLLHSHAVAWQQQGKSSAANVTDPFSLGSNRNLLDKQNLGDQFSVSTSMDSFDFSSSHSSPNQAKVAFSPVAMQHEHDQLYLVHGAGSSAENVNKSQDGQLLVSRETIDDGPLGEVFKGKSCQSASADILTDHWTSTRDLRPPTGVLQMSSSNTVPAENHTSNSSYLMARMANSQTVPTLH

SEQ ID NO: 5408 - protein, 472 aa, Zea mays
  Clone ID: PAT_MRT4577_2654C.1.pep
MVASKAAPFDEVSSVEAGAYGGRDDDGRPRRTGTVWTASAHIITAVIGSGVLSLAWAIAQLGWAAGPAVMLLFAVVIYYTSTLLAECYRSGDPVAGKRNYTYMDAVRASLGGAKVRLCGAIQYANLFGVAIGYTIAASISMLAIKRADCFHAKGHKHACRSSSNPYMILFGVAEVVFSQIPDFDQIWWLSIVAAVMSFTYATIGLVLGIMQTVANGGFQGSLTGISIGAGVTPTEKVWRSLQAFGNIAFAYSYSIILIEIQDTVKAPPPSEAKVMKRATMVSVATTTVFYMLCGCMGYAAFGDAAPDNLLTGFGFYEPFWLLDIANVAIVVHLVGAYQVFCQPLFAFVEKWAAATWPDSAFIAREFRVGPFALSLFRLTWRTAFVCLTTVAAMLLPFFGDVVGLLGAVSFWPLTVYFPIEMYVVQRAVRRWSTHWICLQMLSAACLLVSVAAAAGSIADVIGALKVYRPFSG

SEQ ID NO: 5409 - protein, 55 aa, Zea mays
  unsure (1)..(55): unsure at all Xaa locations
  Clone ID: PAT_MRT4577_2657C.1.pep
GKCDFDLAATFYXSVVYLVVEXDMQFALALETNSGPHQIRSCDGDGIDRFDNLTI

SEQ ID NO: 5410 - protein, 165 aa, Zea mays
  unsure (1)..(165): unsure at all Xaa locations
  Clone ID: PAT_MRT4577_26641C.1.pep
MASSTMALSSTAFVGXVVNVSSSFVFGEARVXTMRKTGXRPSXALSSGRPWYXGPDRVLYLGPLCEDAASYLTDEFPGDYGWDTAVLSVDPETFAKNRELEVIHSRWAMLGAIGCVFPEMLVRNGVKFGEGVWFKAGSQIFREGGLDYLGNTNLIHADNILAIWA

SEQ ID NO: 5411 - protein, 87 aa, Zea mays
  Clone ID: PAT_MRT4577_26783C.1.pep
GGGGPLYVGGGFGGGGGASGGAGGSGGGGGGFGGGNRGGGFGNSHGNWRNLPVGPARPSFLFSSRDVSPSPKGLSSFVSFVVAPLCF

SEQ ID NO: 5412 - protein, 70 aa, Zea mays
  Clone ID: PAT_MRT4577_2697C.1.pep
YPVRNKNVYPSQEGLSSLVSCLMFPICVFDCKVPLCQLIELCSSSVSEDPCIKQHGLRIDGCCYPRQALF

SEQ ID NO: 5413 - protein, 654 aa, Zea mays
  Clone ID: PAT_MRT4577_26995C.1.pep
MDGCDCIEPLWPTDDLLVKYQYISDFFIALAYFSIPLELIYFVKKSSFFPYRWVLIQFGAFIVLCGATHLINLWTFTTHTKTVAMVMTIAKISTAVVSCATALMLVHIIPDLLSVKTRELFLKNKAEELDREMGLIRTQEETGRHVRMLTHEIRSTLDRHTILKTTLVELGRTLGLEECALWMPSRSGSSLQLSHTLRHQITVGSSVPMNLPVVNQVFSSNRAIIIPHTSSLARVRPLAGRYVPPEVAAVRVPLLHLSNFQINDWPELSAKSFAIMVLMLPSDSARKWHVHELELVEVVADQVRAVSFAMVTITYYFHPEKDVAVALSHAAILEESMRARDLLMEQNVALDLARREAEMAIRARNDFLAVMNHEMRTPMNAIIALSSLLLETELTPEQRLMVETVLKSSNLLATLINDVLDLSKLEDGSLELEIKAFNLHAVFKEVMGFIKPIASIKRLSVSVMLAPDLPLCAIGDEKRLMQTILNISGNAVKFTKEGHITLVASIVKADSLREFRTPEFHPTASDEHFYLKVQVKDTGCGVSPQDLPHVFTKFAHPQSGGNRGFNGSGLGLAICKRFVSLMGGHIWIDSEGTGRGCTATFVIKLGVCDNTNTYQQQLIPLVWPSSADSDLRAPKALPDGRGSTPLKSRYQRSV

SEQ ID NO: 5414 - protein, 634 aa, Zea mays
  Clone ID: PAT_MRT4577_26996C.1.pep
MDGCDCIEPLWPTDDLLVKYQYISDFFIALAYFSIPLELIYFVKKSSFFPYRWVLIQFGAFIVLCGATHLINLWTFTTHTKTVAMVMTIAKISTAVVSCATALMLVHIIPDLLSVKTRELFLKNKAEELDREMGLIRTQEETGRHVRMLTHEIRSTLDRHTILKTTLVELGRTLGLEECALWMPSRSGSSLQLSHTLRHQITVGSSVPMNLPVVNQVFSSNRAIIIPHTSPLARIRPLTGRYVPPEVAAVRVPLLHLSNFQINDWPELSAKSFAIMVLMLPSDSARKWHVHELELVEVVADQVAVALSHAAILEESMRARDLLMEQNVALDLARREAEMAIRARNDFLAVMNHEMRTPMNAIIALSSLLLETELTPEQRLMVETVLKSSNLLATLINDVLDLSKLEDGSLELEIKAFNLHAVFKEVMGFIKPIASIKRLSVSVMLAPDLPLCAIGDEKRLMQTILNISGNAVKFTKEGHITLVASIVKADSLREFRTPEFHPTASDDHFYLKVQVKDTGCGIGPQDLPHVFTKFAHPQSGGNRGFNGSGLGLAICKRFVSLMGGHIWIDSEGTGRGCTATFVVKLGVCDNTNTYQQQLIPLVWPSSADSDLRAPKPLPDGRGSTPLKSRYQRSV

SEQ ID NO: 5415 - protein, 127 aa, Zea mays
  unsure (1)..(127): unsure at all Xaa locations
  Clone ID: PAT_MRT4577_27161C.1.pep
MAAKMVWLLMLLGLSASAATATIIPPCSHAPIASLLSPHLLPAXTSACENPIXLNHYRIQQAISDGILTLXPSIIQQSSTLLQQIPLVHLLAQNIRAQLLQQLVLANLAAYSQQQQFLPFNQLSSLN

SEQ ID NO: 5416 - protein, 75 aa, Zea mays
  unsure (1)..(75): unsure at all Xaa locations
  Clone ID: PAT_MRT4577_27290C.1.pep
MATTDVKYRCFDGGLAWATSNEALDNAFASYGEILDSKVITDRXTGRSRGYSYVTFTSENFMLDAIENMNGKELD

SEQ ID NO: 5417 - protein, 89 aa, Zea mays
  unsure (1)..(89): unsure at all Xaa locations
  Clone ID: PAT_MRT4577_27305C.1.pep
MAAKISCLVRLLGLSASPTTSTILPQCSQATITNLLPPYLSPTVSSVYENPILQPYTIQHSIATCILPLSPXFLQQSSILLQHLHSYHL

SEQ ID NO: 5418 - protein, 68 aa, Zea mays
  unsure (1)..(68): unsure at all Xaa locations
  Clone ID: PAT_MRT4577_27312C.1.pep
MALFVKKTSSGRDSKVKDLSQADFVRLKIDLPXVKMPALMACRPKFGPSKPFAGPRISGSFHMTIQTA

SEQ ID NO: 5419 - protein, 43 aa, Zea mays
  Clone ID: PAT_MRT4577_27575C.1.pep
REEIRGDQEDQRRRAQPPRYGGSEAPRDHRRRSGSHGGGIRVT

SEQ ID NO: 5420 - protein, 294 aa, Zea mays
  unsure (1)..(294): unsure at all Xaa locations
  Clone ID: PAT_MRT4577_27638C.1.pep
MGGAQFPGDNDVAEVDAARDGEVDRRDVGKMKHGCEHYRRRCKIVAPCCNQVFPCRHCHNEATASGDRHTICRQDVEKVVCLLCETKQPVSQVCISCGVNMGEYFCDICKFYDDDTDKGQYHCIDCGICRVGGKENFFHCVKCGSCYSVILRDNHQCVENSMRQNCPXICYEYLFDSLQGTRVLNCGHTMHLTCFEEMVAHNKYTCPICSKNXLDLTHHWEMLDQEIEATIMASCVSXKIWVLCNDCNKVSEVNFHVIGHKCSHCRSYNTRTTSRPADLSGSSSPSTDSSDNNI

SEQ ID NO: 5421 - protein, 205 aa, Zea mays
  unsure (1)..(205): unsure at all Xaa locations
  Clone ID: PAT_MRT4577_27663C.1.pep
MADKILGLLRLLXLSASAATATIFPQCXQATIAFLLPPXLTNGGLXVCENPNLQPYRIQQAXIKGGVIPLSRLCLQQTXPMXQQIPLGHLLQHNIRAQQLQQLVLANLAAYSQQQQILAFNQLAXLDSASYFQQQQLRFSLVSAVYPQLFLALNRLTALNSRAYLQEQRLLPLSQIGGVSPATFLTQPQLMSFXQHAEPNAGTLL

SEQ ID NO: 5422 - protein, 400 aa, Zea mays
  Clone ID: PAT_MRT4577_27700C.1.pep
MAVLSAADASPVSAIGFEGYEKRLEITFSEAPVFVDPHGRGLRALSRAQIDSVLDLARCTIVSELSNKDFDSYVLSESSLFIYPLKIVIKTCGTTKLLLTIPRILELAEELSMPLAAVKYSRGTFIFPGAQPAPHRSFSEEVAALNCYFGVLKSGGNAYVIGDPARPGQKWHVFYATEYPEQPMVNLEMCMTGLDKKKASVFFKTNADGNTTCAKEMTKLSGISEIIPEMEICDFDFEPCGYSMNAIHGSAFSTIHVTPEDGFSYASYEVMGLDATALSYGDLVKRVLRCFGPSEFSVAVTIFGGRGHAGTWGKALGAEVYDCNNMVEQELPGGGLLVYQSFCAAEDAVATSPKSVFHCFDGENVESAPPPMKKDYKLANLLCWEEEADAMEEKARVLDE

SEQ ID NO: 5423 - protein, 400 aa, Zea mays
  Clone ID: PAT_MRT4577_27701C.1.pep
MAVLSAADASPVSAIGFEGYEKRLEITFSEAPVFVDPHGRGLRALSRAQIDSVLDLARCTIVSELSNKDFDSYVLSESSLFIYPLKIVIKTCGTTKLLLTIPRILELAEELSMPLAAVKYSRGTFIFPGAQPAPHRSFSEEVAALNRYFGGLKSGGNAYVIGDPARPGQKWHVFYATEYPEQPMVNLEMCMTGLDKKKASVFFKTNADGNTACAKEMTKLSGISEIIPEMEICDFDFEPCGYSMNAIHGSAFSTIHVTPEDGFSYASYEVMGLDATALSYGDLVKRVLRCFGPSEFSVAVTIFGGRGHAGTWGKALGAEVYDCNNMVEQELPGGGLLVYQSFCAAEDAVATSPKSVFHCFDGENVESAPPPMKKDYKLANLLCWEEEADAMEEKAGVLDE

SEQ ID NO: 5424 - protein, 70 aa, Zea mays
  Clone ID: PAT_MRT4577_27715C.1.pep
MGGDDVEYRCFLSSLAWATSNESLDNAFGCYGEILDSKVITDRQTSRSRGFGLHNFYFENSMLDAIENMN

SEQ ID NO: 5425 - protein, 413 aa, Zea mays
  Clone ID: PAT_MRT4577_27770C.1.pep
FLEQLLASLANHIDRWGYPATTWCKFRHADAAGEPTVVTVSCPDVFWLLPRGRRPVAVPWDLLKDRLLQLCPVAPPFGFGSHDAYLAAAAGLQDVPPPAPQLFLLKLCCFDRMGLLHDVTRVLCELELTIRRVKVSTTPDGSVLDLFFITDARGLLHTKSRREETQDRLESVLGDSLTCCEIDPAGEDMVSCCLQSWAWASLTPAVIAQMFSTADRVEEQPIGTRGGGGGTIISVTMDNSLSPAHTLIQIQCGDHKGLLYDVMRIVKDCNIQISYGRFYASQNGRCEIDLFAVQSDGKKILDQHRQRALCCRLRMELRRPLHVALVNRGPDTELLVANPVEVSGKGRPLVFYDITLALKNLQRRIFLAEIGRHVVEGREWEVYRLHFGEEHELSSALRKKIVDAVTNMLMGWD

SEQ ID NO: 5426 - protein, 46 aa, Zea mays
  Clone ID: PAT_MRT4577_2779C.1.pep
IGRMSKPKEISGWLLRAVGVSSRLKPLHASGRSSVNNAVANGSVIH

SEQ ID NO: 5427 - protein, 162 aa, Zea mays
  Clone ID: PAT_MRT4577_28038C.1.pep
MAPIAVGDALPDGQLGWFDENDQLQQVSVHALAAGKKVILFGVPGAFTPTCSNQHVPGFITQAEQLKAKGVDEILLISVNDPFVMKAWAKTYPENKHVKFLADGSGAYTKALDLELDLTDKGLGVRSKRFALLADDLTVTVANIEEGGQFTISGAEEILKAL

SEQ ID NO: 5428 - protein, 162 aa, Zea mays; identical to SEQ ID NO: 5427
  Clone ID: PAT_MRT4577_28039C.1.pep

SEQ ID NO: 5429 - protein, 133 aa, Zea mays
  unsure (1)..(133): unsure at all Xaa locations
  Clone ID: PAT_MRT4577_28064C.1.pep
MAAKMFCLLMLLGFCASAATATIHPQCSEATIPRLLSPLLSQSRLRACENPSVQPYRIQQAITAGIXPLSPLFLSTXSGLLHKLPLVHXLEQNMRQQQLQQHVLANLAGYSHEQQVLXPLNQLAELNYAYYSK

SEQ ID NO: 5430 - protein, 370 aa, Zea mays
  Clone ID: PAT_MRT4577_28160C.1.pep
MAMMVDPPNGIGNQGKHYYSMWQTLFEIDTKYVPIKPIGRGAYGIVCSSINRETNEKVAIKKIHNVFDNRVDALRTLRELKLLRHLRHENVIALKDIMMPIHRRSFKDVYLVYELMDTDLHQIIKSPQGLSNDHCQYFLFQLLRGLKYLHSAEILHRDLKPGNLLVNANCDLKICDFGLARTNSSKGQFMTEYVVTRWYRAPELLLCCDNYGTSIDVWSVGCIFAELLGRKPIFPGTECLNQLKLIVNVLGTMSEADLEFIDNPKARRYIKSLPYTPGVPLVSMYPHAHPLAIDLLQKMLIFDPTKRISVTEALEHPYMSPLYDPSANPPAQVPIDLDIDENISSEMIREMMWQEMLHYHPEVATAISMS

SEQ ID NO: 5431 - protein, 228 aa, Zea mays
  unsure (1)..(228): unsure at all Xaa locations
  Clone ID: PAT_MRT4577_28161C.1.pep
MAMMVDPPNGIGNQGKHYYSMWQTLFEIDTKYVPIKPIGRGAYGIVCSSINRETNEKVAIKKIHNVFDNRVDALRTLRELKLLRHLRHENVIALKDIMMPIHRRSFKDVYLVYELMDTDLHQIIKSPQGLSNDHCQYFLFQLLRGLKYLHSAEILHRDLKPGNLLVNANCDLKICDFGLARTNSSKGQFMTEYVVTRWYRAPELLLCCDXYGTSIDVWSGWCIFAELL

SEQ ID NO: 5432 - protein, 370 aa, Zea mays
  Clone ID: PAT_MRT4577_28162C.1.pep
MAMMVDPPNGIGNQGKHYYSMWQTLFEIDTKYVPIKPIGRGAYGIVCSSINRETNEKVAIKKIHNVFDNRVDALRTLRELELLCHFRHENVIALKDIMMPIHRRSFKDVYLVYELMDTDLHQIIKSPQGLSNDHCQYFLFQLLRGLKYLHSAEILHRDLKPGNLLVNANCDLKICDFGLARTNSSKGQFMTEYVVTRWYRAPELLLCCDNYGTSIDVWSVGCIFAELLGRKPIFPGTECLNQLKLIVNVLGTMSEADLEFIDNPKARRYIKSLPYTPGVPLVSMYPHAHPLAIDLLQKMLIFDPTKRISVTEALEHPYMSPLYDPSANPPAQVPIDLDIDENISSEMIREMMWQEMLHYHPEVATAISMS

SEQ ID NO: 5433 - protein, 381 aa, Zea mays
  Clone ID: PAT_MRT4577_2836C.1.pep
MASPTQGQVITCKAAVAYEPNKPLVIEDVQVAPPQAGEVRVKILFTALCHTDHYTWSGKDPEGLFPCILGHEAAGIVESVGEGVTDVQPGDHVIPCYQAECKECKFCKSGKTNLCGKVRSATGVGVMMNDMKSRFSVNGKPIYHFMGTSTFSQYTVVHDVSVAKINPQAPLDKVCLLGCGVPTGLGAVWNTAKVESGSVVAVFGLGTVGLAVAEGAKAAGASRVIGIDIDNKKFDVAKNFGVTEFVNPKEHDKPIQQVLVDLTDGGVDYSFECIGNVSVMRAALECCHKGWGTSVIVGVAASGQEIATRPFQLVTGRVWKGTAFGGFKSRTQVPWLVDKYMKKEIKVDEYITHNMNLADINDAFHLLHEGGCLRCVLAMQI

SEQ ID NO: 5434 - protein, 170 aa, Zea mays
  unsure (1)..(170): unsure at all Xaa locations
  Clone ID: PAT_MRT4577_28380C.1.pep
MDSHRLVXDXIPDGQXLRWIDENDHLQQVSVHALAAGKKVILFCVPGAFTPTCSNQHGPGFVTQAEQLXAKVVDEILLISVXDTFVMKAWANTYPENKHVKFLADGSVAYTKALDLELNLTDKGLGARSKRFALLADDLTVIGANIXEGAQDYISDAEEILKALYRLRLL

SEQ ID NO: 5435 - protein, 224 aa, Zea mays
  Clone ID: PAT_MRT4577_2855C.1.pep
MDHAAEAQRTDLMTITRHALNEQGRHPESRGDFTILLSHIVLGCKFVASAVNKAGLAKLIGLAGETNVQGEEQKKLDVLSNEVFVKALVSSGRTCVLVSEENEAAIFVDAPLRGKYCVCFDPLDGSSNIDCGVSIGTIFGIYMIKDKDNATLEDVLQPGTDMIAAGYCMYGSSCTLVLSTGNGVNGFTLDPSLGEVILTHPHIKIPNKGKIYSVNEGNARNWDA

SEQ ID NO: 5436 - protein, 49 aa, Zea mays
  Clone ID: PAT_MRT4577_28783C.1.pep
VVLNSVVASVRTCDRFSEVTVCVSIYTAKSQFVPMDHGKQQGARRRAAG

SEQ ID NO: 5437 - protein, 137 aa, Zea mays
  Clone ID: PAT_MRT4577_28843C.1.pep
AKDLKEGENIQSRLIDMTDGGCDYTFDCTGNVHVMRSALEACHKGWGESIIIGVAAAGQEISTRPFQLVTGRVWKGCAFGGVKGRSQMGQLVQDYMDNKLKVDEFITHRQPLGGINEAFHDMHAGDCIRCVVDMRKV

SEQ ID NO: 5438 - protein, 72 aa, Zea mays
  Clone ID: PAT_MRT4577_28858C.1.pep
WDSYAWPLLNTKKLGTQPCDSFSAVAKLRNGVFVKKPTCVSFPVVAKPREGVFWNYKPPEKKDWCFQPANAS

SEQ ID NO: 5439 - protein, 80 aa, Zea mays
  unsure (1)..(80): unsure at all Xaa locations
  Clone ID: PAT_MRT4577_28915C.1.pep
MDPYMHAASNESNYSXWTTNSGARVWNNNYVLTVGQRRAILLEDYHLIEKLAHVHRQRIPERVVHAQXDSANGFFEGTHD

SEQ ID NO: 5440 - protein, 562 aa, Zea mays
  Clone ID: PAT_MRT4577_29116C.1.pep
MADVHEPLVRRKRKKVLVDYLVKFRWILVIFVVLPISTLIYFNIFLGDMWSAMKSEKKRQKQHDENVQKVVKRLKQRNPKKDGLVCTARKPWIAVGMRNVDYKRARHFEVDLSSFRNILEIDKERMVAKVEPLVNMGQITRATCPMNLALAVVAELDDLTVGGLINGYGIEGSSHLYGLFSDTVVAMEVVLADGRVVRATKDNEYSDLFYGIPWSQGTLGFLVSAEIKLIPIKEYMKLTYTPVKGGLKEIAQAYADSFAPRDGDPAKVPDFVEGMVYTESEGVMMTGVYASKEEAKKKGNKINCVGWWFKPWFYQHAQTALKRGEFVEYIPTREYYHRHTRCLYWEGKLILPFGDQFWFRFLLGWLMPPKVSLLKATQGEAIRNYYHDNHVIQDMLVPLYKVGDALEFVHREMEVYPLWLCPHRLYKLPVKTMVYPEPGFEHQHRQGDTSYAQMFTDVGVYYAPGAVLRGEEFNGAEAVHRLEQWLIENHSYQPQYAVSELNEKDFWRMFDASHYEHCRQKYGAVGTFMSVYYKSKKGRKTEKEVQEAEAAILEPAYADEEA

SEQ ID NO: 5441 - protein, 102 aa, Zea mays
  Clone ID: PAT_MRT4577_29121C.1.pep
MDGGAKVVKNASAARGGWGGPKKKPGSRSMKACLHFPVRRIGRYLKHGRYYQRVRTRARVYLAAVLEYLGDELLELAANATRDNKKNRIMPRHILMAIRTDY

SEQ ID NO: 5442 - protein, 181 aa, Zea mays
  unsure (1)..(181): unsure at all Xaa locations
  Clone ID: PAT_MRT4577_29151C.1.pep
MMLANKLGGLLKNATSSNMSVYQAIRCMSSSKLFVGGLSYGTDDHSLRDEFAKYGQVIEAKIILDRESGRSRGFGFITYTSSEEASAAITAMDGKTLDGRNIRVNHANGRTDQASSCMSSKLFGGWYGGGGXGGYGGGGGYGGGXNRGXYGGGDYGGNRNRGGGGDYGVAGXRWRHLYCWR

SEQ ID NO: 5443 - protein, 230 aa, Zea mays
  Clone ID: PAT_MRT4577_29152C.1.pep
MSVYQAIRCMSSSKLFVGGISYGTDDHSLRDEFAKYGQVIEAKIILDRESGRSRGFGFVTYTSSEEAAAAITALDGKTLDGRSIRINHANEKTGGFRGGGGYGGGGYGGGGGYGGGGGHYGGGGGSGGYGGGDYGGNYSNRGGGDDYEVAGGGGGTFTAGGSDSFANSNFGSDSSFGGNGAGGFDATGGSTGDDGFSGTPDDNFGGNKNEEAMDDIFKDDEPDSYADKRS

SEQ ID NO: 5444 - protein, 170 aa, Zea mays
  Clone ID: PAT_MRT4577_29288C.1.pep
ECLLVLAEAGPDGIVFETIPNKLEAQAYVELLDECNISIPAWFSFNSKDGVHIVSGDSLIECATIANGCSKVGAVGINCTPPRFIHGLILFIRKVTDKPILIYSNSGERYDAEKKEWVESTGVSDGDFVSYVNEWCKDGAVLIGGCCRTTSNTIKAISRSLNQRHSSLIY

SEQ ID NO: 5445 - protein, 61 aa, Zea mays
  unsure (1)..(61): unsure at all Xaa locations
  Clone ID: PAT_MRT4577_29321C.1.pep
MAIKPTMAXNKIGYDKKLRSLLDEYTKVLIALADNVGSKQVHNIRPGLMDDSVVLMGKNTL

SEQ ID NO: 5446 - protein, 64 aa, Zea mays
  unsure (1)..(64): unsure at all Xaa locations
  Clone ID: PAT_MRT4577_29410C.1.pep
MEQTFIMIKPDGVQLSLIADIISLLXKKGFYLKGMKIMNVERSFTQQQYADLADXPVFRGLVEN

SEQ ID NO: 5447 - protein, 125 aa, Zea mays
  unsure (1)..(125): unsure at all Xaa locations
  Clone ID: PAT_MRT4577_29677C.1.pep
QHTKHTSVPALAAGPYCLHMLLGLXSASAATATMFPQCXSQAPIAALRAPYLSPAESXLCENPVVEPYRIHHAVTAXILPLSPLLLRQSSVLLHQLPLVHXLAHIIKAQQLRHLVLANLAAYCQE

SEQ ID NO: 5448 - protein, 175 aa, Zea mays
  unsure (1)..(175): unsure at all Xaa locations
  Clone ID: PAT_MRT4577_29685C.1.pep
MRSFGKTHKSNGYFKXFQEKFTRRRAGKTDYRFRIRLINLDKNKYNTPXTDLLRDLPDKDITAQIISASIARDMALASAYSHEVPRYGLEVGLTNYAAAYCTGLLMARRVLETRGLDKEYERYVEDTGEDFSVEPTDERMPFRALLNDDLIRTTTDKRDFVALKGCLDGGLGICH

SEQ ID NO: 5449 - protein, 247 aa, Zea mays
  Clone ID: PAT_MRT4577_29912C.1.pep
MADLQTPLVRPKRKKVLVDYLVQFRWILVIFVVLPASALIYFNIYLGDMWSAMKSEKKRQKEHEDNVQKVVKRLKQRNPKKDGLVCTARKPWIAVGMRNVDYKRVRHFEVDLSAFRNILEIDPERMVAKVEPLVNMGQISRATCPMNLSLAVVAELDDLTVGGLINGYGIEGSSHIYGLFSDTVVALEIVLADGRVVRATKDNEYSDLFYGVPWSQGTLGFLVSAEIKLIPIREYMRLTYTPVKGPL

SEQ ID NO: 5450 - protein, 446 aa, Zea mays
  Clone ID: PAT_MRT4577_29971C.1.pep
MMSRQCANRIFLTGGSSFLHGLKSRVASSRSHGTVRLNWRCVRTNLWRAERLGVKATPSEHIIAVLQASDIFSGIRKWSKLQLVAMTGVMACVVLVVPSSDAVDALKTCTCLLKECRIELAKCIANPSCAANVACLNTCNNRPDETECQIKCGDLFENSVVDEFNDCAVSRKKCVPKKSDVGEFPVPDPSSLVKSFNMADFNGKWYISSGLNPTFDTFDCQLHEFHVEGDKLIANITWRVRTPDSGFFTRSTVQRFVQDPSQPGILYNHDNEFLHYQDDWYIISSKVENKDDDYIFVYYRGRNDAWDGYGGSVLYTRSKTVPETIIPELERAAKSVGRDFSTFIMTDNTCGPEPPLVERIEKTVVEGEKTIVREVKEIEEEVEELEKEEASLFQKLAEGLMEVKQDFMNFLQGLSKEEMELLDQLNMEATEVEQVFSRALPLRKLR

SEQ ID NO: 5451 - protein, 109 aa, Zea mays
  unsure (1)..(109): unsure at all Xaa locations
  Clone ID: PAT_MRT4577_29996C.1.pep
VGLILPCPTNSNRSGCAAPRAGGGDGILDIAWAFDGMIFILDYCTAGISGVHINPSVTFGLFLARKVSLVRALLYIVAQCLGAICGVCLVKGLQSAYYVRYGCXRNELS

SEQ ID NO: 5452 - protein, 214 aa, Zea mays
  Clone ID: PAT_MRT4577_30206C.1.pep
MWRGGSTAASAARALRSRLLLDPIHHPATSLAPIASARTSSSSTPSTAAANTIVEEAAAAVSVSQHTGSISDSLRHYGKCYWELSKARLSALVVATSGAGYVLGSGNIVDIAGLCCTCAGTMMVAASANTLNQVFEIKNDAKMKRTMRRPLPSGRISPAHAAMWATSVGVAGTALLAWKANGLAAGLAASNLVLYAFVYTPLKQIHPGNTWVGA

SEQ ID NO: 5453 - protein, 462 aa, Zea mays
  unsure (1)..(462): unsure at all Xaa locations
  Clone ID: PAT_MRT4577_30207C.1.pep
MHAYVSSLGGPAGSPFPPGQSATHRASSSPQPAPAAAMWRGGATTAFVARALRSRLLLDPIHHPVTSLAPISSARTSSSSTSSTAAANTIVEEAAAVAAVSVSQHTGSISDALRHYGKCYRELSKVRLSALVVATSGAGYVLGSGNIVDIAGLCCTCAGTMMVAASANTLNQVFEIKNDAKMKRTMRRPLPSGRISPAHAAMWATSVGVAGTALLAWKANGLAAGLAASNLVLYAFVYTPLKQIHPVNTWVGAVVGAIPPLLGWAAASTELSLNAMILPAALYFWQIPHFMALAYLCRNDYLAGGYRMFSFADPTGRRTAWVSLRNCLYMLPLGLFAYNWGLTSEWFSFEASILTLGLTIASXFICSDVLEPSPKTARXYGSLLYLPAFMSGLXLHXLPSEHKAHDLAEKNELDGVLXGADLQDEERARQKRQDXARVQSRPPVSYASVAPFPFLPVPIYES

SEQ ID NO: 5454 - protein, 50 aa, Zea mays
  unsure (1)..(50): unsure at all Xaa locations
  Clone ID: PAT_MRT4577_30429C.1.pep
MEXKGGKKSSSSRSMXYEAPLGYSIXDXRPAGGXKKFQSSXYSNFXKKPS

SEQ ID NO: 5455 - protein, 138 aa, Zea mays
  Clone ID: PAT_MRT4577_30483C.1.pep
MAGKGGKGLLAAKTTAAKSTDKDKDRKKAPVSRSSRAGLQFPVGRIHRQLKSRASAHGRVGATAAVYSAAILEYLTAEVLELAGNASKDLKVKRITPRHLQLAIRGDEELDTLIKGTIAGGGVIPHIHKSLINKTAKE

SEQ ID NO: 5456 - protein, 68 aa, Zea mays
  unsure (1)..(68): unsure at all Xaa locations
  Clone ID: PAT_MRT4577_3049C.1.pep
MDPYKHRPSSGSNYSFWTTKCGAPVWNNNYALTVXTXGPILLEDYHILQKLAQFDRERIPERVVHARR

SEQ ID NO: 5457 - protein, 345 aa, Zea mays
  Clone ID: PAT_MRT4577_30592C.1.pep
MDHAADAHRTDLMTITRHVLNEQSRNPESRGDFTILLSHIVLGCKFVASAVNKAGLAQLIGLAGETNVQGEEQKKLDVLSNEVFVKALVSSGRTCVLVSEEDEEATFVDPKLRGRYCVCFDPLDGSSNIDCGVSIGTIFGIYIIKDKDNVTLEDVLQPGKNMLAAGYCMYGSSCTLVLSTGTGVNGFTLDPSLGEFILTHPDIKIPKKGKIYSVNEGNAKNWDAPVAKFVEKCKYPKDGSPPRSLRYIGSMVADVHRTLLYGGVFLYPADEKNPNGKLRILYEVFPMSFLMEQAGGQSFTGKERALDLVPTKIHDRSPIFLGSYDDVEEIKALYAEQAKSSSASS

SEQ ID NO: 5458 - protein, 61 aa, Zea mays
  Clone ID: PAT_MRT4577_30632C.1.pep
PIVSRIKTQHIQVSAIDLSPHALPIADVPSRQRERGMEMMTRILSGARRAVGMSGTAVGAS

SEQ ID NO: 5459 - protein, 180 aa, Zea mays
  unsure (1)..(180): unsure at all Xaa locations
  Clone ID: PAT_MRT4577_30763C.1.pep
MMLANKLGGLLKNATSSNMSVYQAIRCMSSSKLFVGGLSYGTDDHSLRDEFAKYGQVIEAKIILDRESGRSRGFGFITYTSSEEASAAITAMDGKTLDGRNIRVNHANERTGGFRSSGGYGGGSYGGGGYGGGSGGYGGGGSGDYGGGSGGYGGNYGNRAGGGYGGGGDXGGAGGVYTSL

SEQ ID NO: 5460 - protein, 189 aa, Zea mays
  Clone ID: PAT_MRT4577_30764C.1.pep
MMLANKLGGLLKNATSSKSSNMSVYQAIRCMSSSKLFVGGLSYGTDDHSLRDEFAKYGQVIEAKIILDRESGRSRGFGFITYTSSEEASAAITAMDGKTLDGRNIRVNHANERTGGFRSSGGYGGGGYGGGGGGYGGGGYGGGYGGGSGGYGGGGSGDYGGGSGGYGGNYGNRAGGGYGGGGDYGVAGG

SEQ ID NO: 5461 - protein, 212 aa, Zea mays
  Clone ID: PAT_MRT4577_30766C.1.pep
MMLANKLGGLLKNATSSNMSVYQAIRCMSSSKLFVGGLSYGTDDHSLRDEFAKYGQVIEAKIILDRESGRSRGFGFITYTSSEEASAAITAMDGKTLDGRNIRVNHANERTGGFRSSGGYGGGGYGGGGGGYGGGGYGGGYGGGSGGYGGGGSGDYGGGSGGYGGNYGYRAGGGYGGGEDVSSFRIMFPCPLFAVQVPVITQNVNCSSVFFT

SEQ ID NO: 5462 - protein, 63 aa, Zea mays
  Clone ID: PAT_MRT4577_30805C.1.pep
PPNCTAVFLSHCWNFPLGPLPLKGLLLALLLIPVAPSKKKLLPCRSGKFSQSLDGDDVEIFDQ

SEQ ID NO: 5463 - protein, 163 aa, Zea mays
  unsure (1)..(163): unsure at all Xaa locations
  Clone ID: PAT_MRT4577_30807C.1.pep
MTPIADGDALPDDQLGWFDENHHLEHVSVHXVAPGKKAILFGVPXGAFTPTXSNQNVRGFITQADQLXAXAVYEILLIRXNDPFTMKAWAKXYPENXHVKITPDGSGAYTKALDLEVDLTDKRLTVPSKRMGLLGDXLTVTAANIEEGGXFTISGAVEILKEL

SEQ ID NO: 5464 - protein, 27 aa, Zea mays
  Clone ID: PAT_MRT4577_30836C.1.pep
ADEGYYVHKRRLELDPSRLLRISLNSG

SEQ ID NO: 5465 - protein, 56 aa, Zea mays
  unsure (1)..(56): unsure at all Xaa locations
  Clone ID: PAT_MRT4577_3100C.1.pep
MAVTITWVKARQIFDSRGNPTVEVDVGLSDGSYXRGAVPSGASTGIYEALELRDGG

SEQ ID NO: 5466 - protein, 63 aa, Zea mays
  Clone ID: PAT_MRT4577_3101C.1.pep
GWGFFLWGKNAGVKLVFSFLENLGWHLTNSKFGKQKRGGGLLPAQTLFDKQHLEFLQSCFSPP

SEQ ID NO: 5467 - protein, 104 aa, Zea mays
  unsure (1)..(104): unsure at all Xaa locations
  Clone ID: PAT_MRT4577_31081C.1.pep
LAPPPIPIKQLPGGYPXQFFPFTQWQALNFPVYFNHHQLLPLSKXVGVSPVTFLTQPQWLRFYQHAGPNVGTFLQLQQLLPFNHLVLTNLAVFYQQPIMGGALF

SEQ ID NO: 5468 - protein, 242 aa, Zea mays
  Clone ID: PAT_MRT4577_31087C.1.pep
MRKAYRDSIKVLEADIQHANTLASEFPRDYDGACLQMRLSYSPAAHIFLFLVQWTDCSLAGALGLLRILIYKVYVDGTTTMSTHERKASIKEFYAVIFPSLLQLQRGITDVEDKKQKAVCMEKYRKKDEDGRDTLSDIDVEREEECGICMEMNSKVVLPNCTHAMCIRCYQDWSSRSQSCPFCRDNLKKTCPSDLWIYVEDQDVVDMETVSSENLRRLFMYISKLPLIVPDVIFSVYDSHIK

SEQ ID NO: 5469 - protein, 39 aa, Zea mays
  unsure (1)..(39): unsure at all Xaa locations
  Clone ID: PAT_MRT4577_31117C.1.pep
GGVTSMNPFVXKFFPQVYRNKQXPDPQYCKYDNQLLQTF

SEQ ID NO: 5470 - protein, 83 aa, Zea mays
  Clone ID: PAT_MRT4577_31126C.1.pep
MAAADVEYRCLFSGLAWGTSNEYLVNALDSYGEILNFKAIINRNTERYGGYSYITFSCKNSMLDAIENMNSMELDCRYITDNQ

SEQ ID NO: 5471 - protein, 107 aa, Zea mays
  unsure (1)..(107): unsure at all Xaa locations
  Clone ID: PAT_MRT4577_31337C.1.pep
CFLLETTKFPFSQGLAANPKEFFPFNQLEALNFPVYXQKQQLLPFSQLVGVSPVTFLTQPQLLPFYQPVAPNVGTLLQLQQLLPFNQLVLTNPAVFYQQPIIGGALF

SEQ ID NO: 5472 - protein, 231 aa, Zea mays
  Clone ID: PAT_MRT4577_31410C.1.pep
MPAAMAAAAAQRLLAASTKIIGVGRNYIAHAKELGNPVPKEPVLFLKPTSSFLHAGVATAAVEIPEPLESLHHEVELAVVISRRGRDVPEASAMDFVGGYALALDMTARDLQSVAKSAGLPWTLAKGQDTFTPISAVVPKSAVTNPDDLELWLKVDDELRQKGPTSDMLFKIPFLISYISSIMTLMEGDVILTGTPEGVGPVRVGQKITAGITDLIDVEFDVQRRNRSFST

SEQ ID NO: 5473 - protein, 227 aa, Zea mays
  Clone ID: PAT_MRT4577_31412C.1.pep
MAAAAAQKLLEASTKIIGVGRNYIAHAEELGNPIPKEPVLFLKPTSSFLHAGVATAAVEIPEPLESLHHEVELAVVISRRGRDIPEASAMDFVGGYALALDMTARGLQSVAKSAGLPWTLAKGQDTFTPISAVVPKSSVTNPDDLELWLKVDDELRQKGSTSDMIFKIPFLISYISSIMTLMEGDVILTGTPEGVGPVRVGQKIKAGITDLIDVEFDVQRRNRSFST

SEQ ID NO: 5474 - protein, 231 aa, Zea mays; identical to SEQ ID NO: 5472
  Clone ID: PAT_MRT4577_31418C.1.pep

SEQ ID NO: 5475 - protein, 200 aa, Zea mays
  unsure (1)..(200): unsure at all Xaa locations
  Clone ID: PAT_MRT4577_31447C.1.pep
QPVKEVTNSPQPVKESCRXGGQTKPRXNVITPRVKPEINTHSAPILAGNLPDPSERSWQTKPSSAKLSYKLPMPVDDKDPRSAGAQRPHHSQQLESKPRVSANPWHSSPLTKDFRPGGHVKTPPSAEGASAFSQPVSDFKKMKRQFYSGPMASGPGLSMPSSLNDRRSSAAQAQHLVMPGNLQGLFWQPSSASPKVPPKM

SEQ ID NO: 5476 - protein, 101 aa, Zea mays
  Clone ID: PAT_MRT4577_31461C.1.pep
MAGERFCFLMLLGLSASAGTATIFPQCSQASIASFLAPYLSPAASSACENPILQPYMIQQAIVAGMLHLSPSVLLQPSALLQQLPLVHFFAQNMNAHHLQP

SEQ ID NO: 5477 - protein, 47 aa, Zea mays
  Clone ID: PAT_MRT4577_31624C.1.pep
RTRGKKKKKKKKKKKKKKKKKKKKKKKKKKTKKKKKKKKKKNWGGPF

SEQ ID NO: 5478 - protein, 535 aa, Zea mays
  unsure (1)..(535): unsure at all Xaa locations
  Clone ID: PAT_MRT4577_31653C.1.pep
MPPPLLEFAILATACRFSKPLTVLRRLGVLGPPTVRRNAAEAFVPSPFRQVVVQSGKLLGTPRFCHTTAGMSECLPDVYASQVLKVLKSTSADNADLSGALHQFAVHMDEDIILMVLQKQRSNWQVALAFFNWAAXLPGYAHGSRAYTEMLDILGRMKKVRHMRQLFDEIPEERRQVVVTNKMFAVLLNRYAGAHKVQEAIEVFYLRKDYGFELDLVGFQILLMSLCRYKHVEEAEALFREKKDEFPHVTKSWNIILNGWCVKGSLRDAQRIWNDIIASKVERDLFTFGTFINALAKNGRISAAVKLFKQMWEKGINPDVAICNCIIDQLCFKKKIPEALEIFGEMNDRLCQADVATYNTLIKYMCKIKRMEKVYELLDDMEAKGCPPNNRTYSYILKTTEKPKDVIALMQRMERTGCKLDSDIYNLILNLYIKWKYEKGMQQIWDEMERRGSGPDQRSFTIMVHGLHSQGKLDEALQYYTTMKSRGMIPEPRTKILVKAMHMKKDGAATEDDSASMAGKHLKLDHRSRLFNVHR

SEQ ID NO: 5479 - protein, 114 aa, Zea mays
  unsure (1)..(114): unsure at all Xaa locations
  Clone ID: PAT_MRT4577_32127C.1.pep
CTNNGSPVGRLLMLLGPSASTATATIFPHCLHAPIPSLLSPYLSPAWSTECENPFLNPYRIQQAITPGILPLLPLFLHQSXALLHQLPLAHILTQNIRPQHLLQLVLANLDDYS

SEQ ID NO: 5480 - protein, 115 aa, Zea mays
  unsure (1)..(115): unsure at all Xaa locations
  Clone ID: PAT_MRT4577_32138C.1.pep
FPSFPFFKSKXSDRQVNVPXSFNQKEDKLVLKNKSSKWHEQLQCWCLNFRGRVTGALVKNFQLVASXRTXPKNQESDKVILQFRKIRKNLFTMDYRYPISAFQAFSICLNNFYTK

SEQ ID NO: 5481 - protein, 60 aa, Zea mays
  Clone ID: PAT_MRT4577_32366C.1.pep
RSLPRVITTHRRGDPAISPPWSPATERALRGYPQREEFVRFDLIVKCLIRLTLGCCDVQR

SEQ ID NO: 5482 - protein, 122 aa, Zea mays
  unsure (1)..(122): unsure at all Xaa locations
  Clone ID: PAT_MRT4577_32400C.1.pep
MSDSEEEHFESKADAGACKTYPEHADTVRKNGFIVIKNLPCKDVEVSTSKTGKHGLATCYFGAIYILNGKKLEDIESSSHNXDIPHVNRTEYXLIDISXDGFVSLLTAHGNTKXDDLRLLTD

SEQ ID NO: 5483 - protein, 71 aa, Zea mays
  Clone ID: PAT_MRT4577_3242C.1.pep
LTHSPRPPHPFLLVARRRRRGIRLQKLLASSARSSHDLTMRLIETWAQCGGAGDPGSSPTESVNTTHYRLL

SEQ ID NO: 5484 - protein, 276 aa, Zea mays
  Clone ID: PAT_MRT4577_32479C.1.pep
MHRDRGVSAAAIPGDRKRIGEPMDRSSPSTSWGFSGGREKERIGVGKQPEMPRSGGGSTAMSKSKLSDAESETDSEESDVSGSDGEDTSWISWFCSLKGNEFFCEVDDDYIQDDFNLCGLSNQVPYYDYALDLILDVESSHGDMLTEEQNELIESAAEMLYGLIHVRYIITSKGLSAMLDKYRNVEFGRCPRVNCSGQPCLPVGQSDVPRSSTVKIYCPRCEDIYTPRSKYLSNIDGTYFGTTFPHLFLMTYPHLKPQKPLQQYVPRVFGFKIRKP

SEQ ID NO: 5485 - protein, 81 aa, Zea mays
  Clone ID: PAT_MRT4577_32699C.1.pep
KIIQRILHNHHAKKKKQEYKLMRISYPNFFYSGILIKKCMYGCWIIDFYQKTKMPTLNLNDLHTAKIQFERIRIGLVIRPF

SEQ ID NO: 5486 - protein, 131 aa, Zea mays
  unsure (1)..(131): unsure at all Xaa locations
  Clone ID: PAT_MRT4577_3269C.1.pep
DVEYRXFVGGLTWATDDHSLHNAFSTYGEVLKCKIILYRETQRSRGFRLDTFSTEDAMRNAIKGMNGKELDRRNITVNEAQSHSGRGGCGGGYGGGRGRGGYSGSGRRDCSGGYGRGDCYGGGSGYRGGGR

SEQ ID NO: 5487 - protein, 115 aa, Zea mays
  unsure (1)..(115): unsure at all Xaa locations
  Clone ID: PAT_MRT4577_3282C.1.pep
SGVPATTSRASHAPGELLKLPCDWALISDPELRLYAQLYAXDEYAFLKDYAESHKRLCELGFTXRSTRPSKSDLATVVVLAQIASGVAVAAGTVMAGYLYEASKMVKYRATFFST

SEQ ID NO: 5488 - protein, 227 aa, Zea mays
  Clone ID: PAT_MRT4577_32931C.1.pep
MARRTSYLASRENAALSYGDIASSRAGDASSRENLATSLANNIISRNNDVSGNEAPTSRVGYVNNEFKTPFHSQQILLSPWSNQDNALKVSSFSNRILDQMRSKTVAPPSGVLGSPLKSKSKGKGVVCQRAREEIQVQANARPRDPLDKIPTIPTSIHDSMARVDMLFSTSGNVTKSHSEGSSLRELIKPGRQTMTKFEKMHLFKQIIDLVDRLRNCNAQGFTLQHL

SEQ ID NO: 5489 - protein, 52 aa, Zea mays
  unsure (1)..(52): unsure at all Xaa locations
  Clone ID: PAT_MRT4577_33067C.1.pep
FLTQQQLWPLYMLAARSVGTLLQLRQVLPFKQXALANPTAFYQHPVMGGALF

SEQ ID NO: 5490 - protein, 478 aa, Zea mays
  unsure (1)..(478): unsure at all Xaa locations
  Clone ID: PAT_MRT4577_33348C.1.pep
MSSPAVRRVVLLSSLLCAGALGFLPCSHAAAVAPGYVAVSAASFVPSSTCSSPDRVPPHRRNGTSAVLRLTHRHGPCAPSRASSLAAPSVADTLRADQRRAEYILRRVSGXRASAVGLQGXAAVATVPASWGYDIGTLNYVVTASLGTPGVAQTMEVDTGSDLSWVQCKPCAAAPSCYSQKDPLFDPAQSSSYAAVPCGGPVCAGLGIYAASACSAAQCGYVVSYGDGSNTTGVYSSDTLTLSASSAVQGFFFGCGHAQSGLFNGVDGLLGLGREQPSLVEQTAGTYGGVFSYCLPTKPSTAGYLTLGVGGPSGAAPGFSTTQLLPSPNAPTYYVVMLTGISVGGQQLSVPASAFAGGTVVDTGTVVTRLPPTAYAALRSAFRSGMASYGYPTAPSNGILDTCYNFAGYGTVTLPNVALTFGSGATVTLGADGILSFGCLAFAPSGSDGGMAILGNVQQRSFEVRIDGTSVGFKPSSC

SEQ ID NO: 5491 - protein, 164 aa, Zea mays
  Clone ID: PAT_MRT4577_33495C.1.pep
MDASGAGSKAKKGAAGRKAGGPRKKSVSRSVKAGLQFPVGRIGRYLKKGRYAQRVGIGAPVYLAAVLEYLAAEVLELAGNAAKDNKKTRIVPRHVLLAIRNDVELGKLLAGVTIAHGGVLPNINPVLLPKKVAEKASSGGSKESKSPKKAAKSPKKAAKSPKKA

SEQ ID NO: 5492 - protein, 164 aa, Zea mays
  Clone ID: PAT_MRT4577_33496C.1.pep
MDASGAGSKAKKGAAGRKAGGPRKKSVSRSVKAGLQFPVGRIGRYLKKGRYAQRVGTGAPVYLAAVLEYLAAEVLELAGNAAKDNKKTRIVPRHLLLAIRNDVELGKLLSGVTIAHGGVLPNINPVLLPKKVAEKASSGGSKESKSPKKAAKSPKKAAKSPKKA

SEQ ID NO: 5493 - protein, 80 aa, Zea mays
  Clone ID: PAT_MRT4577_33565C.1.pep
KIRVTPVIPEMVRMIQNRSHKILPFTTTRRSRPRAETRKTDSLPSTRPVPRYRHLSGRRATETAARGRNSSNAWVDRESG

SEQ ID NO: 5494 - protein, 76 aa, Zea mays
  Clone ID: PAT_MRT4577_33624C.1.pep
DLQISQGSQCFTVLHALGARPEGPPYITITGLDDSNSGYATGGGLDIIVRTLCDVAHTCGLTLELNAGPAGSHEAE

SEQ ID NO: 5495 - protein, 241 aa, Zea mays
  unsure (1)..(241): unsure at all Xaa locations
  Clone ID: PAT_MRT4577_33776C.1.pep
MMEGGSRADGRNPNQLRPFTCTGNPLHRAHGSARWAQGDTVVLAAVYGPKPGTRKGENPEKASIEVVWKPKTGQIGRQEREYEMTLKRTLQSICLLTVHPNTTTSVVLQVVGDDGSLMSCAINASCAALAFAGIPMKHLAVAISCGVMDNGVVILDTSRAEEQQARSFAHLVFPNSRKSVEXEGPDTARXEESERGLITCITHGAMSEDDYFNCIERGVMASSRISDFMRKTLQKEVSRDA

SEQ ID NO: 5496 - protein, 73 aa, Zea mays
  Clone ID: PAT_MRT4577_33813C.1.pep
AALFFFFFFFFFFFFFFFFFFFFFFFFFYFFRKNIINIGFIRGKKGGGPQAISLGQGREPIDTWTHIIGRKNN

SEQ ID NO: 5497 - protein, 330 aa, Zea mays
  unsure (1)..(330): unsure at all Xaa locations
  Clone ID: PAT_MRT4577_33820C.1.pep
PAAAVLQVAGVPAAAVQVAHPLLLSRAPSSIGSMGAVASSAGGARGGDGTVLGDLPENCVAEVLLRLDPLEICRLARLSRTFRGAASGDGVWESKLPRNYARLLAVAAAGDGEGXGRPPRRRRGQSCCPSANVYARLCRRNRFDGGKKEFWLDKGGGGLCMSISSRALSITGIDDRRYWNFIPSDESRFRTVAYLSQIWWFEVRGEVEFFFPEGTYSLFYRIHLGRPFKRLGRRVYSSEHVHGWDMKPVRFQMSTSDGQHVQSKCYLSDPGIWINHHVGDFVVKDSSRPVNIRFAMIQIDCTHTKGGLCVDSVVVKPQHLAQKKAPWTYV

SEQ ID NO: 5498 - protein, 104 aa, Zea mays
  unsure (1)..(104): unsure at all Xaa locations
  Clone ID: PAT_MRT4577_33852C.1.pep
MRPRRGSHCARSTAIHGALSSITPAAAGPPPAXASKPTNPAPVHHHGHGNPKPDAVAASLRRGAPADARGLRALIKALSSSASSTSTVAAVHAHATKIGLDRER

SEQ ID NO: 5499 - protein, 211 aa, Zea mays
  Clone ID: PAT_MRT4577_33901C.1.pep
MAAKMFALFALLALCATATSATHIPGHLSPLLMPLATMNPWMQYCMKQQGVANLLAWPTLMLQQLLASPLQPCQMPMMMPGMMPPMTMMPMPNMMPSMMVPTMMSPITIASMMPPMMMPNMVSPMMMPSMMPSTMTPSMMPPIMMPSMIPPMMMPSMVSSMIMPNMMTVPQCYSDSISHIIQQQQLPFMFSPTAVAISPMFLQQPFVGAAF

SEQ ID NO: 5500 - protein, 156 aa, Zea mays
  Clone ID: PAT_MRT4577_33903C.1.pep
EAREHRHGRMFALFALLALCATATSATHIPGHLSPLLMPLATMNPWMQYCMMQQGLASLMACPSLMLQQLLALPLQTMPVMMPQMMTPNMMSPLMMPSMMSPMVLPSMMSQMMMPQCHCDAVSQIMLQQQLPFMFNPMAVAISPMFLQQPFVGAAF

SEQ ID NO: 5501 - protein, 216 aa, Zea mays
  unsure (1)..(216): unsure at all Xaa locations
  Clone ID: PAT_MRT4577_33904C.1.pep
MAAKMFALFALLALXCATATSATHIPGHLSPLLMPLATMNPWMQYCMKQQGVANLLAWPTLMMQQLLASPLQPCQMPMMMPGMMPPMPMMPMPSMMSSMMVPTMMSPMTMASMMPPMMMPSMISPMMMPSMMSSMIMPSMMMPTMMSPMMMTSMIPPMMMPSMVSPMMMPNMMTVPQCYSDSISHIIQQQLPFMLSPTAMAIPPMFLQQPFVGAAF

SEQ ID NO: 5502 - protein, 219 aa, Zea mays
  unsure (1)..(219): unsure at all Xaa locations
  Clone ID: PAT_MRT4577_33908C.1.pep
MEQGNHIGIAGEKFALVGLLTFCANGNYGNHIPRDLVTILVAMXTMNPWMQYCMKHQGVANLLAXPTLKLHQLLASPLQPCQMPMMMPGMMPPMTMMPMPNMMPSMMVPTMMSPITIASMMPPMMMPNMVSPMMMPSMMPSTMTPSMMPPIMMPSMIPPMMMPSMVSSMIMPNMMTVPQCYSDSILHIIQQQQLPFMFSPTAVAISPMFLQQPFDGAAF

SEQ ID NO: 5503 - protein, 100 aa, Zea mays
  unsure (1)..(100): unsure at all Xaa locations
  Clone ID: PAT_MRT4577_33937C.1.pep
MAAKIFCLLMLLGLSASAATATIFPQCSQAPIASLLPPYLSPTVSSVCENPILXSYRIQQAISDGILPLSPXTIYYHETYYRXLLLVHLWAQNINAQHLR

SEQ ID NO: 5504 - protein, 328 aa, Zea mays
  Clone ID: PAT_MRT4577_3398C.1.pep
MENSAAAAAERPRLTRAAAKRSAVVTAVAVAAKRKRVALSQLPTLPNAVLGAHDDDDDKPVRKQRLLPAAKPKRRLAVDYIAAVQIDVTPNMRGILIDWLVEVAEELKLVSDTLYLTVSYIDRFLSAKVLNRQKLQLLGVSAMLIASKYEEISPPNVEDFCYITDNTYTKQEVVKMESDILNVLKFEVGSPTAKTFLRMFIRSAQEDNKKYPSLQLEFLGSYLSELSLLDYGLIRSLPSLVAASAVFVARLTLDPHTHPWSKKMQTLTGYKPSELKDCVAAIHNLQLNRTCQSMVAIREKYRQHRFKGVSALLPPVEIPASYFNTLKE

SEQ ID NO: 5505 - protein, 132 aa, Zea mays
  unsure (1)..(132): unsure at all Xaa locations
  Clone ID: PAT_MRT4577_34063C.1.pep
MGERIEMAASDVDYRCWVRGLTWATDDHSLHXAFSTYGEALEFKIILHRETHRFLRFLGIVTFSTVEAMRNAIEGMTCKELDGRYIPXNEAQSRGGSXGGVGGGYGGGRGGGGHRRWRAPEMAAAATAVAAG

SEQ ID NO: 5506 - protein, 256 aa, Zea mays
  Clone ID: PAT_MRT4577_3412C.1.pep
MSEGKKYLIVLAHHEPKSLNHSFAQRAQQVLTAAGNEVKLIDLHAVNFNPVSDRRNFKTTANPEFLKQQIEERHATEHDGFADDIKESLEAVDWCDVLILQFPFWWFSMPAILKGWIDKVWASGRVYGPNKKFTAGVWKGKKAFLSITTGSSEPTYAGPDSRMGDINSLLFPINHGILAFVGFTVLPPFIAYSASHATEDQRKQFLDEYEQRLLNLENLTPISYPPNEAFDSTGILKADWKAAQAHQNSNPAPREG

SEQ ID NO: 5507 - protein, 147 aa, Zea mays
  Clone ID: PAT_MRT4577_34279C.1.pep
SSSCASASVSFSSSPRRRSRSLIAALRWGDAGCETKLSLPGALKGTRPLPQPLPGRRRRRGYRTTGRRGSAPVVPTRSITNRRPILLASATADILLRESVVDYYTLVLISFSFLSFLISFSFLSRPCDQGVNVTNYCHDFSECIQVM

SEQ ID NO: 5508 - protein, 73 aa, Zea mays
  unsure (1)..(73): unsure at all Xaa locations
  Clone ID: PAT_MRT4577_35057C.1.pep
DGKAIDGRQVRVNMANXRPSRNRGGGGYGGAGYVGGGSGGDDGNVGGGYGGAIQNYNALGGQDPIRCIINQEI

SEQ ID NO: 5509 - protein, 438 aa, Zea mays
  Clone ID: PAT_MRT4577_35061C.1.pep
MHIDMIKKPRRFFPFRNLDWRCCLLPVGAVGWGSFQLGYSGNADLEPGRCRRTDGKKWRCSRDAVADQKYCERHMNRGRHRSRKHVEGQPGHAAKAMSAVAVAAAAAAAAALAGAGATAAAGLAANQHRQPGKSYATGATDPCSLQYSRGLANKLSNESENMQDSDSVSMLTSMNTGNTAGSVFPFSKQNTDLFEVSSSRPEFGLVPSDSLTSSPHSSLKSVKNLLSSRSLSEHQSSASLQHFVDWPRTPPAQGGLSWPEAEDMPRAQTSQLSVSAPMASSELSSASTSPIHDHEKLILSPLKLGRDREYSPSGLVSAAANRYEVSQLEATWATTFRDSSTGGPLGEVLAKNNSNAEARSCPSAAPPLTDYYCWDSGHGMQSSPVGVLQRTTAFGSVSSSTGSSPRVESHGACCDGTSNLMDDDLGSVVVSHPSIRLL

SEQ ID NO: 5510 - protein, 426 aa, Zea mays
  Clone ID: PAT_MRT4577_35063C.1.pep
KPCRLFLFRILIWRCCVLGAVGWGSFQLGYSGNADLEPGRCRRTDGKKWRCSRDAVADQKYCERHMNRGRHRSRKHVEGQPGRAAKAMSAVAVAAAAAAAALAGAGATAAAGLAVNQHRQPGKSYATGATDPCSLQYSRGLANKLSNESENMQDSDNVSMLTCMNTGNTAGSVFPFSKQNTDLFEVSSSRPEFGLVPSDSLTRSPHSSLKSVKNLLSSRSLSEHQSSTSLQHFVDWPRTPPAQGGLSWPEAEDMPRAQRSQLSVSAPMASSELSSASTSPIHDHEKLILSPLKLGREYSPSGLVSVAGASRDEVSQLEATWATTFRDSSTGGPLGEVLAKNNSNAEARSCPSAAPPLTEYYCWDSGHGMESSPVGVLQRTTAFGSVSSSTGSSPRVENHGASCDGTSNLMDDLGSVVVSHPSIRLL

SEQ ID NO: 5511 - protein, 583 aa, Zea mays
  Clone ID: PAT_MRT4577_35068C.1.pep
MEAGGGASELGLLGAGSGRLLKHGRGDAAGGEDHGWVVVVGGGGRAKQARTASVGTGDAAATAAVPFLLGSCGGPGHGGERMLSFSSAAAAAPDDGGAMPPLYYGTPASCSGLMSSARVRGPFTPPQWIELEHQALIYKYLSANSPVPHSLLVPIRRSGSLASSPYPPPYFGTSTFGWGSFQLGYSGNADLEPGRCRRTDGKKWRCSRDAVADQKYCERHMNRGRHRSRKHVEDQPGHAAKAMSAVAVAAAAAAATQHAAALAGAGATAAAGLAVNRHRQPGKSYATGATDPCSLQYSRELANKLSNESENMQDSDNLSMLTSMNTGNTGSVFPFSKQNTAPFEVSSSRPEFGLVPSDSLTSSPHSSLENVKNLLGSRSMNEHQNPASLQHFVDWPRTPAQGGLSWPEAEDMQAQRSQLSISAPMASSELSSASTSPIHDHEKLILSPLKLGREYTPSGVVSAAANRYEVSQLEATWATMFRDSSTGGPLGEVLAKNNSNAEARGCPSAAPPLTDYYCWDSGHGMQSSPVGVLQRTTAFGSVSSSTGSSPRVESHGACCDGTSNLMDDDLGSVVVSHPSIRLL

SEQ ID NO: 5512 - protein, 476 aa, Zea mays
  Clone ID: PAT_MRT4577_35069C.1.pep
MSSARVRGPFTPPQWIELEHQALIYKYLSANSPVPHSLLVPIRRSGSLASSPYPPPYFGTSTFGWGSFQLGYSGNADLEPGRCRRTDGKKWRCSRDAVADQKYCERHMNRGRHRSRKHVEDQPGHAAKAMSAVAVAAAAAAATQHAAALAGAGATAAAGLAVNRHRQPGKSYATGATDPCSLQYSRELANKLSNESENMQDSDNVSMLTSMNTGNTAGSVFPFSKQNTDLFEVSSSRPEFGLVPSDSLTSSPHSSLKSVKNLLSSRSLSEHQSSASLQHFVDWPRTPPAQGGLSWPQAEDMPRAQRSQLSVSAPMASSELSSASTSPIHDHEKLILSPLKLGRDREYSPSGLVSVAGASRDKVSQLEATWATMFRDSSTGGPLGEVLAKNSSNAEARSCPSAAPPLTDYYCWDSGHGMQSSPVGVLQRTTAFGSVSSSTGSSPRVESHGACCDGTSNLMDDDLGSVVVSHPSIRLL

SEQ ID NO: 5513 - protein, 594 aa, Zea mays
  Clone ID: PAT_MRT4577_35127C.1.pep
MDTLFRLVSLQASEQQQQQQSASYNSRSTTSSGSRSSSHQTNASYNYYYHSNSSGGGGGGQYYYGQQHPQQHQHQQYYLEPYQQEECGNTHHLYMDEDFSSSSSSRQHFHSHGAVVQPPTSSTATPTAPTPSLSTSSTAAGAAHALFEAADLSFPPDLNLDFSSPASSSGGGAASSAAVGGGGGGRWASQLLLECARAVAGRDSQRVQQLMWMLNELASPYGDVEQKLASYFLQGLFARLTASGPRTLRTLAAASDRNTSFDSTRRTALRFQELSPWSSFGHVAANGAILESFLEAAAASPEPQRLHILDLSNTFCTQWPTLLEALATRSADDTPHLSITTVVSSAPSAPTAAVQRVMREIGQRMEKFARLMGVPFSFRAVHHAGDLAGLDLDALDLRDGGATTALAINCVNSLRGVVPGGARRRDAFAASLRRLDPRVVTVVEEEADLVAFDPGAPDESGDTEAAFLKVFGEGLRFFSAYMDSLEESFPKTSNERLALERGAGRAIVDLVSCPASESMERRETAASWARRMRSSGFSPVAFSEDVADDVRSLLRRYREGWSMRDAGLDDSEAGAGVFLAWKEQPLVWASAWRP

SEQ ID NO: 5514 - protein, 305 aa, Zea mays
  Clone ID: PAT_MRT4577_35131C.1.pep
MESASDVQMQHRAEDSETTIEIKIKTLDSQTYNLRVNKCVPVPLLKEKIATVTGILSEQQRLICRGRVLKDDELLSAYHVEDGHTLHLVVRHPGQSATFGNAATEANTSNSGRRHGPTVARSVVLEAVNVDPGSSELPAFVAQILQSVLGTINAQSTGTPTSSDTGSLDPSQSSIPNTIRVELDQQQAPLLFQSEPAHESSQPNVIPDALTTMSQYINFMRDSFRREGFSLNGQTEGNVENRTAEPESASVLGLHNASLLAENMHSTRQIIVEQAGALLSQLSTQLGDLENVTDSAIRRDIQSSA

SEQ ID NO: 5515 - protein, 48 aa, Zea mays
  Clone ID: PAT_MRT4577_35394C.1.pep
YRVPVSFCHRVSDRSTFELGVGTPVVPFVCSRYETRPHKNEQGFCSQL

SEQ ID NO: 5516 - protein, 301 aa, Zea mays
  unsure (1)..(301): unsure at all Xaa locations
  Clone ID: PAT_MRT4577_35583C.1.pep
MASCRMALLLGLLLLVVASPAIADDDSGIYYQLALMWPGAYCEQTSAGCCKPTTGVSPARDFYITGFTVLNAITDAAVTGCSNKVPYDPNLITGIQGLDQYWSNIRCPSNNGQSSWKTXWXKKAGACSGLSEKDYFETALSFRSRINPLVRLKAKGIEPDFGLYGLKAITKVFKSGINATPVIQCSKGPFDKYMLFQLYFCAAGNGTFIDCPAPQQYTCSKEILFHPFKKWMLKQQLNQDDDPFQLPGVAXTTDTPTPSRSGCSSSSSTRTTTLSSCLASPWTTDTPYRRLSLRFCQVCME

SEQ ID NO: 5517 - protein, 301 aa, Zea mays
  unsure (1)..(301): unsure at all Xaa locations
  Clone ID: PAT_MRT4577_35585C.1.pep
MASCRMALLLGLLLLVVASPAIADDDSGIYYQLALMWPGAYCEQTSAGCCKPTTGVSPARDFYITGFTVLNATTDAAVTGCSNKVPYDPNLITGIQGLNQYWSNIRCPSNNGQSSWKNAWKKAGACSGLSEKDYFETALSFRSRINPLVRLKAKGIEPDFGLYGLKAITKVFKSGINATPVIQCSKGPFDKYMLFQLYFCAAGNGTFIDCPAPQQYTCSKEILFHPFKKWMLKQQLNQDDDPFQLPGVAXQLIHRPLQEVDAQAAAQRGRTTTLSSCLASPWTTDTPYRRLCLRFCQVCME

SEQ ID NO: 5518 - protein, 104 aa, Zea mays
  unsure (1)..(104): unsure at all Xaa locations
  Clone ID: PAT_MRT4577_35600C.1.pep
MAAADVKYRCFVGGLAWAXTSNESLENAFACYREILDYKDITDRETGRSRGLRLDTLYYENSMLDAIDNMNGKELDGRNITANQAQTRDGGGGGCSYSGCRGRG

SEQ ID NO: 5519 - protein, 79 aa, Zea mays
  unsure (1)..(79): unsure at all Xaa locations
  Clone ID: PAT_MRT4577_35623C.1.pep
GIFKKSPFGVLXPRGVGHLGKPSKKRGRKGRPNFKVGICGKNGGEPSSVAFFGKGGVGYVFCSPFRVPIDRQSPAQGFV

SEQ ID NO: 5520 - protein, 95 aa, Zea mays
  unsure (1)..(95): unsure at all Xaa locations
  Clone ID: PAT_MRT4577_35656C.1.pep
MDASGAVSKGKKGAAGRKAGGPRKKSVTRAVKAALEFPVERIGRYLKKGRYAQRVCTGAPVYLAAVLXYLCCQVLDLPGHAAKDNMKTRIISCHV

SEQ ID NO: 5521 - protein, 58 aa, Zea mays
  Clone ID: PAT_MRT4577_3574C.1.pep
GEKKQILFINKRGSQIFLHTYMLIGGDAVDHLKLDTYLLKLIQHGGTSEVHMLTDDKF

SEQ ID NO: 5522 - protein, 121 aa, Zea mays
  Clone ID: PAT_MRT4577_35832C.1.pep
KQFFPFDHQAALKFASFLYEQELPFSQLPVSYPQQFFPFIQLAALNSLAYLRQLQLLPLSQLAGVSPATFFTQPQLLAFYQGAGPNAGTLLQLQQLLPFNQLALSNLAVFPPPPIFGGALF

SEQ ID NO: 5523 - protein, 137 aa, Zea mays
  Clone ID: PAT_MRT4577_35964C.1.pep
DAWFPLAVAGGSSRTPEPNAPRRAALCRGTEAKCVTRQGRSRAPDRKHRGAVRADIGHEGARPRRAGARLRRLRRWSGRGGWQTDADGRGGRGDGGLRRLAAREDATRQRTPMVPGMGLPLHPSAPDEPHARPSRQG

SEQ ID NO: 5524 - protein, 451 aa, Zea mays
  Clone ID: PAT_MRT4577_360C.1.pep
MRECISIHIGQAGIQVGNACWELYCLEHGIQADGQMPGDKTIGGGDDAFNTFFSETGAGKHVPRAVFVDLEPTVIDEVRTGTYRQLFHPEQLISGKEDAANNFARGHYTIGKEIVDLCLDRIRKLADNCTGLQGFLVFNAVGGGTGSGLGSLLLERLSVDYGKKSKLGFTVYPSPQVSTSVVEPYNSVLSTHSLLEHTDVAVLLDNEAIYDICRRSLDIERPTYTNLNRLVSQVISSLTASLRFDGALNVDVNEFQTNLVPYPRIHFMLSSYAPVISAEKAYHEQLSVAEITNSAFEPSSMMAKCDPRHGKYMACCLMYRGDVVPKDVNAAVATIKTKRPIQFVDWCPTGFKCGINYQPPSVVPGGDLAKVQRAVCMISNSTSVVEVFSRIDHKFDLMYAKRAFVHWYVGEGMEEGEFSEAREDLAALEKDYEEVGAEFDEGEDGDEGDEY

SEQ ID NO: 5525 - protein, 122 aa, Zea mays
  Clone ID: PAT_MRT4577_36122C.1.pep
MCLSEEKTYTGREHKGKDLSHADFVRLEIELTAVEMPSLMACRAAFVPDRPFAGARIWERVHMTIQTVGLIETLTALGAEVRWRYCNMLLTQDHAGVDIARDSDCVFVWKGETLEEYWWCTE

SEQ ID NO: 5526 - protein, 52 aa, Zea mays
  unsure (1)..(52): unsure at all Xaa locations
  Clone ID: PAT_MRT4577_36165C.1.pep
MEQTFIMIKPDCVHRGLIGGIISRFEKKGFYLNGMKFMNVEGSFAXQHYADL

SEQ ID NO: 5527 - protein, 456 aa, Zea mays
  Clone ID: PAT_MRT4577_362C.1.pep
QKRKKKKKKKKNKKKKKKKRGRPPCWELYCLEHGIQADGQMPGDKTIGGGDDAFNTFFSETGAGKHVPRAVFVDLEPTVIDEVRTGTYRQLFHPEQLISGKEDAANNFARGHYTIGKEIVDLCLDRIRKLADNCTGLQGFLVFNAVGGGTGSGLGSLLLERLSVDYGKKSKLGFTVYPSPQVSTSVVEPYNSVLSTHSLLEHTDVAILLDNEAIYDICRRSLDIERPTYTNLNRLVSQVISSLTASLRFDGALNVDVNEFQTNLVPYPRIHFMLSSYAPVISAEKAYHEQLSVAEITNSAFEPSSMMAKCDPRHGKYMACCLMYRGDVVPKDVNAAVATIKTKRTIQFVDWCPTGFKCGINYQPPSVVPGGDLAKVQRAVCMISNSTSVVEVFSRIDHKFDLMYAKRAFVHWYVGEGMEEGEFSEAREDLAALEKDYEEVGAEFDEGEDGDEGDEY

SEQ ID NO: 5528 - protein, 34 aa, Zea mays
  Clone ID: PAT_MRT4577_36316C.1.pep
KNVCRYMCSSRILLAQSKLVGLSHCLRYMNTCID

SEQ ID NO: 5529 - protein, 99 aa, Zea mays
  unsure (1)..(99): unsure at all Xaa locations
  Clone ID: PAT_MRT4577_36430C.1.pep
FIQLPTTLPHQFLPFIQLPAFNSHTYFQHQQLLPFKQLAGVNPTPLLVYIPQLFPFYQHPAPNADTLSQLQQFHPPNQLSLTNPAAFXYQQPIIGGALF

SEQ ID NO: 5530 - protein, 416 aa, Zea mays
  Clone ID: PAT_MRT4577_3650C.1.pep
MGYCKIRHVIWIRLLCLYICVEPSLGSGLYTIAEASACRLQPMRIERDLHMATGDGETSYTKNSRIQEKTMFQIKPVLEEATRAVYTALHPQTMVVADLGCSSGPNTLRFVSEVIGIIARHCKEYGRQHDHTQLQFFLNDLPGNDFNNLFQLIQQFNKSTAINHKSEAAEALPPPCYISGLPGSYYTRIFPSESVHLFHSLFCLQWRSEAPEGNKKTCLDIYITKTMSPSMVKLFQQQFQKDFSLFLRLRYEELVSGGQMVLTFIGRKHENVFTGESNHLYGLLAQSLKSLVDEGLVEKEKLESFYLPMYSPSVGEVEAILKQVGLFNMNHVKVFQTNWDPYDDLESDVVHNSIRSGENVAKCLRAVMQPLVASQFGEPILDKLFKEYARRVAKHLENEKTKHAIIVLSIEKAIHL

SEQ ID NO: 5531 - protein, 100 aa, Zea mays
  unsure (1)..(100): unsure at all Xaa locations
  Clone ID: PAT_MRT4577_36533C.1.pep
MASATGLKSSFRPKKSEWGATKQGAEPRPPTVSMRRRASAYVDELGKTGKTIAXPGRGILPMHQSSATRGKRVASIGLENTEDNRHAXRTMVVHGERTMG

SEQ ID NO: 5532 - protein, 382 aa, Zea mays
  Clone ID: PAT_MRT4577_3653C.1.pep
MPMRIERDLHMAIGNGETSYTKNSRIQEKAMFQMKSVLEEATRAVCTALLPQTMVVADLGCSSGPNTLRFVTEVTRIIAHHCKLEHNRRHDHLPQLQFFLNDLPGNDFNNLFQLIEQFNKSSTTHKGDAATEALQPPCYISGLPGSYYTRIFPSESVHLFHSLFCLQWRSQAPEQLKGTQKSCLDIYITKTMSPSMVKLFQQQFQKDFSLFLRLRYEELVSGGQMVLTFIGRKHEDVFTGESNHLYGLLAQSLKSLVDEGLVEKEKLESFYLPIYSPSVGEVEAIVKQLGLFNMNHVKVFEINWDPYDDSEGDDVHNSIESGENVAKCLRAVMEPLVASQFGERILDKLFKEYARRVAKHLENEKTKHAVLVLSIEKAIIHV

SEQ ID NO: 5533 - protein, 70 aa, Zea mays
  unsure (1)..(70): unsure at all Xaa locations
  Clone ID: PAT_MRT4577_36578C.1.pep
ACMLSSTLFVGGASYGTXDHSLRDESAKYGXISNAEIILDXRSXGRSRGXDSITYTCTDEATAAITGMAG

SEQ ID NO: 5534 - protein, 118 aa, Zea mays
  unsure (1)..(118): unsure at all Xaa locations
  Clone ID: PAT_MRT4577_36609C.1.pep
CLLMLLGLTASAATATILLQCLQAPIAAYLTAYLXPAVSTVCENLILQPYRIQQAIAARILPVSPLLLQQLSALLQQVPMVHLMTHDIKVQQLQQLVLGNLAAYCQQQXIVAFNRLAA

SEQ ID NO: 5535 - protein, 360 aa, Zea mays
  Clone ID: PAT_MRT4577_36673C.1.pep
FLCVAIGLWAGLAIGFTTEYFTSNAYSPVRDVADSCRTGAATNVIFGLALGYKSVIVPVFAIAVSIYVGFTLASIYGIAVAALGMLSTVATGLAIDAYGPISDNAGGIAEMAGMSRRIRQRTDALDAAGNTTAAIGKGFAIGSAALVSLALFGAFVSRAGVEDVNVLNPKVFVGLLVGAMLPYWFSAMTMKSVGSAALKMVEEVRRQFITIPGLMEGRAAPDYARCVRISTDASLKEMMPPGALVLLAPLVAGTFFGVSTLAGLLAGALVSGVQIAISASNSGGAWDNAKKYIEAGASDHAKSLGPKGSDAHKAAVIGDTIGDPLKDTSGPSLNILIKLMAVESLVFAPFFAAHGGLIFK

SEQ ID NO: 5536 - protein, 107 aa, Zea mays
  unsure (1)..(107): unsure at all Xaa locations
  Clone ID: PAT_MRT4577_36721C.1.pep
LLHKFFFFFFREAFGGGVKSSFLPKKSEWGATRHAAAPRPPTVSMVVRASAYADELVKTAKTIASPWRGFLAMDESNATCGKXLASIRLXEHRCQPGGFPDCWWSRL

SEQ ID NO: 5537 - protein, 78 aa, Zea mays
  Clone ID: PAT_MRT4577_36948C.1.pep
PVIMPQMMTPNMMSPFIMPSIMSPMVFPSIMLQKIMPQCPWDPVFQIILQHQFPFMFNPMAMAIPPMFLQQPFVGGAF

SEQ ID NO: 5538 - protein, 215 aa, Zea mays
  unsure (1)..(215): unsure at all Xaa locations
  Clone ID: PAT_MRT4577_36961C.1.pep
MAIKRTKAEKKIAYDQKLCQLLEEYTKVLIAVADNVGSKQLQEIRKGLRGDSIVLMGKNTLIRRCIKVHSEKTSNKDFLELSNLLVGNVGLIFTKGDLKEVREEVAKYKVGAPARVGLVAPVDVVVPPGNTGLDPSQTSFFQVLNIPTKINKGTVEITIPVELIKKGDKVGSSESALLAKLGIRPFSYGLVICNVYDSGSVFSPXEXLDLTEEDL

SEQ ID NO: 5539 - protein, 1089 aa, Zea mays
  Clone ID: PAT_MRT4577_37056C.1.pep
MSVWNYVVTAHKPTSVSHSCVGNFTSPNQLNLIIAKCTRIEIHLLTPQGLQPMLDVPIYGRIATIELFRPHNETQDFLFIATERYKFCVLQWDTEKSELITRAMGDVSDRIGRPTDNGQIGIIDPDCRLIGLHLYDGLFKVIPFDNKGQLKEAFNIRLEELQVLDIKFLHGCAKPTIVVLYQDNKDVRHVKTYEVALKDKDFVEGPWSQNNVDNGAGLLIPVPAPLGGVIIIGEEQIVYCNANSTFKAIPIKQSIIRAYGRVDPDGSRYLLGDNTGILHLLVLTHERERVTGLKIEYLGETSIASSISYLDNGVVYVGSRFGDSQLVKLNLQADASGSFVEILERYVNLGPIVDFCVVDLDRQGQGQVVTCSGAFKDGSLRVVRNGIGINEQASVELQGIKGLWSLKSSINDPFDMYLVVSFIGETRFLAMNMEDELEETEIEGFDAQPQPLSCQNAINDLLIQVTANSVRLVSCTSRELVNQWNAPAGFSVNVASANASQVLLATGGGHLVYLEIRDAKLVEVKHAQLEHEISCLDLNPIGENPQYSSLAAVGMWTDISVRIFSLPDLELIRKENLGGEIVPRSVLLCTLEGVSYLLCALGDGNLFSFLLNASTGELTDRKKVTLGTQPISLRTFSSKGTTHVFASSDRPTVIYSSNKKLLYSNVNLKEVNHMCPFNTAAFPDSLAIAKEGELSIGTIDDIQKLHIRTIPLNEQARRICHQEQSKTLAFCSFKYNQSVEESETHLIRLLDHQTFESLCVYPLDQYECGCSIISCSFADDSNVYYCVGTAYVIPEENEPTKGRILVFAVEDGSLQLIVEKETKGAVYSLNAFNGKLLAAINQKIQLYKWMSREDGSHELQSECGHHGHILALYTQTRGDFIVVGDLMKSISLLVYKHEESAIEERARDYNANWMTAVEMLDDEVYVGAENGYNLFTVRKNSDAATDDERARLEVVGEYHLGEFVNRFRHGSLVMRLPDSDIGQIPTVIFGTINGVIGIIASLPHDQYIFLEKLQSTLVKYIKGVGNLSHEQWRSFHNDKKTAEARNFLDGDLIESFLDLSRSKMEEVSKAMGVPVEELSKRVEELTRLH

SEQ ID NO: 5540 - protein, 36 aa, Zea mays
  Clone ID: PAT_MRT4577_3717C.1.pep
IPRSFARYSSALLTTPRWLPNRIAPIQQRHHMAEHV

SEQ ID NO: 5541 - protein, 92 aa, Zea mays
  Clone ID: PAT_MRT4577_37192C.1.pep
CLVMSGRGKGGKGLGKGGAKRHRKVLRDNIQGITKPAIRRLARRGGVKRISGLIYEETRGVLKVFLENVIRDAVTYTEHAKRKTVTAMDVVY

SEQ ID NO: 5542 - protein, 237 aa, Zea mays
  Clone ID: PAT_MRT4577_37203C.1.pep
MAGQERRTIDLEEGWAFMQKGITKLKNILEGKPEPQFSSEDYMMLYTTIYNMCTQKPPHDYSQQLYDKYRESFEEYITSMVLPSLREKHDEFMLRELVQRWSNHKVMVRWLSRFFHYLDRYFISRRSLTPLKEVGLTCFRELIYQEIKGQVKDAVIALIDKEREGEQIDRGLLKNVLDIFVEIGLGQMECYENDFEDFLLKDTTEYYSVKAQSWILEDSCGDLRAYGSCHSKGCSHL

SEQ ID NO: 5543 - protein, 180 aa, Zea mays
  Clone ID: PAT_MRT4577_37333C.1.pep
MADAPASPGGGGGSHESGSPRGGGGGGGGSVREQDRFLPIANISRIMKKAIPANGKIAKDAKETVQECVSEFISFITSEASDKCQHEKRKTINGDDLLWAMATLGFEDYIEPLKVYLQKYREMEGDSKLTSKSSDGSIKKDALGHVGASSSAVQGMGQQGTYNQGMGYMQPQYHNGDISN

SEQ ID NO: 5544 - protein, 61 aa, Zea mays
  unsure (1)..(61): unsure at all Xaa locations
  Clone ID: PAT_MRT4577_37451C.1.pep
GDNAQHRQAPAAATRYKHDXPAXSSLTFXIXSXXXTSTFLXPXSPLLLTRXRHQPEXLPPR

SEQ ID NO: 5545 - protein, 110 aa, Zea mays
  Clone ID: PAT_MRT4577_37519C.1.pep
MAEVHNERPVGMVGGVRDAPVGRENDLEAIELARFAVAEHNSKTNAMLEFERLVKVRHQVVAGTLHHFTVEVKEAGGGEKKLYEAKVWEKAWENFKQLQSFELVGDAAVA

SEQ ID NO: 5546 - protein, 131 aa, Zea mays
  unsure (1)..(131): unsure at all Xaa locations
  Clone ID: PAT_MRT4577_37567C.1.pep
PPISLLAELKAKLNELTPLNPLECNQKELSGALTKYXNCLGKSFNTTYILXAYRTEXFEVHTANNMIANHFYRQGLFDLADXCIVPECAELGSASXCSYRFRTCMLSLEAMIEXNLEPALTWRAKNHDHMM

SEQ ID NO: 5547 - protein, 452 aa, Zea mays
  Clone ID: PAT_MRT4577_37639C.1.pep
MGTQAPENYPAEKDARSAREKAIDDWLPITSSRNAKWWYSAFHNVTAMVGAGVLSLPYAMSELGWGPGIAVLVVSWVITLYTLWQMVEMHEMVPGKRFDRYHELGQHAFGDRLGLWIVVPQQLVVEVGVNIVYMVTGGKSLKKFHDVLVCGDTGVCEGKDNIKTTYFIMIFASVHFVLSQLPNFNSISGVSLAAAVMSLSYSTIAWGASVHKGRMSGVDYHLRATTTPGKVFGFFGALGDVAFAYAGHNVVLEIQATIPSTPDKPSKKPMWKGVVVAYVVVALCYFPVALIGYWAFGNTVEDNILITLSKPKWLIALANMMVVVHVIGSYQIYAMPVFDMIETVLVKKLRFPPGLTLRLIARTLYVAFTMFIAITFPFFGGLLGFFGGFAFAPTTYFLPCVMWLAIYKPKRFSLSWLTNWMCIILGVLLMILSPIGGLRQIIMEAKTYQFYS

SEQ ID NO: 5548 - protein, 454 aa, Zea mays
  unsure (1)..(454): unsure at all Xaa locations
  Clone ID: PAT_MRT4577_37645C.1.pep
MGTQAPENYPAEKVQDARSAREKAIDDWLPITSSRNAKWWYSAFHNVTAMVGAGVLSLPYAMSELGWGPGIAVLVVSWVITLYTLWQMVEMHEMVPGKRFDRYHELGQHAFGDRLGLWIVVPQQLVVEVGVNIVYMVTGGKSLKKFHDVLVCGDNGVCEGKDNIKTTYFIMIFASVHFVLSQLPNFNSISGVSLAAAVMSLSYSTIAWGASVHKGRMSGVDYHLRATTTPGKVFGFFGAXXXVAFAYAGHNVVLEIQATIPSXXDKPSKKPMWKGVVVAYVVVALCYFPVALIGYWAFGNTVEDNILITLSKPKWXXXXXXXXXXXXXXXSYQIYAMPVFDMIETVLVKKLRFPPGLTLRLIARTLYVAFTMFIAITFPFFGGLLGFFGGFAFAPTTYFLPCVMWLAIYKPKRFSLSWLTNWMCIILGVLLMILSPIGGLRQIIMDAKTYQFYS

SEQ ID NO: 5549 - protein, 456 aa, Zea mays
  unsure (1)..(456): unsure at all Xaa locations
  Clone ID: PAT_MRT4577_37648C.1.pep
MGTQAPENYPAEKVQDARSAREKAIDDWLPITSSRNAKWWYSAFHNVTAMVGAGVLSLPYAMSELGWGPGIAVLVVSWVITLYTLWQMVEMHEMVPGKRFDRYHELGQHAFGDRLGLWIVVPQQLVVEVGVNIVYMVTGGKSLKKFHDVLVCGDTGVCEGKDNIKTTYFIMIFASVHFVLSQLPNFNSISGVSLAAAVMSLSYSTIAWGASVHKGRMSGVDYHLRATTTPGKVFGFFGALGDVAFAYAGHNVVLEIQATIPSTPDKPSKKPMWKGVVVAYVVVALCYFPVALIGYWAFGNTVEDNILITLSKPKWLIALANMMVVVHVIGSYQXIYAMPVFDMIETVLVKKLRFPPXLTLRLIARTXYVAFTMFITITFPFLGGLLGFFGGFAFXAPTTYFLPCVMWLAIYKPKRFSLSWXTNWXATILGVLLNNLSPIGGLRQIIMDAKTYQFYS

SEQ ID NO: 5550 - protein, 456 aa, Zea mays
  unsure (1)..(456): unsure at all Xaa locations
  Clone ID: PAT_MRT4577_37650C.1.pep
MGTQAPENYPAEKVQDARSAREKAIDDWLPITSSRNAKWWYSAFHNVTAMVGAGVLSLPYAMSELGWGPGIAVLVVSWVITLYTLWQMVEMHEMVPGKRFDRYHELGQHAFGDRLGLWIVVPQQLVVEVGVNIVYMVTGGKSLKKFHDVLVCGDTGVCEGKDNIKTTYFIMIFASVHFVLSQLPNFNSXISGVSLAXAAVMSLSYSTIAWGASVHKGRMSGVDYHLRATTTPGKVFGFFGALGDVAFAYAGHNVVLEIQATIPSTPDKPSKKPMWKGVVVAYVVVALCYFPVALIGYWAFGSTVEDNILITLSKPKWLIALANMMVVVHVIGSYQIYAMPVFDMIETVLVKKLRFPPGLTLRLIARTLYVAFTMFIAITFPFFGGLLGFFGGFAFAPTTYFLPCVMWLAIYKPKRFSLSWLTNWMCIILGVLLMILSPIGGLRQIIMEAKTYQFYS

SEQ ID NO: 5551 - protein, 72 aa, Zea mays
  Clone ID: PAT_MRT4577_37706C.1.pep
NPNKSIFSEQKHPWAQLIFKMKRGDRNIAPGPHGSVGPNEGGGVSLVVGDPDKLFSDLATGEESYERLGRAL

SEQ ID NO: 5552 - protein, 80 aa, Zea mays
  Clone ID: PAT_MRT4577_37757C.1.pep
PPVRSFRKNIMFVQFDKGAAAANGDKFLPAGGGGSPFVKVSLDGAPYLGKVDLKMFRSFQQLFKGLENIFSFFTIGSCGF

SEQ ID NO: 5553 - protein, 263 aa, Zea mays
  unsure (1)..(263): unsure at all Xaa locations
  Clone ID: PAT_MRT4577_37761C.1.pep
MDPKMTEVTQMFARFKAAYTRNDLDACVTLLSQLKVHLTKFPSLPPSFEQTPNAVEELKLARDIYEHAVVLSVKLEDQDAFERDFCQLKPYYMDTCGIIPPSPEEYPILGLNLLRLLVQNRIAEFHTELELLPVKALEHPCIKHAVELEQSFMEGAYNRVLSARQAVPHETYVYFMDLLAKTVRDEIAGCSEKGYDSLSVSDAKQMLMFSSDQDLHEYITEEHPEWXELKNGRXVFFQKAKESQPXREIPSLQLINXTLSYAR

SEQ ID NO: 5554 - protein, 267 aa, Zea mays
  Clone ID: PAT_MRT4577_37763C.1.pep
MDPKMTEVTQMFARFKAAYTRNDLDACVTLLSQLKVHLTKFPSLPPSFEQTPNAVEELKLARDIYEHAVVLSVKLEDQDAFERDFCQLKPYYMDTCGIIPPSPEEYPILGLNLLRLLVQNRIAEFHTELELLPVKALEHPCIKHAVELEQSFMEGAYNRVLSARQAVPHETYVYFMDLLAKTVRDEIAGCSEKGYDSLSVSDAKQMLMFSSDQDLHEYITEEHPEWEFKNGAVFFQKAKESQPYKEIPSLQLINQTLSYARELERIV

SEQ ID NO: 5555 - protein, 239 aa, Zea mays
  unsure (1)..(239): unsure at all Xaa locations
  Clone ID: PAT_MRT4577_37764C.1.pep
MPVIHCCCYLLIGFRWKTEIAQMLRPHSRLAYTRNDLDACVTLLSQLKVHLTKFPMLSPSFEQTPNAVEELKLARDIYEHAVDLSVKLEDQDAFERDFCQLKPYYMDTCGIIPPSPEEYPILGLNLLRLLVQNRIAEFHTELELLPVKALEHPCIKHAVXLEQSFMEGAYNRVLSARQAVPHETYVYFMDLLAKTVRDEIAGCSEKGYDSLSASDAKQMLMFSSDQDLHEYITDEHPEW

SEQ ID NO: 5556 - protein, 319 aa, Zea mays
  Clone ID: PAT_MRT4577_37835C.1.pep
MAIKRTKAEKKIAYDQKLCQLLEEYTKVLIAVADNVGSKQLQEIRKGLRGDSIVLMGKNTLIRRCIKVHSEKTGNKDFLELSNLLVGNVGLIFTKGDLKEVREEVAKYKVGAPARVGLVAPVDVVVPPGNTGLDPSQTSFFQVLNIPTKINKGTVEIITPVELIKKGEKVGSSESALLAKLGIRPFSYGLQVTSVYEDGSVFSPEVLDLSEEDLIEKFATGVSMVASLSLAISYPTLAAVPHMFINGYKNVLAVAVETDYSYPHADKIKEYLKDPSKFAVAAPVAAGDAGAAAAPKEEEKAAEPEEESDEEMGFSLFDD

SEQ ID NO: 5557 - protein, 179 aa, Zea mays
  Clone ID: PAT_MRT4577_37871C.1.pep
MSRHPITKWAQRSDRVFLTIELPDAKDVKLNLKPEGHFNFSAKGSDDLPYEFDLELFDAVNVEESKAAVAPRTICYLIKKAESKWWPRLLKKEGKAPVFLKVDWDKWQDEDDEDVGFNDFSDMDFSKLDMGGADDDDFEDDEDDVVESANKDEEGGKTEKSNGEEEAAAAAAAAEEVKP

SEQ ID NO: 5558 - protein, 176 aa, Zea mays
  Clone ID: PAT_MRT4577_37872C.1.pep
MSRHPITKWAQRSDRVFLTIELPDAQDVKLNLKPEGHFNFSAKGSDDLPYEFDIELFDAVNVEESKAAIAPRTICYLIKKAKSGWWPRLLKQEGKPPVFLKVDWDKWQDEDDEDAGFNDFGGMDFSKLDIGGADDDDIGDDEDDVVESANKDEEGGKTEESKEEEAAPAAAEEVKP

SEQ ID NO: 5559 - protein, 190 aa, Zea mays
  unsure (1)..(190): unsure at all Xaa locations
  Clone ID: PAT_MRT4577_37945C.1.pep
ETCTLLLPAXINVNQASTKSKFDNXLYGGRHSLPHGLMRATDIMIAGNGAXTXGYCDVRKGXAPTLKQAGARNIGTYIDPICSLQALMKGLQDLTFEDVIXEADILTTTTGNNDITMGDHMRKMNNNAXIVCNIDHYDTEIDMLRLQTYPGDKRITIKPHTDQMVFPETNTGIIVHAEGLLMNLRCATGH

SEQ ID NO: 5560 - protein, 120 aa, Zea mays
  unsure (1)..(120): unsure at all Xaa locations
  Clone ID: PAT_MRT4577_37965C.1.pep
PFTHLAALTSAFYLQPTQXPFSQXPXASPHQFFPLTTLAALNSPAYLPTPHLXPFTQLAGVSPAPFLIHPQLLPFSQHAAPNAGPLLQPPQLXPFTPLAFPPPAAFSQHPLIGGPSFSFL

SEQ ID NO: 5561 - protein, 187 aa, Zea mays
  unsure (1)..(187): unsure at all Xaa locations
  Clone ID: PAT_MRT4577_37967C.1.pep
SPCLLQQSSAXLHQSPXAHLFAQHIRAQQXPHLVXAPLXXYSQPQQFFPFTTLAALNSASYLPTTTXPFTQXPXASPQQFFPFTHLAALNSPAYSQQPHLXPFTQLAGVTPAPFLTHPQLSPFSQHAAPNAGPLLQLPQLXPFTPXPPTNPAAFSPHPLIGGPSFRFLMSYSLNNKVFCLMFVASQK

SEQ ID NO: 5562 - protein, 53 aa, Zea mays
  Clone ID: PAT_MRT4577_38034C.1.pep
MSARIFFLLMLLGLSASAATATIFPQCSQSPIASLLPPYLSPVLSSLCQNPIL

SEQ ID NO: 5563 - protein, 103 aa, Zea mays
  unsure (1)..(103): unsure at all Xaa locations
  Clone ID: PAT_MRT4577_38142C.1.pep
QQQQRPCSQQQGADPQQFLPSNQQAALNSPAEQQQQQXRPHSQQAGVSPATFLRQPQLLPFNQHEAPNAGTLXQLQQXLPFNQHAFTNPAAFHQQPIIGGALF

SEQ ID NO: 5564 - protein, 116 aa, Zea mays
  Clone ID: PAT_MRT4577_38299C.1.pep
GSPGFGLGGERIYMAAKDVEYRCFVSGLTWATDDHSLHNAFSTYGEVLKSKIIHRSARRMRSRGFGFDTFSTDEAMRNAFDGMNRKELDGRNITLYEAHSRRVRVSCRGCGYGGGR

SEQ ID NO: 5565 - protein, 278 aa, Zea mays
  Clone ID: PAT_MRT4577_38506C.1.pep
SFQIGLPAKFTIFNFGAQKDVSNWGLFFCVAVGLWAGLIIGFVTEYYTSNAYSPVQDVADSCRTGAATNVIFGLALGYKSVIIPIFAIAVSIYVSFSIAAMYGIAMAALGMLSTMATGLAIDAYGPISDNAGGIAEMAGMSHRIRERTDALDAAGNTTAAIGKGFAVGSAALVSLALFGAFVSRAGVKVVDVLSPKVFIGLIVGAMLPYWFSAMTMKSVGSAALKMVEEVRRQFNTIPGLMEGTAKPDYATCVKISTDASIREMILPGALVMLTPLIV

SEQ ID NO: 5566 - protein, 130 aa, Zea mays
  unsure (1)..(130): unsure at all Xaa locations
  Clone ID: PAT_MRT4577_38545C.1.pep
MKGDKSKGAAKDDAKLXVKSKGTENPAKARKGKVAKDPNKPKRATSAFCTFMEEFRKVFXETNPKNKPAAGEEEVAGDRRKSRRETAKAPYVSKAXNTLKLQXNKAIKTYNKGERTANKKAPAKEQQEAD

SEQ ID NO: 5567 - protein, 106 aa, Zea mays
  Clone ID: PAT_MRT4577_38578C.1.pep
MAASDVEYRCFGGGLAWATNNQSLENAFPSYGEILDYKVITDRQTARSRRFGFVTLSCENSMLDAINNMNGKDLDGRNITVNQTHSHAGGRGTGGYSRKTERRRRL

SEQ ID NO: 5568 - protein, 205 aa, Zea mays
  Clone ID: PAT_MRT4577_38644C.1.pep
MVFVKNQKTRAYSKRFQVKFKRRRQGKTDYRARLRLTNQDKNKYNTPKYRFVVRFTNKDVTAQIVYATIAGDIVMAAAYSHELPRYGLEVGLTNYAAAYCTGLLLARRVLKCRDLDQEYEGNVEATGEDFSVEPADERRPFRALLDVGLIRTTTGNRVFGALKGALDGGLDIPHSDKRFAGFKKDEKQLDAEIHRKYIYGGHVAD

SEQ ID NO: 5569 - protein, 389 aa, Zea mays
  Clone ID: PAT_MRT4577_38702C.1.pep
MWGERTHHKHWHQGHGTSGNSNNKKHDKRQPKFIPDNYSSVDEVTTALREAGLESSNLILGIDFTKSNEWSGRHSFRRKSLHAINGTPNPYEQAISIIGRTLSPFDDDNLIPCFGFGDASTHDHSVFSFYPENRPCRGFEEVLVRYRQIVPHLNLSGPTSFAPLIYAAISVVENSNWQYHVLVIIADGQVTAANINDGRLSPQEQATIQAIVDASYYPLSIVMVGVGDGPWDAMQHFDDCIPERAFDNFQFVNFTGIMSTSKDMSKKEAAFALAALMEIPSQYKATQGLRPPEKQAQRIGSPRILPPPNKVLENDNAAAAASHPPQTASSKSTGIGKSAADEQVCPICLTNPKDMAFQCGHLTCKECGPTLSTCPLCRALITMRVRLYS

SEQ ID NO: 5570 - protein, 93 aa, Zea mays
  Clone ID: PAT_MRT4577_38703C.1.pep
GTERWGPRGSYILFATVMFTLVQRVYLPSSSLVVPILVFDCKGPFCQVVMLGSFSASANPCINQHGLWIDGCFYSCQDLFLINSKEKMVLLGA

SEQ ID NO: 5571 - protein, 107 aa, Zea mays
  unsure (1)..(107): unsure at all Xaa locations
  Clone ID: PAT_MRT4577_3890C.1.pep
GKELDGRNITANQAQSRGGGGGGGGYGGGRXGSSSYGGRRRDRGYGGCGSYCXRREGGGCGYXRRGGYEGRREGGGGGYVLQCMLRLQVLMCRPMLASAEVYYLSIV

SEQ ID NO: 5572 - protein, 82 aa, Zea mays
  unsure (1)..(82): unsure at all Xaa locations
  Clone ID: PAT_MRT4577_39022C.1.pep
MAEEKHHHHHLFHHKKDEEQEEQLAGGGYGESFEYRGGGVXEVVSTDKNEYEEXKEEKQYKHKQXXXEAXAXXXXAXXXYXK

SEQ ID NO: 5573 - protein, 111 aa, Zea mays
  unsure (1)..(111): unsure at all Xaa locations
  Clone ID: PAT_MRT4577_39039C.1.pep
MAAKIFCFLMLVGLSASVGTATIFPQCSQAPIASLLSPYLLTTVSLMGETPIGXPFRIQPGIATSILPLLPLVLQQPXALLQELPLGHLGGQNIRAQQLQQLVLANLAAYS

SEQ ID NO: 5574 - protein, 350 aa, Zea mays
  Clone ID: PAT_MRT4577_39086C.1.pep
MAMASTYAPGGGARALAQGRCRVRGPAGLGFLGPSKAAGLPRPLALARRMSSPVAVGARLRCAASSSPAAARPATAPRFIQHKKEAFWFYRFLSIVYDHVINPGHWTEDMRDDALEPADLFSRHLTVVDVGGGTGFTTLGIVKHVNPENVTLLDQSPHQLDKARQKEALKGVTIMEGDAEDLPFPTDSFDRYISAGSIEYWPDPQRGIKEAYRVLRFGGLACVIGPVYPTFWLSRFFADMWMLFPKEEEYIEWFKKAGFRDVKLKRIGPKWYRGVRRHGLIMGCSVTGVKRERGDSPLELGPKAEDVSKPVNPITFLFRFLVGTICAAYYVLVPIYMWIKDQIVPKGMPI

SEQ ID NO: 5575 - protein, 128 aa, Zea mays
  Clone ID: PAT_MRT4577_3916C.1.pep
HASGEVPSHNRIMWEYLHVITGRSAVIVGIVALFTGMKHLGHRYDSENVEELTWALMLWVLSVIVVVLCLEYKEVKRRIGDRSARGHWVLGNTEEEDSVDLLHPDGAARNSESSATGVMEVQLEPLTR

SEQ ID NO: 5576 - protein, 107 aa, Zea mays
  unsure (1)..(107): unsure at all Xaa locations
  Clone ID: PAT_MRT4577_39173C.1.pep
CKREQLLVTQLCYADTQRVRPFKPVAAIXSHVYLQQQLLLPFSQLASVSPHAFLTQPQLFPFYQHVAPSVGTXLQLQQLLPFNQLALTNPLAFYLQPIIGGASFSFL

SEQ ID NO: 5577 - protein, 131 aa, Zea mays
  unsure (1)..(131): unsure at all Xaa locations
  Clone ID: PAT_MRT4577_39195C.1.pep
VLGTLGAYXKQREFFPFTQRGALNFAVYLQHQLPFGQLVVASPQHFFPFTQLAALNFAVFLQQQQLPPFSQLVDVSPVAFLTQHQLLPFYLHVGPNAGPLLQLQQLLPFNQLVLTNPTGFYQQPIIGGALF

SEQ ID NO: 5578 - protein, 686 aa, Zea mays
  Clone ID: PAT_MRT4577_39279C.1.pep
MAAAEARGGEFPVGMKVLVVDDDPTCLVVLKRMLLECRYDVTTCPQATRALTMLRENRRGFDVIISDVHMPDMDGFRLLELVGLEMDLPVIMMSADSRTDIVMNGIKHGACDYLIKPVRMEELKNIWQHVIRKKFNENKDHEHSGSLDDTDRNRPTNNDNEYASSANDGGDGSWKSQRKKREKEDDETDLENGDPSSTSKKPRVVWSVELHQQFVNAVNHLGIDKAVPKKILELMNVPGLTRENVASHLQKFRLYLKRIAQHHAGIPHPFVAPVSSANVAPLGGLEFQALAASGQIPPQALAALQDELLGRPTSSLALPGRDQSSLRVAAIKGNKHHEEREIAFGQPIYKCQNNAYGAFPQNSPAVGGLQPFAAWPNNKVGMTDSTSTLGNVGNSQNSNMLLHELQQQPDTLLLGTLHNIDAKPSGVVMPSQSLNTFPASEGISPNQNPLIIPSQPPSFVSSIPPSMKHESLLGLPSTSTSLLGGLDMVNQASTSQALISSHGTNLPGLMNRSSNAIPSPGISNFQSGNIHYVVNQNAMGVSSKPPGVLKTESTDSLSCSYGYIGGSTSVDSGLFSSQSKNPQYGLLQNQNDVNGSWSPSQDFDSFGNSLGQGHPGTTSSNFQSSALGKLPDQGRGRNHGFVGKGTCIPSRFAVDEVESPTNNLSHSIGNSGDIVNHDIFGFSGHM

SEQ ID NO: 5579 - protein, 713 aa, Zea mays
  unsure (1)..(713): unsure at all Xaa locations
  Clone ID: PAT_MRT4577_39280C.1.pep
MAAAEARGADFPVGMKVLVVDDDPTCLVVLKRMLLECRYDVTTCPQATRALTMLRENRRGFDVIISDVHMPDMDGFRLLELVGLEMDLPVISQYIFLLVFLFSMXMWCWNTSEIIADEIAVMSADSRTDIVMKGIKHGACDYLIKPVRMEELKNIWQHVVRKKFNGNKDHEHSGSLDDTDRNRPTNNDNEYASSANDGGDGSWKSQKKKREKEDDETDLESGDPSTSKKPRVVWSVELHQQFVNAVNHLGIDKAVPKKILELMNVPGLTRENVASHLQKFRLYLKRIAQHHAGIPHPFVASASSAKVAPLGGLEFQALAASGQIPPQALAALQDELLGRPTSSLALPGRDQSSLRLAAIKGNKPHGEREIAFGQPIYKCQNNTYGAFSQSSPAVGGLPSFAAWPNNKLGMTDSSNTLGNVGNSQNSNMLLHELQQQPDTLLSGTLHNIDVKPSGVVMPSQSLNVFPASEGISHNQNPLVIPSQSPSFLASVPPSMKHESLLGSPSPSTSLLGGLDMVNQASTSQPLISSHGANLPGLMNRSSNAMPSPGISNFQSGNIPYVVTQNAMGVSSRPPGVLKTECTESLTHSYGYIGGSTSVDSSLLSSQAKNPQYGLLQSQNDVSSSWLSSQDFDSFGNSLGQGHPGSTSSSFQSSALGKLPDQGRGRNHGFVGKGTCIPSRFAVDEVGSPTNLSHNIVNSGDIVNPDIFGFSGQM

SEQ ID NO: 5580 - protein, 275 aa, Zea mays
  Clone ID: PAT_MRT4577_39495C.1.pep
LPDMWGFASNAWASGLGKRSPPNCTSSSAACSDDEASSCTSREEGLECPICWESFNIVENVPYVLWCGHTLCKNCVLGLQWAVIKVPTVPMQLPFFVCCPWCNLLSLRILYKGNLTFPRKNYFLLWMVEGMNGERARSRPATHSEQHTPWLSSSSRANGNAGCSNPTRRHLPLPPPVDTTSPTNANHANHGVPVPLLNAERVQASLRKSLSFLVHLTSKFPLVFIFLLIVLYAIPASAAVLLLYILITVLFALPSFLILYFAYPSLDWLVREIFA

SEQ ID NO: 5581 - protein, 414 aa, Zea mays
  unsure (1)..(414): unsure at all Xaa locations
  Clone ID: PAT_MRT4577_39766C.1.pep
MPRDGAQAAPPPERGEMDEVVEADPDTEAEDQEERWARLLPELLSDVVRRVEASGGERWPARKDVVSCACVCRRWREAAVSVVRPPAESGKITFPSSLKQVDXWLPLYGVISGFDTYRPFRYLGYSLRSFXWPIQCRSVFYLTSVYLNLTPFLKTQPGPRERPMQCFIKRNKNNSTFYLYLGFTSSPVDKGKFLMAARRFRRGPHTEYIISLDAEDLSQGSNAYMGKLRSDFWGTNFKIYDSKPPYDGAKASSSRSSRRFGSRRISPQVSAGNYEVGQVSYKYNLLKSRGPRRMYCTLECPSAQETWENSLKTKFRRPLGPTTLRNKAPRWHEHLQCWCLNFHGRVTVASVKNFQLVAAADPSEPTTNVDDETVLLQFGKVDSDMFTMDYRQPLSAFQAFAISLSSFGTKLACE

SEQ ID NO: 5582 - protein, 358 aa, Zea mays
  Clone ID: PAT_MRT4577_39767C.1.pep
MPRDGAQAAPPPERGEMDEVVEADPDTEAEDQEERWARLLPELLSDVVRRVEASGGERWPARKDVVSCACVCRRWREAAVSVVRPPAESGKITFPSSLKQPGPRERPMQCFIKRNKNNSTFYLYLGFTSSPVDKGKFLMAARRFRRGPHTEYIISLDAEDLSQGSNAYMGKLRSDFWGTNFKIYDSKPPYDGAKASSSRSSRRFGSRRISPQVSAGNYEVGQVSYKYNLLKSRGPRRMYCTLECPSAQETWENSLKTKFRRPLGPTTLRNKAPRWHEHLQCWCLNFHGRVTVASVKNFQLVAAADPSEPTTNVDDETVLLQFGKVDSDMFTMDYRQPLSAFQAFAISLSSFGTKLACE

SEQ ID NO: 5583 - protein, 357 aa, Zea mays
  Clone ID: PAT_MRT4577_39768C.1.pep
MPRHTAPAAPPSERGEMDEVVEADPDTEAEDQEERWATLLPELLSDVLLRVEASGAEQWPARKDIVSFACVCRWWRKAAVSVVRPPAESAKITFPSSLKQPGPRENPMQCFIMRNKNSTFYLYLGFTSSPVYKGKFLMAARRLRRGPHTEYIISLDAEDLSQGSNSYMGKLRSDFWGTNFKIYDSKPPYDGAKASSSRSSRRFGSRRISPQVSSGNYEVGQVSYKYNLLKSRGPRRMNCTLECPSAQETWENSLKTKFRRPLGPTTLRNKAPRWHEQLQCWCLNFHGRVTVASVKNFQLVTAAGPSDPTSNVDEETVLLQFGKVDDDIFTMDYRQPLSAFQAFAISLSSFGNKLACE

SEQ ID NO: 5584 - protein, 133 aa, Zea mays
  unsure (1)..(133): unsure at all Xaa locations
  Clone ID: PAT_MRT4577_398C.1.pep
ANLGGYXKQQQFFPFNQLSALNFGFYLQQQQVPFRQVPGAYPQQFFPFNQLAALDFPGYFQQQQLLPFSQVGGVRPGTFLKQPQVVPVYQDGGPNGGTLLQLQQMVPINQPGLTNPAGVYPQPIIGGALFSFL

SEQ ID NO: 5585 - protein, 98 aa, Zea mays
  unsure (1)..(98): unsure at all Xaa locations
  Clone ID: PAT_MRT4577_40046C.1.pep
PFSQLCGAYPQQFVPFNQRAAWSSPVYFEQQLLLTFSQLAGVSPGTLLTQHRWLQFYQHMERNHGTLLQLHQLVPFNQLXLTNPTAFYQQPVIGGALF

SEQ ID NO: 5586 - protein, 491 aa, Zea mays
  unsure (1)..(491): unsure at all Xaa locations
  Clone ID: PAT_MRT4577_40235C.1.pep
MVLSKAVSESDMSVHSTFASRYVRSSLPRYRMPENSIPKEAAYQIINDELMLDGNPRLNLASFVTTWMEPECDKLIMAAINKNYVDMDEYPVTTELQNRCVNMIAHLFNAPLGESETAVGVGTVGSSEAIMLAGLAFKRRWQNKRRAEGKPFDKPNIVTGANVQVCWEKFARYFEVELREVKLRDGYYVMDPEKAVEMVDENTICVAAILGSTLNGEFEDVKLLNDLLQAKNRETRWETPIHVDAASGGFIAPFLYPDLEWDFRLPLVKSINVSGHKYGLVYAGIGWCIWRSKEDLPEELIFHINYLGADQPTFTLNFSKGSSQVIAQYYQLIRHGFEGYRNIMENCHENAMVLKEGLEKTGRFDIVSKDEGVPLVAFSLKDRSRHDEFEISDMLRRFGWIVPAYTMPPDAQHVTVLRVVIREEFSRTLAERLVLDIEKVMYQLDALPSRLXAPSPGGAAAQEKDXELETQRSVTEAWKKFVLAKKTNGVC

SEQ ID NO: 5587 - protein, 905 aa, Zea mays
  Clone ID: PAT_MRT4577_40273C.1.pep
HELCSSSPVHPAGAGRALSTWRSPTVTAAARVFAGPFSTSSLHPSSATSTHQQNQLDRLIHLSIEGSRFYRKAYNGWFSRLSTEHYPAASINMPQYMRSGWHLFLMLHSRSPELVKDPVSCIHGLVGVLAILLINVPAKLRSFTIEGSSHLIKQTEKGVDLIASLCHNYHTSEERLKEMLHKSHNAIEDIFHMKALSASECKPENLDKIDTDDLMYFKGLIDMECFQSNLEKMEKLCNSNSCKGELDFKSILINNDYIPYDENSTGDSTNLGHSKCAFETLASPTKTIKNMLTVPSSPLSPATGGSVKIVQMTPVTSAMTTAKWLREVISSLPDKPSSKLQQFLSSCDRDLTNAVTERVSIVLEAIFPTKSSANRGVSLGLNCANAFDIPWAEARKVEASKLYYRVLEAICRAELQNSNVNNLTPLLSNERFHRCLIACSADLVLATHKTVIMMFPAVLESTGLTAFDLSKIIENFVRHEETLPRELKRHLNSLEEQLLESMAWEKGSSLYNSLIVARPSVASEINRLGLLAEPMPSLDDLVSRQNVRIEGLPATPSKKRAAGPDDNADPRSPKRSCNESRNTVVERNLQTPPPKQSHMVSTSLKAKCHPLQSTFASPTVCNPVGGNEKCADVTIHIFFSKILKLAAIRIRNLCERVQCVEQTERVYNVFKQILEQQTTLFFNRHIDQLILCCLYGVAKVCQLELTFREILNNYKREAQCKPEVFSSIYIGSTNRNGVLVSRHVGIITFYNEVFVPAAKPFLVSLISSGTHPEDKKNASGQIPGSPKPSPFPNLPDMSPKKVSASHNVYVSPLRQTKLDLLLSPSSRSFYACIGEGTHAYQSPSKDLAAINSRLNYNGRKVNSRLNFDMVSDSVVAGSLGQINGGSTSDPAAAFSPLSKKRETDT

SEQ ID NO: 5588 - protein, 436 aa, Zea mays
  unsure (1)..(436): unsure at all Xaa locations
  Clone ID: PAT_MRT4577_40303C.1.pep
MSLKSIVRELKEMRDGIGSMSRRGGSGSDGRVGHGRSGSRHSWPSLWAEQQQSHXGPGPWVPGPEGPHHQHQGRWANLPPELLLDVIQRVESSEATWPARRQVVACAAICRSWREVTKEVVKTLEECGRITFPISLKQPGPREMPVQCFVRRERATSTYLLYLGLSPSMNVEKDKLLLAARKVRRATRTYFVISLVSDDFSHSSSTYVGKLKPNFLGTKFTIFDSQPPPDAVVLPNNKTSKRQSKQVSPRLPLGNYNVATVTYELTVLRNRGPRRMQCTMHSIPAECIQEGGKAPTPTGAIQSLDEPVSSTLPSAKGKEVAVEFSSTSLSADLSGPACVNGTPLVLKNKAPRWHEQLQCWCLNFRGRVTVASVKNFQLVASVDPSLNIPAAEQEKVILQFGKIGKDIFTMDYRYPLSAFQAFAICLTSFDTKPACE

SEQ ID NO: 5589 - protein, 66 aa, Zea mays
  unsure (1)..(66): unsure at all Xaa locations
  Clone ID: PAT_MRT4577_40351C.1.pep
ATRGALWTLRYLKLLRLVRHENVIAVKDVMMPIHTRSSKDVYXRYELMDTDLHHIIKSPQGLSNDH

SEQ ID NO: 5590 - protein, 494 aa, Zea mays
  Clone ID: PAT_MRT4577_4043C.1.pep
MPSGSAFSGSVNLKHVKLGYQYLVNHFLTLLLVPVMAATALELARLGPGELLSLWRSLELDLVHILCSAFLVVFVGTVYVMSRPRPVYLVDYACYKPPASCRVPFATFMEHTRLISDDDKSVRFQTRILERSGLGEDTCLPPANHYIPPNPSMEASRAEAQLVIFSAIDDLVRRTGLKPKDIDILVVNCSLFSPTPSLSAMIINKYKLRSNIRSFNLSGMGCSAGLISIDLARDMLQVHPNSNALVVSTEIITPNFYQGSRRDMLLPNCLFRMGAAAILLSNRRREARRAKYRLVHVVRTHKGSDDRAYRCVYEEEDEQGFSGISLSKELMAIAGDALKSNITTIGPLVLPMSEQLLFFFRLVGRKLVNKGWRPYIPDFKLAFEHFCIHAGGRAVIDELQKNLQLSPRHVEASRMTLHRFGNTSSSSLWYELAYIEAKGRMRRGDRVWQIGFGSGFKCNSAVWKCLRSIKTPTNGPWDDCIHRYPVDVPEVVKL

SEQ ID NO: 5591 - protein, 101 aa, Zea mays
  Clone ID: PAT_MRT4577_40513C.1.pep
MVSKVFCLHMLLELSTGADTATIFPKCSQAPIATIIAPYLSPPLSSACENLILQPYRIQQAITVGVLPLSPLFLQQSSALLHQLPLVHLMAQNIKAQQLQQ

SEQ ID NO: 5592 - protein, 493 aa, Zea mays
  unsure (1)..(493): unsure at all Xaa locations
  Clone ID: PAT_MRT4577_40527C.1.pep
MDFFSEYGGASQYQIQEVIGKGSYGVVAAAIDSHTGERVAIKKINDIFGNVSDAARILREIKLLRLLRHPNIVQIKHIMLPPTRRDLKPXTYYVVFELMESDLHQVIKANDNLTPEHHRFFLYQLICALKYMHSAHVFHRDLKPRNILANSDSKLKICDFGLARASFNDSLSAIYWTDYVATRWYRAPELCGSFFSSYTPAIDIWSIGCIFAEVLTGTPLFPGRNVVHQLDLITDLLGTPSFRSLSQIHSDKAREYLLGMPRKRPIPFSHKFRNADPLALRLLERLLAFDPKDRPTAEEALADPYFSGLSKLELEPSAQPISKVDFEFEGRKLTKAGVREMIYREILEYHPQMLQEYIEGGDQIHFLYPSGVDRFQRQFAHLEENYRRGVASTPPRRQPTSLPRERVCSSEDGHSQDSDSEEQRAASYVARTTISPPRSQEEGGKLQPAYQSAAAAADSCAKSYLKGAASISSASRRTIKGDNGRKEKESPRL

SEQ ID NO: 5593 - protein, 41 aa, Zea mays
  Clone ID: PAT_MRT4577_40589C.1.pep
HHGLRNLSASINHPSQTCSSISITLPPKRQGGHRNARAIRG

SEQ ID NO: 5594 - protein, 115 aa, Zea mays
  Clone ID: PAT_MRT4577_40836C.1.pep
SLVTLWKREDRGAAYLRMASATRFHPRLAMVAQTGVLSFTAADEAELLVMRGDLAASSRCGGGSAGDGGRYRGVPVSILVREMNGTCRGLRLDGGHRSGSVALSIANNTTHYREL

SEQ ID NO: 5595 - protein, 476 aa, Zea mays
  unsure (1)..(476): unsure at all Xaa locations
  Clone ID: PAT_MRT4577_40856C.1.pep
MAGGFRVLHLVRPFLAFLPEVQSADRKIPFREKVIYTVISLFIFLVCSQLPLYGIHSTTGADPFYWMRVILASNRGTVMELGITPXIVTSGMVMQLLVGSKIIEVDNSVREDRALLNGAQKLLGILIAIGEAVAYVLSGMYGSVSQLGTGNAILIILQLFFAGIIVICLDELLQKGYGLGSGISLFIATNICENIIWKAFSPTTINSGRGAEFEGAVIALFHLLITRSDKVRALREAFYRQNLPNGDHLLATVLVFLIVIYFQGFRVVLPVRSKNARGQQGSYPIKLFYTSNMPIILHSALITNLYFISQLLYRKYSGNFLVNLLGIWKESEYSGHSIPVGGLAYYVTAPSSMADILANPFHALFYVVFMLSACALFSKTWIEVSGSSAKDVAKQLKEQQMVMPGHRESNLQKELNRYIPTAAAFGGVCIGALTVLADFMGAIGSGTGILLAVTIIYQYFETFEKERATELGFFGF

SEQ ID NO: 5596 - protein, 102 aa, Zea mays
  unsure (1)..(102): unsure at all Xaa locations
  Clone ID: PAT_MRT4577_4090C.1.pep
MASKVFXLLMLLGIFVSAATATNFAHCLQALIAFLLTSYLSPAVSLVSENSILKPYKMQQAIASDIXNIXPLILQQSYDLLQLLPMERLLAQNIRAHQLLRL

SEQ ID NO: 5597 - protein, 105 aa, Zea mays
  unsure (1)..(105): unsure at all Xaa locations
  Clone ID: PAT_MRT4577_40967C.1.pep
MAASDXVECRWFLGGLTWATDDHSLHNSLSTYGEVLXSKIMLDRETQRSPGFSFVTFYTEEAMRNTIKVMNRNELDGRNMTDNEAHSLGGRGGGGGGYGGSRGGG

SEQ ID NO: 5598 - protein, 237 aa, Zea mays
  Clone ID: PAT_MRT4577_40999C.1.pep
MAAAVVDDAGMDAVQKRLMFEDECILVDEQDNVVGHESKYNCHLMEKIDSENLLHRAFSVFLFNSKYELLLQQRSATKVTFPLVWTNTCCSHPLYRESELIQENYLGVRNAAQRKLLDELGIPAEDAPVDQFTPLGRMLYKAPSDGKWGEHELDYLLFIVRDVKVQPNPDEVADVKYVNRDELKELIRKADAGEDGVKISPWFRLVVDNFLMGWWDHVEKGTLGEAVDMETIHKLKE

SEQ ID NO: 5599 - protein, 150 aa, Zea mays
  Clone ID: PAT_MRT4577_41025C.1.pep
MAAPVVDAEYLRQVDRARRALRALIASKGCAPIMLRLAWHDAGTYDVNTRTGGANGSIRYEEEYTHGSNAGLKIAIDLLEPIKAKHPKITYADLYQLAGVVAVEVTGGPTVEFIPGRRDSSVCPREGRLPDAKKGAPHLRDIFYRMGLTD

SEQ ID NO: 5600 - protein, 829 aa, Zea mays
  unsure (1)..(829): unsure at all Xaa locations
  Clone ID: PAT_MRT4577_41083C.1.pep
PRVRARLPLSRIVPISPNELNLYRIVIVLRLIILCFFFQYRITHPVEDAYGLWLVSVICEVWFALSWLLDQFPKWYPINRETYLDRLALRYDREGEPSQLXAPIDVFVSTVDPLKEPPLITGNTVLSILAVDYPVDKVSCYVSDDGSAMLTFEALSETAEFARKWVPFCKKHNIEPRAPEFYFARKIDYLKDKIQPSFVKERRAMKRECEEFKVRIDALVAKAQKIPEEGWTMADGTPWPGNNPRDHXGMIQVFLGHSGGLDTDGNELPRLVYVSREKRPGFQHHKKAGAMNALIRVSAVLTNGAYLLNVDCDHYFNSSKALREAMCFMMDPALGRKTCYVQFPQRFDGIDLHDRYANRNIVFFDINMKGLDGIQGPVYVGTGCCFNRQALYGYDPVLTEADLEPNIIIKSCCGGRKKKDKSYIDSKNRDMKRTESSAPIFNMEDIEEGFEGYEDERSLLMSQKSLEKRFGQSPIFIASTFMTQGGIPPSTNPGSLLKEAIHVISCGYEDKTEWGKEIGWIYGSVTEDILTGFKMHARGWISIYCMPLRPCFKGSAPINLSDRLNQVLRWALGSVEILLSRHCPIWYGYNGRLKLLERLAYINTIVYPITSIPLVAYCVLPAICLLTNKFIIPAISNYAGAFFILLFASIFATGILELRWSGVGIEDWWRNEQFWVIGGTSAHLFAVFQGLLKVLAGIDTNFTVTSKATDDDGDFAELYVFKWTTLLIPPTTVLVINLVGIVAGVSYAINSGYQSWGPLFGKLFFAIWVILHLYPFLKGLMGKQNRTPTIVIVWSVLLASIFSLLWVKIDPFISPTQKALSRGQCGVNC

SEQ ID NO: 5601 - protein, 229 aa, Zea mays
  Clone ID: PAT_MRT4577_41105C.1.pep
AARAGGRVFFASPDHYLKHQTVYNANELADLVEKKKKMRNWLDYYQNKLERKSKRPTTKTGFLGCFGSEVDAIDHCKSEIEKIGKEEAEERKKVMKDPKSIMPAAFVSFRSRWGAAVCAQTQQTSNPTLWLTEWAPEPRDVYWSNLSIPFVSLTVRRLIIGVAFFFLNFFYVIPIAFVQTLANLEGIEKALPFLKPLIESPPIKSFIQGFLPGLAPKIFLIVLPTILMY

SEQ ID NO: 5602 - protein, 78 aa, Zea mays
  unsure (1)..(78): unsure at all Xaa locations
  Clone ID: PAT_MRT4577_41116C.1.pep
MACATELKFFFLPKKSEWGATRQAGAPRPTTGFMVERAFVYADELGKTVKTIAFSGRSILATDXSXNATCGKRMAIIV

SEQ ID NO: 5603 - protein, 200 aa, Zea mays
  unsure (1)..(200): unsure at all Xaa locations
  Clone ID: PAT_MRT4577_41145C.1.pep
RTRHQPEASGCENPMLXAYRIHQAXAAGILPLSPLLLQQSSALLQQPPVDACIVXRNIRAQHLPQLALAYRAVYSQQQQFLPFNRLAALNCASYLQQHQLPFSQLPGAYPQXFVTFNQLXVLNSPAYLQQQQLLPFSQLAGVSPGTFLTQPQSMPIYQRXAPNAGTXLLQLQQLLPFNQRALTNLAVIYQQPIIGXGALF

SEQ ID NO: 5604 - protein, 31 aa, Zea mays
  Clone ID: PAT_MRT4577_41162C.1.pep
VFKDCKILVCPQCYVLRSLKDKYMRFMACGA

SEQ ID NO: 5605 - protein, 156 aa, Zea mays
  unsure (1)..(156): unsure at all Xaa locations
  Clone ID: PAT_MRT4577_4155C.1.pep
MSEEKHHHFFNHHKKDEEQPAGEYGYSETEVVTATGEGEYERYKKEEKEHKHKQHLGEGGAIGAGAFALYYKHXANKDPEHAHRHRITEEDNAAEGDGAGEYIFHGHHXEKKKDHKERQGRIADEKKHHPLFGMTEGPRGSITQLASSGARNHAPV

SEQ ID NO: 5606 - protein, 65 aa, Zea mays
  Clone ID: PAT_MRT4577_41589C.1.pep
VIVCWGLGNRAWAGRGGAEAGHVVGDGEEGGALRSGGQAVSACFILVIRPEQRQHPPPCIDPDAW

SEQ ID NO: 5607 - protein, 78 aa, Zea mays
  Clone ID: PAT_MRT4577_42217C.1.pep
VVLTRVRTPRDSHQEYTVSRDSRHASRIQADRRRDTHLQDGGRRLHRMHGFRQLQRSPAQEQHQAPSDQLYAWGVGSR

SEQ ID NO: 5608 - protein, 40 aa, Zea mays
  Clone ID: PAT_MRT4577_42224C.1.pep
HEIVGNILHCSSLIRSRFWMILRASTLITVVQTCHTSNRY

SEQ ID NO: 5609 - protein, 205 aa, Zea mays
  unsure (1)..(205): unsure at all Xaa locations
  Clone ID: PAT_MRT4577_42323C.1.pep
RLALSVENTSSGREYKVKDLSQADFGRLEIELAEVEMPGLMACWGEFGPSKPFAGARISGSLHMTIQTAVLIETLTALGAEVRWCSCNIFSTQDHAAAAIARDSAAVFAWKGETLEEYWWCTERCLDWGEAGGPDLIVDDGGDATLLIHEGVKVEEDYEKTGKIPDPESTDNAEFKIVLTIIRDGLKGDXQEYRKMNDRLVGVSE

SEQ ID NO: 5610 - protein, 461 aa, Zea mays
  Clone ID: PAT_MRT4577_42325C.1.pep
TDVAAVPPVVALAADGQAGAEEIVLQPIKEISGTVKLPGSKSLSNRILLLAALSEGTTVVDNLLNSEDVHYMLGALRTLGLSVEADKAAKRAVVVGCGGKFPVEDAKEEVQLFLGNAGTAMRPLTAAVTAAGGNATYVLDGVPRMRERPIGDLVVGLKQLGADVDCFLGTDCPPVRVNGIGGLPGGKVKLSGSISSQYLSALLMAAPLALGDVEIEIIDKLISIPYVEMTLRLMERFGVKAEHSDSWDRFYIKGGQKYKSPKNAYVEGDASSASYFLAGAAITGGTVTVEGCGTTSLQGDVKFAEVLEMMGAKVTWTETSVTVTGPPREPFGRKHLKAIDVNMNKMPDVAMTLAVVALFADGPTAIRDVASWRVKETERMVAIRTELTKLGASVEEGPDYCIITPPEKLNVTAIDTYDDHRMAMAFSLAACAEVPVTIRDPGCTRKTFPDYFDVLSTFVKN

SEQ ID NO: 5611 - protein, 84 aa, Zea mays
  Clone ID: PAT_MRT4577_42338C.1.pep
PRVRPRVRARDNKKTRIIPRHVLLAIRNDEELGKLLAGVTIAHGGVLPNINPVLLPKKVAEKAASGGSKEAKSPKKAAKSPKKA

SEQ ID NO: 5612 - protein, 131 aa, Zea mays
  unsure (1)..(131): unsure at all Xaa locations
  Clone ID: PAT_MRT4577_42475C.1.pep
MAYGIALKFSFLSKKTEWGATRQVAEPRPTTVFMVVRASGYPDELVKTVKTIASAGRDILSMDESNATCGKRLASIVLENTEANRQAYRTLLVTAPDLGXYISGAILFEETLHQSDVDGRMIVYMLVEQGI

SEQ ID NO: 5613 - protein, 181 aa, Zea mays
  Clone ID: PAT_MRT4577_42487C.1.pep
MSTTEDERSGAAAEAGGGEEERRERSVGLMAGLVDRAKGFVVEKVAQIPKPEAALDRVSFQSISREGVELHSHVDVSNPYSHRIPICEITYTFKSAGKVIASGMMPDPGWIAASGSTKLELPVKVPYDFILTLMKDLGGDWDIDYLLEVGLTIDLPVIGAFTIPLTTEGEIKLPTFRDLLF

SEQ ID NO: 5614 - protein, 143 aa, Zea mays
  unsure (1)..(143): unsure at all Xaa locations
  Clone ID: PAT_MRT4577_42542C.1.pep
SSFHYPCSISSCLLHLFHLKKDEEQLAVGGYAXSSEYSXATLTELVSSAENEYYQYKKQXKEHKHNQHLGESGAIAAGAFALYXKHEANKDPQHAHHRKIEEEVPSSSSVGSVGFAFYERHQKKKDHKQSKQAVGEKKHHFFG

SEQ ID NO: 5615 - protein, 509 aa, Zea mays
  Clone ID: PAT_MRT4577_42559C.1.pep
MSTIAASRRSSSSSSSATAKRPAIADGPGGPKATAAQAKKRVALGNITNVAARGGRASVGGSLGNVMAPTSSAKLNPTVPLKKPSLATSARSVSSSIRGSADKPASIKPAPPVARHGSATQRHNNVPPPKVPTIADVPSRAPALVSCTGLVSPGRSGDSVSSDETMSTCDSMKSPDFEYVDNQDTSMLASLQRRTSEHLRISEDRDVEENKRKKNAVAPMEIDRICDVDSEYEDPQLCATLASDIYMHLREAETKKRPSTDFMETIQKDVNPSMRAILIDWLVEVAEEYRLVPDTLYLTVNYIDRYLSGNEISRQRLQLLGVACMLIAAKYEEICAPQVEEFCYITDNTYFRDEVLDMEASVLNYLKFEMTAPTAKCFLRRFARAAQACDEDPALHLEFLANYIAELSLLEYSLLSYPPSLIAASAIFLARFILQPTKYPWNSTLAHYTQYKPSKLSECVKALHRLCSVGSGSNLPAIREKYSQHKYKFVAKKQCPPQIPTEFFRDATC

SEQ ID NO: 5616 - protein, 251 aa, Zea mays
  Clone ID: PAT_MRT4577_42575C.1.pep
MDSRVVDGAGGGADASLPADPPSPVPDPAAGGMDARLPSDLLRAVLQRLPPIDLARSACVCRAWRAVASDRAVVEAAFCAPWGVRRVVGEPATGAFWRAASLGRFALSHAIRRGDTVPGVALKYSVQVTDIKRFNNMMSDHGIYSRERLLVPISNPEILLGSTCYIEMDHNAKREVAIFYPEGRPGGKTDSVASIVSAERRNKRILESVRRSLHVDDGTAAYYLSVTEGDPRAAMTEYSEDLRWEQQRAGR

SEQ ID NO: 5617 - protein, 97 aa, Zea mays
  unsure (1)..(97): unsure at all Xaa locations
  Clone ID: PAT_MRT4577_42576C.1.pep
RARVRSSPSIPDRVRVRKGRQGSVSWVSGSRWRRHDVEYRCFIGGLAXATDDHSIHNAYSTXGEDLESKIIHDRQTHRSLSFCYVTFSTEVAMRNAI

SEQ ID NO: 5618 - protein, 455 aa, Zea mays
  Clone ID: PAT_MRT4577_42605C.1.pep
METQAPEKENYLPEKDARSAREKAIDEWLPITSSRNAKWWYSAFHNVTAMVGAGVLSLPYALSELGWGPGIAVLVVSWVITLYTLWQMVEMHEMVPGKRFDRYHELGQHAFGEKLGLWIVVPQQLVVEVGVNIVYMVTGGRSLKKFHDVLVCGDGGASCEGKDNIKTTYFIMIFASVHFVLSQLPNFNSISGVSLAAAVMSLSYSTIAWGASVDKGRMAGVDYHLRATTTPGKVFGFFGALGDVAFAYAGHNVVLEIQATIPSTPEKPSKKPMWKGVVVAYVVVALCYFPVALIGYWAFGNSVQDNILITLSRPRWLIALANMMVVIHVIGSYQIYAMPVFDMIETVLVKKLRFPPGLTLRLISRTAYVAFTMFIAITFPFFGGLLGFFGGFAFAPTTYFLPCVMWLAIYKPKRFSLSWFTNWICIILGVILMILSPIGGLRQIIMDAKTYQFYS

SEQ ID NO: 5619 - protein, 182 aa, Zea mays
  unsure (1)..(182): unsure at all Xaa locations
  Clone ID: PAT_MRT4577_42655C.1.pep
ASPSAPLSISLLRLLLDPAKPGIRDSEEHHFESKADAGXSKTXPQQAGTXRXNGFIVIKNRPPXVXEXSTSKTXKHGHAKXHCVXIXIFNGKKXEEIVPSSHNXXXPHXNRTEYQXSXKXXDGFXSLLTSEGNTKDDLRLXTXETLVAHIKEGFXSCKDXVVTFQSXIGEEQNXXPKDVGPX

SEQ ID NO: 5620 - protein, 987 aa, Zea mays
  Clone ID: PAT_MRT4577_42664C.1.pep
MMESAAAQSCAACGDDARAACRACSYALCRACLDEDAAEGRTTCARCGGDYAAINPARASEGTEAEEEVVENHHTAGGLRERVTMGSHLNDRQDEVSHARTMSSLSGIGSELNDESGKPIWKNRVESWKEKKNEKKASAKKTAAKAQPPPVEEQIMDEKDLTDAYEPLSRVIPISKNKLTPYRAVIIMRLIVLGLFFHYRITNPVNSAFGLWMTSVICEIWFGFSWILDQFPKWYPINRETYVDRLIARYGDGEESGLAPVDFFVSTVDPLKEPPLITANTVLSILAVDYPVEKISCYVSDDGSAMLTFESLAETAEYARKWVPFCKKYAIEPRAPEFYFSQKIDYLKDKIHPSFVKERRAMKRDYEEYKVRINALVAKAQKTPDEGWIMQDGTPWPGNNPRDHPGMIQVFLGETGARDFDGNELPRLVYVSREKRPGYQHHKKAGAMNALVRVSAVLTNAPYILNLDCDHYVNNSKAVREAMCFMMDPTVGRDVCYVQFPQRFDGIDRSDRYANRNVVFFDVNMKGLDGLQGPVYVGTGCCFNRQALYGYGPPSLPALPKSSICSWCCCCCPKKKVERSEREINRDSRREDLESAIFNLREIDSCFSDYDEYERSMLISQMSFEKSFGLSSVFIESTLMENGGVPESANPSTLIKEAIHVISCGYEEKTEWGKEIGWIYGSVTEDILTGFKMHCRGWRSIYCMPVRPAFKGSAPINLSDRLHQVLRWALGSVEIFFSRHCPLWYGYGGGRLKWLQRLSYINTIVYPFTSLPLVAYCCLPAICLLTGKFIIPTLSNAATIWFLGLFMSIIVTSVLELRWSGIGIEDWWRNEQFWVIGGVSAHLFAVFQGILKMIAGLDTNFTVTAKATDDTEFGELYLFKWTTVLIPPTSILVLNLVGVVAGFSAALNSGYESWGPLFGKVFFAMWVIMHLYPFLKGLMGRQNRTPTIVVLWSVLLASVFSLLWVKIDPFVGGTETVNTNNCNTIIC

SEQ ID NO: 5621 - protein, 232 aa, Zea mays
  Clone ID: PAT_MRT4577_42708C.1.pep
MAPSLLGGFTKSLAMTVLSEIGDKTFFAAAILAMRHPRKLVLAGCLTALIVMTALSASLGWVAPNLISRKWTHHLTTLLFFLFGIWSLWEGFKEDGDSEELAEVEAELDAAFKSNKGESKNKFKANDDMKKQQRPFLMQFFSPIFLKAFSITFFGEWGDKSQIATIGLAADENPFGVVLGGIIAQALCTTAAVLGGKSLASQISEKMVELSSGVLFLLFGIMSLLSGPEGEL

SEQ ID NO: 5622 - protein, 219 aa, Zea mays
  Clone ID: PAT_MRT4577_42710C.1.pep
MVLGACVQGFTKSLAMTVLSEVGDKTFFAAAILAMRHPRKLVLAGCLTALIVMTALSASLGWVAPNLISRKWTHHVTTLLFFVFGIWSLWEGFKEDGDSEELAEVEAELDAVFKSNKGESKTKFKANDDMKKQQRPFLMQFFSPIFLKAFSITFFGEWGDKSQIATIGLAADENPFGVVLGGIIAQALCTTAAVLGGKSLASQISEKMVGTRLIFFALL

SEQ ID NO: 5623 - protein, 231 aa, Zea mays
  Clone ID: PAT_MRT4577_42713C.1.pep
MAPSLLGGFTKSLAMTVLSEVGDKTFFAAAILAMRHPRKLVLAGCLTALIVMTALSASLGWVAPNLISRKWTHHVTTLLFFVFGIWSLWEGFKEDGDSEELAEVEAELDDVFKSNKGESKNKTKANDDTKKQQRPFLMQFFSPIFIKAFSITFFGEWGDKSQIATIGLAADENPFGVVLGGIIAQALCTTAAVLGGKSLASQISEKMVELSSGVLFLLFGIMSLLSGPGEL

SEQ ID NO: 5624 - protein, 234 aa, Zea mays
  Clone ID: PAT_MRT4577_42714C.1.pep
MAPSLLGGFTKSLAMTVLSEIGDKTFFAAAILAMRHPRKLVLAGCLTALIVMTALSASLGWVAPNLISRKWTHHLTTLLFFLFGIWSLWEGFKEDGYRDSEELAEVEAELDAAFKSNKGESKNKFKANDDMKKQQRPFLMQFFSPIFLKAFSITFFGEWGDKSQIATIGLAADENPFGVVLGGIIAQALCTTAAVLGGKSLASQISEKMVELSSEVLFLLFGIMSLLSGPEGEL

SEQ ID NO: 5625 - protein, 111 aa, Zea mays
  unsure (1)..(111): unsure at all Xaa locations
  Clone ID: PAT_MRT4577_42811C.1.pep
QLFLFCNNGRSLLLVPTAAGRGRGGPGSGAAAAGSEGAGTASAAASCRQATSSVAPCLGYAMGSAAXPSAACCIEVRSLNRRASSAADRQATCNWLTSMTGQFGCGISMDN

SEQ ID NO: 5626 - protein, 116 aa, Zea mays
  unsure (1)..(116): unsure at all Xaa locations
  Clone ID: PAT_MRT4577_42956C.1.pep
GPLTHAWDMQQQQRARSQLPEADPQQDLPVSQLAPLNSRANLPQQQQLPLSQLDGVSPGTLLTQPQLSPFPQHVAREGGTLXQLQQPPPPHQLALTNPAVFYQQPIIGGALLLDLL

SEQ ID NO: 5627 - protein, 357 aa, Zea mays
  Clone ID: PAT_MRT4577_43021C.1.pep
MEALHEEMPFDLDFHPSSPLVVTSIITGELCLFRYGPESQPERLLLLKAHKESCRAVRFVDSGKVILSGSADCSVLASDVESGKAIARLEDAHENAINRLVCLTESTIATGDDEGCIKVWDTRERSCCNSFEVHDDYISDMTYVAETNQILATSGDGTLSVNNLRRNKVRSRSEFSEDELLSLVLMKHGKKVVCGTPSGALLLYSWGYFNDCSDRFIGHTQSVDTMLKLDEDTLVSGSSDGVIRLVGILPNRIKQPLAEHSEYPIEALALSNDKKYLGSISHDKMLKLWDLEELLSGPQVANGDEPAEAGSDDSDDDSDDDVMDVDMAATSSKGSRSKKAGKGQSSSRPASDFFADL

SEQ ID NO: 5628 - protein, 208 aa, Zea mays
  Clone ID: PAT_MRT4577_43023C.1.pep
MGFPVGYSESEMLLPRVLLQVLLLLGHFHRFLLWAFHAVGLGDLIDLGCNYPPPPPSASTAHEMMEHQHQHQGRDDVASPLQHQRPEFRPVAAALIEEALPVVRFDELGGAPCGGGDCAVCLSGIGGGDEVRRLGNCRHAFHRACLDRWMAHDQRTCPLCRAPLIPWAADADADAADYDMSYPSPLPPTPLRRPHELLLLLTGLGGFQ

SEQ ID NO: 5629 - protein, 137 aa, Zea mays
  unsure (1)..(137): unsure at all Xaa locations
  Clone ID: PAT_MRT4577_43051C.1.pep
ATKNKSLEKAFASLGEILDSKVISDRETGRSPGLGFVTFSSENSMLDAIENMNGKELDGRNITVNQAQSRVGGGDSGGYIGGRGGGGYGGGPRDGGXGGGGGFGGRPKGGGGGYEGGGGYAGRRKGGGGGXGGGGGG

SEQ ID NO: 5630 - protein, 102 aa, Zea mays
  unsure (1)..(102): unsure at all Xaa locations
  Clone ID: PAT_MRT4577_43129C.1.pep
ITHCSDLILCIATQVKATNGDTFLGGEDFDNTLLEFLVSDFKKTEGIDLSKDRLALQRLREAAXKAKVELFVTFXTEINLPFITADASWAKHLNITLARSKF

SEQ ID NO: 5631 - protein, 492 aa, Zea mays
  Clone ID: PAT_MRT4577_43220C.1.pep
MDPYKHRPSSGSNSSFWTTNSGAPVWNNNSALTVGQRGPILLEDYHLIEKLAQFDRERIPERVVHARGASAKGFFEVTHDVSHLTCADFLRAPGVQTPVIVRFSTVVHERGSPETLRDPRGFAVKFYTREGNFDLVGNNMPVFFIRDGMKFPDMVHAFKPNPKTNLQENWRIVDFFSHHPESLHMFTFLFDDVGIPLNYRHMEGFGVNTYSLINRDGKPHLVKFHWKPTCGVKCLLDNEAVTVGGTCHSHATKDLYDSIAAGNYPEWKLYIQTIDLDHEDKFDFDPLDVTKTWPEDIIPLQPVGRMVLNKNVDNFFAENEQIAFCPAISVPGIHYSDDKLLQTRIFSYADTQRHRLGPNYLMLPVNAPKCAHHNNHHDGFMNFMHRDEEVNYFPSRFDPARHAEKVPIPPRVLTGCREKCIIQKENNFKQAGERYRSFDPARQDRFIQRWVDALTDPRVTHEHHTIWISYWSQCDAALGQKLASRLNLKPNM

SEQ ID NO: 5632 - protein, 493 aa, Zea mays
  unsure (1)..(493): unsure at all Xaa locations
  Clone ID: PAT_MRT4577_43221C.1.pep
MDPYKHRPSSGSNSSFWTTNSGAPVWNNNSALTVGQRGPILLEDYHLIEKLAQFDRERIPERVVHARGASAKGFFEVTHDVSHLTCADFLRAPGVQTPVIVRFSTVVHERGSPETLRDPRGFAVKFYTREGNFDLVGNNMPVFFIRDGMKFPDMVHAFKPNPKTNLQENWRIVDFFSHHPESLHMFTFLFDDVGIPLNYRHMEGFGVNTYTLINRDGKPHLVKFHWKPTCGVKCLLDNEAVTVGGTCHSHATKDLYDSIAAGNYPEWKLYIQTIDLDHEDKFDFDPLDVTKTWPEDIIPLQPVGRMVLNKNVDNFFAENEQIAFCPAIIVPGIHYSDDKLLQTRIFSYADTQRHRLGPNYLMLPVNAPKCAXHHNNHHDGFMNFMHRDEEVNYFPSRFDPARHAEKVPIPPRVLTGCREKCIIQKENNFKQAGERYRSFDPARQDRFIQRWVDALTDPRVTHEHRTIWISYWSQCDAALGQKLASRLNLKPSM

SEQ ID NO: 5633 - protein, 110 aa, Zea mays
  unsure (1)..(110): unsure at all Xaa locations
  Clone ID: PAT_MRT4577_43251C.1.pep
LKSNTGGWGAPNQLFGAQGNWVRLFPGEGQTSPFXNQPKPXAGPVPPFHPKIALRRGVLSAQCSKIMPPFFPLRRKKKPQSPPQGPPHGPPHPVKFFSKMPPMFGPIFCL

SEQ ID NO: 5634 - protein, 69 aa, Zea mays
  unsure (1)..(69): unsure at all Xaa locations
  Clone ID: PAT_MRT4577_43692C.1.pep
GSPXFGFVAQRIEIAASDVEYRXFVGRLSWATDDHYLHNAFSTYGEVLESKIILDHQTQSSHMFCFITF

SEQ ID NO: 5635 - protein, 209 aa, Zea mays
  unsure (1)..(209): unsure at all Xaa locations
  Clone ID: PAT_MRT4577_43716C.1.pep
MGGFGKTHKSTAYLKRFQIKINRRRAAKTDYTARIRLFNHDTDMYNTPKYRFGGRFTNKDITAHMIFDSIAGDMVLACAYSHELPRYGLEGGLTNYASAYCTGLMMHPRVLKTRCLHTEYQGNVXAIGEDFSVEPTDEMTPSQALLDVSLIRTTTWNRAFCALKGSLDGGLNIPHSEKRFAGFKNDDKQLXDADIHRKYIYGGQCDDYM

SEQ ID NO: 5636 - protein, 51 aa, Zea mays
  Clone ID: PAT_MRT4577_43883C.1.pep
PASSACGVVAVTVIGHAVSHFDGHVAEHARHLGRSASCDDRIHIIRLTIEC

SEQ ID NO: 5637 - protein, 63 aa, Zea mays
  unsure (1)..(63): unsure at all Xaa locations
  Clone ID: PAT_MRT4577_43927C.1.pep
GERSLNSCASTAADRHATWNCLKSMTGXSASGVSMANAGNIHSKCSVSVGVPISRTVDCTKIN

SEQ ID NO: 5638 - protein, 149 aa, Zea mays
  unsure (1)..(149): unsure at all Xaa locations
  Clone ID: PAT_MRT4577_43992C.1.pep
FVGVLAXATSNESLENAFVSYGEIVDSKVITDRXTERSRGFRFVTFSCENYMLDAIENMNGWELDCRNITGNQAQSRGGGGVGGDYGVVRGGGGGYDGGRRDGGYGGGGGYGGRREGGSVGYRGGGGYSGRREGGGGGYGVGGGVGWRD

SEQ ID NO: 5639 - protein, 524 aa, Zea mays
  Clone ID: PAT_MRT4577_43995C.1.pep
MAAVGAPGSSLHGVTGREPAFAFSTEHEEAASNGGKFDLPVDSEHKAKSVRLFSVANPHMRTFHLSWISFFTCFVSTFAAAPLVPIIRDNLNLTKADIGNAGVASVSGSIFSRLTMGAVCDLLGPRYGCAFLIMLSAPTVFCMSLIDDAAGYIAVRFLIGFSLATFVSCQYWMSTMFSSKIIGTVNGLAAGWGNMGGGATQLIMPLVYDVIRKCGATPFTAWRLAYFVPGLMHVVMGVLVLTLGQDLPDGNLRSLQKKGNVNKDSFSKVMWYAVINYRTWIFVLLYGYCMGVELTTDNVIAEYMYDRFDLDLRVAGTIAACFGMANIVARPMGGIMSDMGARYWGMRARLWNIWILQTAGGAFCLWLGRASTLPVSVVAMVLFSFCGQAACGAIFGVIPFVSRRSLGIISGMTGAGGNFGAGLTQLLFFTSSTYSTGRGLEYMGIMIMACTLPVVFVHFPQWGSMFFPPSATADEEGYYASEWNDDEKSKGLHSASLKFAENSRSERGKRNVIQADAAATPEHV

SEQ ID NO: 5640 - protein, 153 aa, Zea mays
  Clone ID: PAT_MRT4577_44045C.1.pep
MDYSNLRRQAASMKKTLFDQGYLDEQFCQVEDLQDEASPNFAEEVVTLFFKDSARLISNAEQALEKYPKDFNRWDAYMQQLKGSCSSIGASRMKSECVSFRDYCGQGNVEGCMRSFQKVKREHGALRQKLEAYFQLLRQAGPAGAATRPGCKN

SEQ ID NO: 5641 - protein, 379 aa, Zea mays
  Clone ID: PAT_MRT4577_44373C.1.pep
MATAGKVIKCKAAVAWEAGKPLSIEEVEVAPPQAMEVRVKILFTSLCHTDVYFWEAKGQTPVFPRIFGHEAGGIIESVGEGVTDVAPGDHVLPVFTGECKECAHCKSAESNMCDLLRINTDRGVMIADGKSRFSINGKPIYHFVGTSTFSEYTVMHVGCVAKINPQAPLDKVCVLSCGISTGLGASINVAKPPKGSTVAVFGLGAVGLAAAEGARIAGASRIIGVDLNPSRFEEARKFGCTEFVNPKDHNKPVQEVLAEMTNGGVDRSVECTGNINAMIQAFECVHDGWGVAVLVGVPHKDGEFKTPPMNFLNERTLKGAFFGNYKPRPDLPNVVELYIKKELEVEKFITPRVPFAEINKGFDLMAKGEGIRCIIRMEK

SEQ ID NO: 5642 - protein, 379 aa, Zea mays
  Clone ID: PAT_MRT4577_44375C.1.pep
MATAGKVIKCKAAVAWEAGKPLSIEEVEVAPPQAMEVRVKILFTSLCHTDVYFWEAKGQTPVFPRIFGHEAGGIIESVGEGVTDVAPGDHVLPVFTGECKECAHCKSAESNMCDLLRINTDRGVMIGDGKSRFSINGKPIYHFVGTSTFSEYTVMHVGCVAKINPQAPLDKVCVLSCGISTGLGASINVAKPPKGSTVAVFGLGAVGLAAAEGARIAGASRIIGVDLNPSRFEEARKFGCTEFVNPKDHNKPVQEVLAEMTNGGVDRSVECTGNINAMIQAFECVHDGWGVAVLVGVPHKDAEFKTHPMNFLNERTLKGTFFGNYKPRTDLPNVVELYMKKELEVEKFITHSVPFAEINKAFNLMAKGEGIRCIIRMEN

SEQ ID NO: 5643 - protein, 379 aa, Zea mays
  Clone ID: PAT_MRT4577_44376C.1.pep
MATAGKVIKCKAAVAWEAGKPLSIEEVEVAPPQAMEVRVKILFTSLCHTDVYFWEAKGQTPVFPRIFGHEAGGIIESVGEGVTDVAPGDHVLPVFTGECKECAHCKSAESNMCDLLRINTDRGVMIADGKSRFSINGKPIYHFVGTSTFSEYTVMHVGCVAKINPQAPLDKVCVLSCGISTGLGASINVAKPPKGSTVAVFGLGAVGLAAAEGARIAGASRIIGVDLNPSRFEEARKFGCTEFVNPKDHNKPVQEVLAEMTNGGVDRSVECTGNINAMIQAFECVHDGWGVAVLVGVPHKDAEFKTHPMNFLNERTLKGTFFGNYKPRTDLPNVVELYMKKELEVEKFITHSVPFAEINKAFDLMAKGEGIRCIIRMEN

SEQ ID NO: 5644 - protein, 377 aa, Zea mays
  Clone ID: PAT_MRT4577_44377C.1.pep
MATAGKVIKCKAAVAWEAGKPLSIEEVEVAPPQAMEVRVKILFTSLCHTDVYFWEAKTPVFPRIFGHEAGGIIESVGEGVTDVAPGDHVLPVFTGECKECAHCKSAESNMCDLLRINTDRGVMIADGKSRFSINGKPIYHFVGTSTFSEYTVMHVGCVAKINPQAPLDKVCVLSCGISTGLGASINVAKPPKGSTVAVFGLGAVGLAAAEGARIAGASRIIGVDLNPSRFEEARKFGCTEFVNPKDHNKPVQEVLAEMTNGGVDRSVECTGNINAMIQAFECVHDGWGVAVLVGVPHKDAEFKTHPMNFLNERTLKGTFFGNYKPRTDLPNVVELYMKKELEVEKFITHSVPFAEINKAFDLMAKGEGIRCIIRMEN

SEQ ID NO: 5645 - protein, 412 aa, Zea mays
  unsure (1)..(412): unsure at all Xaa locations
  Clone ID: PAT_MRT4577_44378C.1.pep
MATAGKVIKCKAAVAWEAGKPLSIEEVEVAPPQAMEVRVKILFTSLCHTDVYFWEAKGQTPVFPRIFGHEAGGIIESVGEGVTDVAPGDHVLPVFTGECKECAHCKSAESNMCDLLRINTDRGVMIADGKSRFSINGKPIYHFVGTSTFSEYTVMHVGCVAKINPQAPLDKVCVLSCGISTGLGASINVAKPPKGSTVAVFGLGAVGLAAAEGARIAGASRIIGVDLNPSRFEEARKFGCTEFVNPKDHNKPVQEVLAEMTNGGVDRSVECTGNINAMIQAFECVHDGWGVAVLVGVPHKDAEFKTHPMNFLNERTLKGTFFGNYKPRTDLPNVVELYMKKXIAKCCSFGFLTSRAFAEKLLRIVPAILLGSAQELEVEKFITHSVPFAEINKAFDLMAKGEGIRCIIRMEN

SEQ ID NO: 5646 - protein, 166 aa, Zea mays
  Clone ID: PAT_MRT4577_44488C.1.pep
MADDGGSHEGSGGGGGVREQDRFLPIANISRIMKKAVPANGKIAKDAKETLQECVSEFISFVTSEASDKCQKEKRKTINGDDLLWAMATLGFEEYVEPLKIYLQKYKEMEGDSKLSTKAGEGSVKKDAISPHGGTSSSSNQLVQHGVYNQGMGYMQPQVIYRTVIC

SEQ ID NO: 5647 - protein, 104 aa, Zea mays
  unsure (1)..(104): unsure at all Xaa locations
  Clone ID: PAT_MRT4577_44618C.1.pep
PNEXKGATKQXKQAQNXQYEKPAAQLQIKKAIAVDKLPKSLTAKRQIPTTFGTPRWTKTQRQYLWQQKSRGHAEERKQPHKNSPSKRGSLPLGPPPHSQEPDDG

SEQ ID NO: 5648 - protein, 95 aa, Zea mays
  Clone ID: PAT_MRT4577_44721C.1.pep
HHFFSAHDLEKIQETARNLMDEHSKDTIVLVTEKDYDRDPEALKTLDANVWVLSSSLQIMHHSKQGEDEFMRKVNEIITVTWCAKSHAADRATGC

SEQ ID NO: 5649 - protein, 67 aa, Zea mays
  Clone ID: PAT_MRT4577_44955C.1.pep
KRPKCFLIKTGFWGPFAFKVFILNGPNFGGGVWLFCETAKPGFCYENLLSVSMLTSHVAPCWISLNK

SEQ ID NO: 5650 - protein, 483 aa, Zea mays
  unsure (1)..(483): unsure at all Xaa locations
  Clone ID: PAT_MRT4577_45001C.1.pep
MGLLGMMGDSFGCSATGERLVSAARDGDIQEARALLELNPRLARYSTFGIRNSPLHYSAAKGHHEIVSLLIESGVNINLRNCRGQTALMQACLYGHWKVVQILVLFKANIHRRDCFSGATAIHFAALKGHTRCIRLLVADYVPSLSEFWTIMRGKSTDEMKKGAFDAASLQRLVNGKSDGGVTPLHLAALHGHAESVQLLLDLGASVSEVTXMMVQQLTSLVRGAHPSITRRVVEVLFAAXLIAAGANMGAQNVNGLTPLLVARSWHKTSIEGILSKQPENRMRILPSPYLCLPLMSIVKIARECGWRKTSASSTCQDPCVICLEVECTVAAEGCGHEFCTKCALYLCSTTSSSTSTRGVPGSISCPLCRHAIVSFMRLTSTTPIKELPWTSASLALCAAGSNTGRPEHGGSLHRRPDLRRLRSISVQLGCSSFRSIGSGKLSSMKLNCTGAEEAVPCLVSCLRPDVQRSSSYRGRIRRYSEF

SEQ ID NO: 5651 - protein, 230 aa, Zea mays
  Clone ID: PAT_MRT4577_45018C.1.pep
SVEGGFSVAFDPLDGSSIVDTNFTVGTIFGVWPGDKLTGVTGGDQVAAAMGIYGPRTTYIVALKDCPGTHEFLLLDEGKWQHVKDTTTIGEGKMFSPGNLRATFDNPEYDKLINYYVKEKYTLRYTGGMVPDVNQIIVKEKGIFTNVTSPTAKAKLRLLFEVAPLGFLMEKAGGYSSDGKQSVLPGGINELDERTQVAYGSKNEIIRFEETLYGSSRLAASATATARALI

SEQ ID NO: 5652 - protein, 386 aa, Zea mays
  unsure (1)..(386): unsure at all Xaa locations
  Clone ID: PAT_MRT4577_45021C.1.pep
MEIVATRSPACCAAVSFSQSYRPKASRPPTTFYGESVRVNTARPLSARRQSKAASRAALSARCEIGDSLEEFLTKATPDKNLIRLLICMGEAMRTIAFKVRTASCGGTACVNSFGDEQLAVDMLANKLLFEALEYSHVCKYACSEEVPELQDMGGPVEGGFSVAFDPLDGSSIVDTNFTVGTIFXGVWPGDKLTGVTGGDQVAAAMGIYGPRTTYIVALKDCPGTHEFLLLDEGKWQHVKDTTTIGEGKMFSPGNLRATFDNPEYDKLINYYVKEKYTLRYTGGMVPDVNQIIVKEKGIFTNVTSPTAKAKLRLLFEVAPLGFLMEKAGGYSSDGKQSVLDRVINELDERTQVAYGSKNEIIRFEETLYGSSRLAASATATARALI

SEQ ID NO: 5653 - protein, 170 aa, Zea mays
  unsure (1)..(170): unsure at all Xaa locations
  Clone ID: PAT_MRT4577_45643C.1.pep
MASSTXMALSSTAXAVKAANLPSSSAFGEARMSMLNTAFKVXSADASGSPCYCPDRVLYLGPLSGEPPSYLTVXFPGDYGWNTAGLWAYPETFCRYXEVNVIHCRWTLMSAFGCVFPQLTRRLRVKXLGRAVLEXGSQIFNMEGVXYLGNPRLLYAQSMLYYLGDATACS

SEQ ID NO: 5654 - protein, 458 aa, Zea mays
  Clone ID: PAT_MRT4577_4573C.1.pep
MVGSVHVNGSVHGGNGTATEERLDELRRLLGKSEGDLLKIVSVGAGAWGSVFAALLQDAYGHFRDKVQIRIWRRPGRTVDRSTAEHLFEVINSREDVLRRLIRRCAYLKYVEARLGDRTLYADEILKDGFCLNMIETPLCPLKVVTNLQEAVWDADIVVNGVPSTETREVFDEISEYWKERISVPVIISLAKGIEASLDPIPRIITPTQMISSATGVPTENILYLGGPNIASEIYNKEYANARICGSNKWRKPLAKFLRQPHFIVWDNSDLVTHEVMGGLKNVYAIGAGMVAALTNESATSKSVYFAHCTSEMIFITHLLTEQPEKLAGPLLADTYVTLLKGRNAWYGQMLAKGELSPDMGDSIKGKGMIQGISAVGAFFELLSQPSLSVQHPEENKQVAPAELCPILKRLYRILIKRELPARDILQALRDETMNDPRERIEMAQSHAFYRPSLLGKP

SEQ ID NO: 5655 - protein, 246 aa, Zea mays
  Clone ID: PAT_MRT4577_4576C.1.pep
MAARKKKPLLIACQATSARITRSQAAANSTRSGLAPSVPVPLKTEHNHAAKKKMKREASDENASADAGASAPLPKRRTVLKNVTNISCAKISKRCTAVTGLKLGPSQKAGQSINKQCTNKISMLLPLAVGGSSLVDDSNNAEETQMVDLLAQKEKQIVLLKEAQPLQNTEQNKGGACDEASVEERNAMNVHETAALKAGVSNGLNIVDIDKNNGDPQMCVTYVAEIYRNLMASEVCYLFLVKNRIF

SEQ ID NO: 5656 - protein, 70 aa, Zea mays
  unsure (1)..(70): unsure at all Xaa locations
  Clone ID: PAT_MRT4577_45936C.1.pep
QQQQGPFSQLXAGVNPSTFLTQPQLLPFXQHVAPNAGPLLQLQQFQPFNQLALTNPAVFYQQPIIGGALF

SEQ ID NO: 5657 - protein, 146 aa, Zea mays
  unsure (1)..(146): unsure at all Xaa locations
  Clone ID: PAT_MRT4577_46026C.1.pep
GASGAQAGRPMKXSGTRPERPACSKPXGRLWLYLKXGRSAQCVGTGAPVYLXADLEYLAFXVLELARNAGRXDNKKTPMMPRHVLLAIRNDEELEKLLVGETIEHGGVLANIHSVLLPKKAAEKAASGSSKETKSTKKGAKSPKKA

SEQ ID NO: 5658 - protein, 93 aa, Zea mays
  unsure (1)..(93): unsure at all Xaa locations
  Clone ID: PAT_MRT4577_46128C.1.pep
PAREEHKRGGFIXAGGGSNSSSTDDDGMGGRRKKGIKEKIKEKLPGCHKDDQHATATTGGAYGQQGHTGGAYRQQGHTGCAYSTGADGTGEKK

SEQ ID NO: 5659 - protein, 166 aa, Zea mays
  Clone ID: PAT_MRT4577_46237C.1.pep
IGYLEAGRDYQSGLLPPGGLWPDDRDGHFTGDPILHDADPRRYKAFFYCNATAFMASVVIVILLLNSTISKYRRSLLPMKTAMVLDLLALLGAYAAGSCRKLKTSVYVFALVVAVFMYIVVHILLSFDKMARVMKRTGEQWVPCLKKMWALIEIEPPNHQPSSEEP

SEQ ID NO: 5660 - protein, 147 aa, Zea mays
  unsure (1)..(147): unsure at all Xaa locations
  Clone ID: PAT_MRT4577_462C.1.pep
GLGNLAGYSXKQRLITFNQLAALSSASYLXQQQLPLSQLPAGYPQKLLTFSQLAALYSTAYLQQQQLLPFSQLAEVSPATXLIQPQLVALYQHAERNAGTLLQLQQLLPFKQLALTNTGEEYQQPMIERSTSFRFLMSYRSIIKDSG

SEQ ID NO: 5661 - protein, 124 aa, Zea mays
  unsure (1)..(124): unsure at all Xaa locations
  Clone ID: PAT_MRT4577_46345C.1.pep
MRSVTPLEYDMKGAKSKGAAKAEAKLEVKSKGXEKTAKGRKGKDGKDPNKPKRAPSAFFEIMEEFRKGFKEKNPKNKTVAAVAKAAGDRRKSXLSEXSTKLPYAAKATQXKLQYHKALAAYQQG

SEQ ID NO: 5662 - protein, 73 aa, Zea mays
  unsure (1)..(73): unsure at all Xaa locations
  Clone ID: PAT_MRT4577_4657C.1.pep
ECSGGKQVIHKXQNXLSKSLTNDNQISRANKTKLYLATHIALPQPTTPLFFSKSKQVLSSPFSSSDNHKKTCY

SEQ ID NO: 5663 - protein, 176 aa, Zea mays
  Clone ID: PAT_MRT4577_46737C.1.pep
STQRPDPLVVGNVVGDIVDPFITTASLRVFYNNKEMTNGSDLKPSQVMNEPRVHVGGRDMRTLYTLVMVDPDAPSPSNPTKRENLHWLVTDIPETTDASFGNEIVPYESPRPIAGIHRFAFVLFRQSVRQTTYAPGWRSNFNTRDFAAIYGLGSPVAAVYFNCQRENGCGGRRYIR

SEQ ID NO: 5664 - protein, 177 aa, Zea mays
  Clone ID: PAT_MRT4577_46740C.1.pep
MFNMSRDPLVVGNVVGDIVDPFITTASLRVFYNNKEMTNGSELKPSQVMNEPRVHVGGRDMRTLYTLVMVDPDAPSPSNPTKRENLHWLVTDIPETTDASFGNEIVPYESPRPIAGIHRFAFVLFRQSVRQTTYAPGWRSNFNTRDFAAIYGLGSPVAAVYFNCQRENGCGGRRYIR

SEQ ID NO: 5665 - protein, 72 aa, Zea mays
  Clone ID: PAT_MRT4577_46795C.1.pep
MAMAFTYAPGGGAGALAQGRCRVLGPAGLGFLGPSKGGGLPRPLALALARGMSSPVSVGARLRCAASFVPAG

SEQ ID NO: 5666 - protein, 268 aa, Zea mays
  unsure (1)..(268): unsure at all Xaa locations
  Clone ID: PAT_MRT4577_46815C.1.pep
MATSSTGCLVLLCLASPLLLLPSAVVLGHPWGGGGGLSPQFYDHSCPMAEKIVQSVVAQAVAKETRMAASLVRLHFHDCFVKGCDASVLLDNSSSIVSEKGSNPNRNSIRGFEVVDQIKAALEAACPGTVSCADILALAARDSTALVGGPYWDVALGRRDSLGASIQDSNNDIPAPNNTLPTIITKFKRQGLNVADVVALSGGHTIGMSRCTSFRQRLYNQTGNGMADSTLDVSYAARLRQSCPRSGADSTLFPXLDVVAPAKFDNFY

SEQ ID NO: 5667 - protein, 263 aa, Zea mays
  Clone ID: PAT_MRT4577_47013C.1.pep
MAPGGSGERWSLAGATALVTGGSKGIGQAVVEELARLGARVHTCARSAADLEECRRRWAEKGLRVTVSVCDVAVRADRERLVLDTVSAAFDGKLDILVNNAALLLLKPAAEWAAEDYARIMATNLESCLHISQLAHPLLLNASVAGGASIVNVSSIASVLGFPQEVMYSVTKGGLNQMTRSLAVEWACDRIRVNCVAPGVIMTDMGKELPAALVEQERSRIPLRRTGEPEEVASLVSFLCMPAASYVTGQVIFVDGGRTISGA

SEQ ID NO: 5668 - protein, 193 aa, Zea mays
  unsure (1)..(193): unsure at all Xaa locations
  Clone ID: PAT_MRT4577_47014C.1.pep
MAPGGSGERWSLAGATALVTGGKLDILVNNAALLLLKPAAEWAAXDYARIMATNLESRLHISQLAHPLLLNASVAGGASIVNVSSIASVLGFPQEVMYSVTKGGLNQMTRSLAVEWACDRIRVNCVAPGVIMTDMGKELPAALVEQERSRIPLRRTGEPEEVASLVSFLCMPAASYVTGQVIFVDGGRTISGA

SEQ ID NO: 5669 - protein, 263 aa, Zea mays
  Clone ID: PAT_MRT4577_47015C.1.pep
MAPGGSGERWSLAGATALVTGGSKGIGQAVVEELARLGARVHTCARSAADLEECRRRWAEKGLRVTVSVCDVAVRADRERLVLDTVSGAFDGKLDILVNNAALLLLKPAAEWAAEDYARIMATNLESCLHISQLAHPLLLNASVAGGASIVNVSSIASVLGFPQEVMYSVTKGGLNQMTRSLAVEWACDRIRVNCVAPGVIMTDMGKELPAALVEQERSRIPLRRTGEPEEVASLVSFLCMPAASYVTGQVIFVDGGRTISGA

SEQ ID NO: 5670 - protein, 754 aa, Zea mays
  unsure (1)..(754): unsure at all Xaa locations
  Clone ID: PAT_MRT4577_47028C.1.pep
MDSSGEELLKKIRELEVGQAQLKQEMSKLIPGAGERRRSQSVSPRRGVPVPPPPPAKAKAGAPGRRLSGGFEGGQRAWARGSASFPHSSPLQREGRATGAGDASTSARLPERQYSRVLQSMGQSVHILDLDGRIIYWNQSAENLFGYPASEALGQDALMLLVDSHDHNAVNNIFQRISMGESWTGKFPVKNKQGHRFSVVATNTPFYDEDGSLMGFICVSSDSRQLEQIFCKPPTSARSQSESSMTSXVMGVAATLVTESIXVNRSSFDSNLPLQSTLASKITNLATKVTNKVRSRVRTDENDDGGSGESHCLDRGAKEEPTSSGTSTPRGDAPHGPFATEENSPGKSTNPNSDESEGKVGLHKILGSKAEALLNKKGISWPWKGRENEGPDERNHVILPWLHGGQENGVNHQKVSDSSISPDAQGAEHNQPSKNEASGSWSSFNNNSTGSASSTGSTNSSALYKVDHEADCLDYEILWEDLVIGEQIGQGSCGTVYHALWYGSDVAVKVFSKQEYSEEVILTFRQEVSLMKKLRHPNILLFMGAVMSPQRLCIVSEFLPRGSLFRLLQRSATKLDVRRRVHMALDIVRGMNYLHHSSPPIIHRDLKSSNLLVDKNWIVKVADFGLSRLKXETFLTTQXGKGTPQWMAPEVLRNEPSDEKSDVYSYGVILWELVTQKIPWENLNSMQVIGAVGFMNQRLDIPSEVDPQWKSIILSCWESDPQQRPSFQELLERLRELQRHYAIQHRNTKNSIEE

SEQ ID NO: 5671 - protein, 70 aa, Zea mays
  Clone ID: PAT_MRT4577_4741C.1.pep
TKYLGEGIVYIPGRIYCSKSLQRTRTAYYLSVFFSPFAFANRRWLAQFSPPKKKRFSTNRQMISRTIEGT

SEQ ID NO: 5672 - protein, 110 aa, Zea mays
  unsure (1)..(110): unsure at all Xaa locations
  Clone ID: PAT_MRT4577_47512C.1.pep
MAVKIFWFLMLLGLTASAVTATIIQQXSQAPIAIFFAPYLSPAXSXVCENPIVQPYRIQHAIVARMLPLSPLILQQAEALLQQLPLVHIVAQNINVEQLRQLVLGNLDDY

SEQ ID NO: 5673 - protein, 75 aa, Zea mays
  unsure (1)..(75): unsure at all Xaa locations
  Clone ID: PAT_MRT4577_47534C.1.pep
RGGGXPCSPSPRASQGSSCCQSSPRAASGPSPWEEGTDDHNFRMHGPPPFTILLPLGVGRPGVCSQGRFRGLNHF

SEQ ID NO: 5674 - protein, 124 aa, Zea mays
  unsure (1)..(124): unsure at all Xaa locations
  Clone ID: PAT_MRT4577_47692C.1.pep
MDYGQQEQRGHGATAHVXDQYGNSVGGVEHGSVGMRHGSGTTGGMGQLGEHGGSGMGGGQLQSAREEHKTGEMLHRSGSSSSSSSEDDVMGGRRKKGIKEKIKEKLSGGHKDDQHATATTGGAY

SEQ ID NO: 5675 - protein, 130 aa, Zea mays
  unsure (1)..(130): unsure at all Xaa locations
  Clone ID: PAT_MRT4577_47706C.1.pep
ANLDADYQHQQCLPFTHLVAMNSACDLHQHQLPFTQVPAACPQQYLPFXRQPALNSPAYLQQQQLLPFSQLAGVSPATFLIXPQWMPFYQHGAPNAGTLLQVQQSLPFNQLALTNPAAFYRQPIIGGALF

SEQ ID NO: 5676 - protein, 226 aa, Zea mays
  unsure (1)..(226): unsure at all Xaa locations
  Clone ID: PAT_MRT4577_47708C.1.pep
RVAAPRYSTLGSVEISCLLMLLDLSCSAATETILPHCSQXAPIASIVAPYLSPTGSNGCENPILLXYTIQQAIASGILPLSPLFLQQSSALLQQLPLVHLLAQNIRAQQLQQLVLANLAAYSQQQQILPFNQLAALNSATYLRQQQLPFSQLSAAYPQRFLAFNQLTALNSPAYVQQQQLLPFNQLAGVSHCTLFTQPQLMTLYXQNAAPNAGTLLQLQHMLTFNQ

SEQ ID NO: 5677 - protein, 163 aa, Zea mays
  unsure (1)..(163): unsure at all Xaa locations
  Clone ID: PAT_MRT4577_47712C.1.pep
MAAKIFCFLMLLGLSASAATATIFPQCSQAPIASFLPPYLSPAVSSRGENPILQPYRIQQAIAAGILPLSPWFLQQPXALLQQVPLGHLLAQNIKAQHLQQPGLXNLASYSQQHEFLPFNQLAALNSTAYSAQQLPFQHLVAAYXPQQFFAFNQLGSFEPLLP

SEQ ID NO: 5678 - protein, 117 aa, Zea mays
  unsure (1)..(117): unsure at all Xaa locations
  Clone ID: PAT_MRT4577_47714C.1.pep
MAAKIFCLLMLLGLSASAATATIFPKCSKAPIASLLPPYLSPAXSFVCENPGVQPYRIQQAIAGGILPLLPLVLQQSSALLQQLPLMHLLGHNIRVQQLQQLVLAXLAVYFQHQHFL

SEQ ID NO: 5679 - protein, 204 aa, Zea mays
  unsure (1)..(204): unsure at all Xaa locations
  Clone ID: PAT_MRT4577_47715C.1.pep
MAAKIXCLLMLLGISASAATGXTLFPQCSQAPIGSLLPPYLIPAVSSVCENRGLQPYRIQQAMAGGILPLSPLLLQQSSALLQQXPLVHLLAQNXRAQQLQQLVLANLAAYSQQQQFLPFNQLAALNSAFYFEQQQLPFSQVPVAYPQEFLPFNQLAALNSSAYLQEQQLLPFSQLSXGAPATFLTQPQLLAXYQHACXNAGHP

SEQ ID NO: 5680 - protein, 166 aa, Zea mays
  unsure (1)..(166): unsure at all Xaa locations
  Clone ID: PAT_MRT4577_47716C.1.pep
LSPAASLVCXENPILEPYRIQQAITGGILPXSPLILQQSXALLHQLPLVHSLAQNIMAQHLQQLELANLAAYSQQQQVLRFNQLAALNSAFYLQQQQLPFIQLPAAYPQQFLSLNQLAALYSAAYXQQQPLLPFTQLAGVSPLTLLIRAQVVPFYQNAAPNAGTLL

SEQ ID NO: 5681 - protein, 175 aa, Zea mays
  unsure (1)..(175): unsure at all Xaa locations
  Clone ID: PAT_MRT4577_47717C.1.pep
VIAAGILPLSPLFLXQSSALLQQLPLVHLLVXSIRSQQLQQLVLAXLAAYYQQQQFLPFSLLAALNCASYLQQQQVPFSXLSAAYPQQFIPFNLLTALNYPAYLQQQHLLPFSQLAGVSLATFLTQXPQLLPFYQHAAPNAGTLLQVQQLLPFKQLALTNSTAFFQQPIIGGALF

SEQ ID NO: 5682 - protein, 90 aa, Zea mays
  unsure (1)..(90): unsure at all Xaa locations
  Clone ID: PAT_MRT4577_47838C.1.pep
RRHAPDQLPAAPCRPPSSISSVCSDSPAPMAALSAAGAPPASAIXFEGYEKRLAIXTSFEAPVFADPHGTGPRALSRSQSDSVLDLVRRT

SEQ ID NO: 5683 - protein, 128 aa, Zea mays
  unsure (1)..(128): unsure at all Xaa locations
  Clone ID: PAT_MRT4577_47967C.1.pep
MALSEEKTSSAREYKVXSLSADFGRLDIDVAEVEMPGLMECRAEFGPSKPFTGARISCSLHMTIQTDGLIDTLTALGADVRWXCFCKIFSTQDHAAXVISRESVAVLACKGETLHQYCACAPHHCLDW

SEQ ID NO: 5684 - protein, 104 aa, Zea mays
  Clone ID: PAT_MRT4577_47978C.1.pep
TDLTQMTFGSSRNNVEKFIPVYLAQGILHHDPLEFLDQREVGKLVNLAPERARKVRLNLKVGICEEHGEEPSFVAFFAKVGLDYVSCSPFRVPIVRLVAVQVLV

SEQ ID NO: 5685 - protein, 103 aa, Zea mays
  unsure (1)..(103): unsure at all Xaa locations
  Clone ID: PAT_MRT4577_4804C.1.pep
QHLKHNSAPAVAAKISCLLMLLALSACAATATIFPQCSQAPIATLLTPHLSPTVTSRCXENPVVQPYRIQQAISRGMLPLXTLLLQQSSALYHRTFLSMHSLQ

SEQ ID NO: 5686 - protein, 115 aa, Zea mays
  unsure (1)..(115): unsure at all Xaa locations
  Clone ID: PAT_MRT4577_4816C.1.pep
MAAKIGRLLMLLGLSASAATATILPQCSHATIASLLPPYLSPAEHSVCENPILQTYTIQQGITASILPLSPSILQPSXALLHQLPSAHLLAQNIMAQQLQQLELXANLAAYSQQQ

SEQ ID NO: 5687 - protein, 98 aa, Zea mays
  Clone ID: PAT_MRT4577_48206C.1.pep
MPRATSDAKLLIQSLGKAYAATPTNLKVAYMGLVGSFPFNSFLSGVLSCIGTAVLAVCLRIQVNKDNKEFKDLPPERAFADFVLCNLVLHLVIMNFLG

SEQ ID NO: 5688 - protein, 114 aa, Zea mays
  unsure (1)..(114): unsure at all Xaa locations
  Clone ID: PAT_MRT4577_48208C.1.pep
MPRXTSDAKLLIQSLGKAYAATPTNLKIIDLYVGFAVATALIQVAYMGLVGSFPFNSFLSGVLSCIGTAVLAVCLRIQVNKDNKEFKDLPPERAFADFVLCNLVLHLVIMNFLG

SEQ ID NO: 5689 - protein, 135 aa, Zea mays
  Clone ID: PAT_MRT4577_48209C.1.pep
MTCSFLVISSPHVEKTRGDSKMPRATSDAKLLIQSLGKAYAATPTNLKIIDLYVGFAVATALIQVAYMGLVGSFPFNSFLSGVLSCIGTAVLAVCLRIQVNKDNKEFKDLPPERAFADFVLCNLVLHLVIMNFLG

SEQ ID NO: 5690 - protein, 224 aa, Zea mays
  Clone ID: PAT_MRT4577_48210C.1.pep
MIRRYRHNVSYALALSTVHSYSVCNSSQPPVTTQQSTCKSQLYLAVGNLIAWMLWHHSYHCNFCKPYVLQWLIGYINLLAVIFSKKSKNSLSSIMVLRLRTSYLCALVLSTEHYYLSCFCNISSNRPWMLVETKHLQRLTGMLFIVENKTLRGFCGCPCPSAAEAKQPLAAARPRRLLPRSSPATSTPPDERGFQDAEGHQRREAPDPVPRQGVRCHTNKSQDY

SEQ ID NO: 5691 - protein, 106 aa, Zea mays
  unsure (1)..(106): unsure at all Xaa locations
  Clone ID: PAT_MRT4577_48218C.1.pep
QLAAAYPQLFLSFNQLAALNSAAYLQQQQLPPFSQLADVSPVAFLTQQHLLPLYLHADPNAITLLXLQQLLPFNLLALTDPTLFYHQLITGGTLFYIAHDAYTDFE

SEQ ID NO: 5692 - protein, 103 aa, Zea mays
  Clone ID: PAT_MRT4577_48232C.1.pep
CTLYAQFLHCLFQYTESINHRLGFSLHPYFIVGGSTHPPWSLISLIKALLAPFKAMAHLTTGFANHKGRSFRERLRRIRNGHDPSLLGHLTIQPIIANETPAI

SEQ ID NO: 5693 - protein, 230 aa, Zea mays
  unsure (1)..(230): unsure at all Xaa locations
  Clone ID: PAT_MRT4577_48321C.1.pep
MTSMTMDLSSTAFAGDGEDVSYVSAFREARVTMRKTGEKVKPSAASGSPXWYGPDRVLYLGPLSVETXSYLTSEFPGDYGWDTVALSEDPETYXSMNRELDVXIHSRWAMLCALVCVFPELLARNGVXKFGEVEWYXKVASHIFIEGGLYYLGNPSLIHAQSILAIWACQVVLMCAVEGYRIAGGPLGEVVYPLYPGGSFYPLGLVDDPEAFTELKVKELKNVRLAMFSM

SEQ ID NO: 5694 - protein, 333 aa, Zea mays
  Clone ID: PAT_MRT4577_48555C.1.pep
MERERQAVARNRKVVLRGYIDRAPREEDMELVDGGAVELRVPEGGGGPAVLVKNLYLSCDPYMRGRMRDFRNSYIPPFKPGSPIEGFGVGRVVDSTHPGFSAGDVVSGMTGWEDYSLITKPEQLRKIQQSDIPLSYHLGLLGMPGFTAYVGFYEICSPKKGEFVFVSAASGAVGQIVGQLAKLHGCYVVGSAGTDQKVELLKEKFGFDAAFNYEEEPDLTAALKRHFPEGIDIYFENVGGPMLDAVLLNMRVHGRIAVCGMVSQHGVTAPAGIHNLFSLISKRIEMKGFIQSDYVKIVYVEDMSVGLESGPASFVGLFSGKNVGKQVVCVSRD

SEQ ID NO: 5695 - protein, 350 aa, Zea mays
  Clone ID: PAT_MRT4577_48559C.1.pep
MERERQAVARNRKVVLRGYIDRAPREEDMELVDGGAVELRVPEGGGGPAVLVKNLYLSCDPYMRGRMRDFRNSYIPPFKPGSPIEGFGVGRVVDSTHPGFSAGDVVSGMTGWEDYSLITNPEQLRKIQQSDIPLSYHLGLLGMPGFTAYVGFYEICSPKKGEFVFVSAASGAVGQIVGQLAKLHGCYVVGSAGTDQKVELLKEKFGFDAAFNYKEEPDLTAALKRHFPEGIDIYFENVGGPMLDAVLLNMRVHGRIAVCGMVSQHGVTAPAGIHNLFSLISKRIEMKGFIQSDYVHLFPQFVDDITRHYRDGKIVYVEDMSVGLESGPASFVGLFSGKNVGKQVVCVSRD

SEQ ID NO: 5696 - protein, 131 aa, Zea mays
  unsure (1)..(131): unsure at all Xaa locations
  Clone ID: PAT_MRT4577_48688C.1.pep
RIQSSLCRLTWKCFSWQGGSSLPSFFMLSLAFVVMLCLDTQNFQILVLIANLLKDPXLALSSLSACMTMSGRMFMISNAFNAATSGRVSNELNPSNPRSAAFSVTVVTLLFLVLSVLVFPLILLCLNYIIY

SEQ ID NO: 5697 - protein, 104 aa, Zea mays
  unsure (1)..(104): unsure at all Xaa locations
  Clone ID: PAT_MRT4577_48719C.1.pep
MESTFIMIKPDGVQRGLIGEIISRFEKKGFYLKALKLVNVERFFAEMHYFHLVFKPFFQGLXVDYIIFVPVVAMVXRSRAVIXTGRTIIAATNSLAFEPVTNPC

SEQ ID NO: 5698 - protein, 104 aa, Zea mays
  Clone ID: PAT_MRT4577_48854C.1.pep
MSGAGGMECSGSGGTVAPFVAKTFAMVDDPATDAVVRWGPPSNSFVVADPFAFSHALLPAHFKHANFSSFVRQLNTYGFRKVDPDRWEFAHASFLRGQTHLLPR

SEQ ID NO: 5699 - protein, 131 aa, Zea mays
  unsure (1)..(131): unsure at all Xaa locations
  Clone ID: PAT_MRT4577_49002C.1.pep
QGSRSHHKQFLPWXQLAALNIASSVQQQQLPFSQLLAAGAQQFLPFNQVAALNYHAYCQQQQLVPISQLAGVSRGTFLIQPQLLPFCQHAAPSAGTLLQRQQWQPFNQRALTNPAAFYQQPIIGGASFRFK

SEQ ID NO: 5700 - protein, 115 aa, Zea mays
  unsure (1)..(115): unsure at all Xaa locations
  Clone ID: PAT_MRT4577_49004C.1.pep
AADRQQFLPFNQLAAVNYHAYXQQQQLVPISQLAGVSRGTFLIQXQLWRFYQHAAPSAGTLSQGQQWQPFNQRALTNPAAFYQQPIIGGASVKISMRDSSIIKSFVVMWVRLPRN

SEQ ID NO: 5701 - protein, 613 aa, Zea mays
  Clone ID: PAT_MRT4577_49018C.1.pep
GKLVLCASWTLLHHLPSLELLLRCQTKNQTLWPNTVMAQACKKRRGVYISSESGDSDTDSDVEGSKHSQKSGVTSISTCEHQSSYNLKAASMKSSRMIRLCGNIVRKLIDHKCGWLFKEPVDPDLYGIPDYFDVIRSPMDLGTIKNKLTKKKYVSIEEFAADVRLTFSNAMKYNPPGNDVHIFAKELNEMFDSEWESVERKFRGRNLGQDQQTMKAIKVRAMMDSKSTVARGPVACSNPKTLVARGPVACSNSIAKKTLTDALSSKVKIKFSVRSSAHTSSKDILVQAAGSKEGSLNHSVPTGNKEASSNCTLPIAKEAKISRAREIERCSGSIGKQSWSCNDTSTSPLASSVQGEESYLHDEPLSPSRALRAAMLRSRFAGTIVKAQQKALLDHGKNIDPVKLQLEKERLEKRQQEEKARIEAQVKAAEAAAQQKFEEEMRMKRKQEREAARLALRMMKKTVDIDNSDFLKELENFSKTWQANPPGKLIVDFISGDLPPGLGSPLERLGLFMKEDFEDEVEQEMEDRVSPSMDVDIRKDFQEDLGHEMQDSASPVTVIGTKNDVQGVAGHEMEDSGSPATVIDTKKEETEHEMVDSVSPLMDVDTEEGEISC

SEQ ID NO: 5702 - protein, 137 aa, Zea mays
  unsure (1)..(137): unsure at all Xaa locations
  Clone ID: PAT_MRT4577_49027C.1.pep
MADKIFCLLMLLGLSASAGTETIFPQCSQAPIADLLAPYLSPAECSVCENXILEPYRIQQAIGGGILPLXPVFLQQXSALLQKGPLEHXLGQNIRAQQLQQLELANLDGYSEEQQGVPFNQLGGWNCGCYLEQQQLP

SEQ ID NO: 5703 - protein, 70 aa, Zea mays
  unsure (1)..(70): unsure at all Xaa locations
  Clone ID: PAT_MRT4577_49100C.1.pep
KKATNSLIPKLNRSPIKRARGLKFKHPQGRPNGRFSNSLEIKPLLRELRDDLIPHPNPQFRGFRLELXKR

SEQ ID NO: 5704 - protein, 400 aa, Zea mays
  Clone ID: PAT_MRT4577_49162C.1.pep
MTLCPCVLTHISLLVCTQELVLSGYHIQATLLVHLILCLTLIARQWLHPLFLSSNFEALQSLSDNTPETHTKAAWFTSSMDVSPLNTDNIAASDVNQIHSIRPAMTSDESATQNDWWADIMNDDWKDILDATATDSHSKAMIQISNSATSLPAVNQSASSHSREICPVASPPNSSNASVAKQRMRWTPELHECFVDAVNQLGGSEKATPKGVLKLMKVDGLTIYHVKSHLQKYRTARYKPDLSEGTSEKRTATEELVLDLKTSMDLTEALRLQMEVQKRLHEQLEIQRKLQLRIEEQGKYLQMMFEKQSQSSTEKVQDPSSRDTTAKPSSNQSQSTNKDSGATMDPNGTGDIARTAELGERSSELGVKQKLVEIEESGTEVATGDRSKISQEKRRKLQDS

SEQ ID NO: 5705 - protein, 112 aa, Zea mays
  unsure (1)..(112): unsure at all Xaa locations
  Clone ID: PAT_MRT4577_49219C.1.pep
MAAKICCLXLMLLDLSARAATATIFPQCSQAPIACLFPPNLSPAEYLVCENPILQPYRIQQAIAAGILPLSPLFLQQSXGLLQQLPLLHLLAQNMTAQQLQQLVLANLAGYY

SEQ ID NO: 5706 - protein, 546 aa, Zea mays
  unsure (1)..(546): unsure at all Xaa locations
  Clone ID: PAT_MRT4577_49229C.1.pep
MGLGAAMALALGDPPADYASIAAVGLFVALMCVCIVVGHLLEENRWMNESITALFIGLGTGAVILFASSGKHSRVLVFSEDLFFIYLLPPIIFNAGFQVKKKQFFRNFITITLFGAVGTLISFTVISLGALGLISRLNIGALELGDYLALGAIFSATDSVCTLQVLSQDETPFLYSLVFGEGVVNDATSVVLFNAIQNFDPGNISSAKLLNFIGSFLYLFGSSTILGVASGLLSAYTIKKLYFGRHSTDREVSIMMLMAYLSYMLAELLDLSGILTVFFCGIVMSHYTWHNVTESSRVTTKHAFATLSFISETFLFLYVGMDALDIEKWKIVGQTYSPVKSIALSSTILALVLVSRAAFVFPLSFVSNLTKKXPNGKISFRQQVIVWWAGLMRGAVSIALAYNKFTRSGHTQQPSNAIMITSTISVVLFSTIVFGLLTKPLIRLLIPSRHLSREPSALSEPSSPKSFFEQLAANSPGHPDLENGISLRRPASLRFLLVSPARSVHHYWRKFDDSFMRPVFGGRGFVPFVPGSPTESSLPLLPGNEN

SEQ ID NO: 5707 - protein, 127 aa, Zea mays
  Clone ID: PAT_MRT4577_49279C.1.pep
PDTQECSTTCSGAYFIFASVYAVLVQVTWHCVGIFLASSSTILYIMILMSRKCLSHMPQYLMLNKVFRHSWNNIHLRSCQILYWPIVFQDASLSSTVNVEYAHKAAIRKHALWSSIIVDLLMGFVLG

SEQ ID NO: 5708 - protein, 124 aa, Zea mays
  unsure (1)..(124): unsure at all Xaa locations
  Clone ID: PAT_MRT4577_49351C.1.pep
WVGFSSPSGSVSDSRGSSGLGFLNERIEMPAXDVEYRCFIGGLAWATDDHYIHNAFSTYGEDLESKIILDRETHRSSGFGYVTFSTEEAMRNAIEGMNRKELDGRNITSNEAQSQCCRRSSGRG

SEQ ID NO: 5709 - protein, 207 aa, Zea mays
  Clone ID: PAT_MRT4577_49427C.1.pep
MGRGKIEIKRIENSTNRQVTFSKRRNGILKKAREISVLCDAEVGVVVFSSAGKLYDYCSPKTSCVPFPTPWLSKILEKYQTNSGKILWGEKHKSLSAEIDRIKKENDTMQIELRHLKGEDLNSLQPKDLIMIEEALDNGLTNLNEKLTKMMEDENKLLAFKLHQQDIALSGSMRELELGYHPDRDLAAQMPITFRVQPSHPNLQENN

SEQ ID NO: 5710 - protein, 209 aa, Zea mays
  Clone ID: PAT_MRT4577_49429C.1.pep
MGRGKIEIKRIENSTNRQVTFSKRRNGILKKAREISVLCDAEVGVVVFSSAGKLYDYCSPKTSLSKILEKYQTNSGKILWGEKHKSLSAEIDRIKKENDTMQIELRHLKGEDLNSLQPKDLIMIEEALDNGLTNLNEKLMEHWERRVTNTKMMEDENKLLAFKLHQQDIALSGSMRELELGYHPDRDLAAQMPITFRVQPSHPNLQENN

SEQ ID NO: 5711 - protein, 45 aa, Zea mays
  Clone ID: PAT_MRT4577_49460C.1.pep
YCVHPRLQQTHASTSMNCGSMDDVTPVRICSKLILRKKWSFLVLQ

SEQ ID NO: 5712 - protein, 223 aa, Zea mays
  Clone ID: PAT_MRT4577_49736C.1.pep
MATPAVKVYGWAISPFVSRALLALEEAGVDYELVPMSRQDGDHRRPEHLARNPFGKVPVLEDGDLTLFESRAIARHVLRKHKPELLGGGRLEQTAMVDVWLEVEAHQLSPPAIAIVVECVFAPFLGRERNQAVVDENVEKLKKVLEVYEARLATCTYLAGDFLSLADLSPFTIMHCLMATEYAALVHALPHVSAWWQGLAARPAANKVAQFMPVGAGAPKEQE

SEQ ID NO: 5713 - protein, 461 aa, Zea mays
  Clone ID: PAT_MRT4577_49800C.1.pep
MTSSIPKLLLLLFFLSHRSPIARAGDDGSYKVLSMGSPRTDSVCSQSKAVPSSSAGAATVPLHHRHGPCSPLPTKKMPTLEETLHRDQLRAAYIQRKFSGGGGAGGDVQRSDATVPTALGTSLNTLEYLITVGLGSPATSQTMLIDTGSDVSWVQCKPCSQCHSQADPLFDPSSSSTYSPFSCGSADCAQLGQEGNGCSSSSQCQYIVTYGDGSSTTGTYSSDTLALGSSAVRSFQFGCSNVESGFNDQTDGLMGLGGGAQSLVSQTAGTLGRAFSYCLPPTPSSSGFLTLGAAGGSGTSGFVKTPMLRSSQVPTFYGVRLQAIRVGGRQLSIPASVFSAGTVMDSGTVITRLPPTAYSALSSAFKAGMKQYPPAQPSGILDTCFDFSGQSSVSIPSVALVFSGGAVVSLDASGIILSNCLAFAGNSDDSSLGIIGNVQQRTFEVLYDVGRGVVGFRAGAC

SEQ ID NO: 5714 - protein, 606 aa, Zea mays
  Clone ID: PAT_MRT4577_4996C.1.pep
NDLSGGIPAQLARCANLTLLNLAYNRLAGEVPDVLGELRSLQELIVSGNGLGGEFPRSILRCRNLSKLDLSYNAFRGDLPENICNGSRLQFLVLDHNEFSGGIPAGIGGCTRLLELQLGSNNLSGEIPAEIGKVKSLQIALNLSSNHFTGPLPRELGRLDKLVVLDLSRNEISGQIPGDMRGMLSLIEVNLSNNRLAGAIPVFGPFQKSAASSFSGNAELCGDPLTVDCGSSIYGSSYGTETDHRGISYRVALAVVGSCVLIFSLVSLLVALFMWRERQEKEEEEAKKKAAEVAVAAAAPQVVASAVFVESLQQAIDFQSCVKATFKDENEVGDGTFSTTYRAVMPSGTVVSVKKLKSVDRAVVQQRTKVVRELERLAHIGHENLVRPIGYVLYDDVALLLHQHLANGTLLQLLHDNGERRKADWPRLLSIAVDVAQGLAFLHQVATVHLDVCSGNVFLDSRYNALLGEVEISRLLDPTKGTASISAVAGSFGYIPPEYAYTMRVTVPGNVYSFGVVLLEILTSKLPAVDEAFGEGVDLVKWVHAAPARGETPEQIMDPRLSAVSFAWRRQMLAVLRVAMLCTERAPAKRPRMKKVVEMLQEARDS

SEQ ID NO: 5715 - protein, 312 aa, Zea mays
  Clone ID: PAT_MRT4577_49992C.1.pep
MVSSDTIRTAIGVIGNGTALVLFLSPVPTFIRIWKKGSVEQYSPIPYVATLLNCMMWVLYGLPLVHPHSMLVITINGTGMLIQLTYVALFLVYSAGAARRKVSLLLAAEVAFVGAVAALVLALAHTHERRSMVVGILCVLFGTGMYAAPLSVMKMVIQTKSVEYMPLFLSLASLVNGICWTAYALIRFDLYITIPNGLGVLFALAQLVLYAIYYKSTQEIIEARKRKADQIAMTGVVVDGGKTNNQAGAGQYAQARSQRQINYVAAGFYVFCDSICTLAACPSRPMEKKGGRKNVCRYMCSRRITLAHSWWG

SEQ ID NO: 5716 - protein, 243 aa, Zea mays
  Clone ID: PAT_MRT4577_49995C.1.pep
PKDVLYNVRTYVRTCRPTFIRIWKKGSVEQYSPIPYVATLLNCMMWVLYGLPLVHPHSMLVITINGTGMLIQLTYVALFLVYSAGAARRKVSLLLAAEVAFVGAVAALVLALAHTHERRSMVVGILCVLFGTGMYAAPLSVMKMVIQTKSVEYMPLFLSLASLVNGICWTAYALIRFDLYITIPNGLGVLFALAQLVLYAIYYKNTQKIVEARKRKAGQVAMTEVVVDGSRASNNNNGGSGTY

SEQ ID NO: 5717 - protein, 252 aa, Zea mays
  Clone ID: PAT_MRT4577_49998C.1.pep
MISPDTIRTAIGVIGNGTALVLFLSPVPTFIRIWKKGSVEQYSPIPYVATLLNCMMWVLYGLPAVHPHSMLVITINGTGMAIQLTYVALFLLYSAGAARRKVVLLLAAEVGFVGAVAALVLSLAHTHERRSMVVGILCVLFGTGMYAAPLSVMKMVIQTKSVEYMPLFLSLASLVNGICWTAYALIRFDLYITIPNGLGVLFAVAQLVLYAIYYKSTQEIIEARKRKADQIAMTGVVVDGGKTNNQAGAGQY

SEQ ID NO: 5718 - protein, 287 aa, Zea mays
  Clone ID: PAT_MRT4577_50069C.1.pep
MVGLSEGEKHFIRGGIAQDLRTDGRRRLQFRSLSVQTGVIPQANGSARVRLGATEIIASVKAELGKPSILHPDKGKVAIFVDCSPTAEPLFEGRGSEELSAELSVSLQRCLLGGKSGAGAAIDLSSLIVVDGKVCWDLYIDGLVVSSDGNLLDALAVAIKVALSDTGIPKVNVSVSAASDEEPEVDVSDEEFLQFDTSGVPVIITLTKVGRHYIVDATSEEESQMSSAVSVSVNRHGQICGLTKRGGAGLDPSVIFDMISVAKHVSQQFISLLDSEIAAAEAEEEAQ

SEQ ID NO: 5719 - protein, 287 aa, Zea mays
  Clone ID: PAT_MRT4577_50070C.1.pep
MVGLSEGEKHFIRGGIAQDLRTDGRRRLQFRSLSVQTGVIPQANGSARVRLGATDIIASVKAELGKPSILHPDKGKVAIFVDCSPTAEPLFEGRGSEELSAELSVSLQRCLLGGKSGAGAAIDLSSLIVVDGKVCWDLYIDGLVVSSDGNLLDALAVAIKVALSDTGIPKVNVSVSAASDEEPEVDVSDEEFLQFDTSGVPVIITLTKVGRHYIVDATSEEESQMSSAVSVSVNRHGQICGLTKRGGAGLDPSVIFDMISVAKHVSQQFISLLDSEIAAAEAEEEAQ

SEQ ID NO: 5720 - protein, 121 aa, Zea mays
  Clone ID: PAT_MRT4577_50147C.1.pep
RSDVVQVDEVGYDNCDKANALSSYSKGHTYAFQLKDAKDYYFICSYGYCYNGMKLHVTAKSSSSSSSGSDSSSSSDDDTSSPSPPAKKSKAKTSAAPPPSLLAATPMAAAAAAALLLNRML

SEQ ID NO: 5721 - protein, 186 aa, Zea mays
  unsure (1)..(186): unsure at all Xaa locations
  Clone ID: PAT_MRT4577_50148C.1.pep
NLDVDYTAWVKKHKPFYKGDWLIFEYQNGRSDVVQVDEVGYDNCDKANALSSYSKGHTYAFQLKDAKDYYFICSYGYCYNGMKLHVTAKSXPHPPPPPRRRRPDLTPPPPLTTTLPPPRRPPRSPRPRPAPRRHRHSSLPRPWLPPPPPLCSSTGCSDLIWSALLCVCSHVAPDLAWALMSYTTLH

SEQ ID NO: 5722 - protein, 258 aa, Zea mays
  Clone ID: PAT_MRT4577_50149C.1.pep
LVVTCLHCCPSVRPHSPDPGHHHQYPTPITSSDLFLQVQAPASCKLIRLCRSARGRGQRNGGDVAAGAGPPAGRLGGGVGSCRRRLVAANYTVGDEKGWNPDVDYTAWVKKHKPFYKGDWLIFEYQNGRSDVVQVDEVGYDNCDKANALSSYSKGHTYAFQLKDAKDYYFICSYDNCYNGMKLHVTAKSSSSSSSSSPSGSDSSSSSSDNDDDDSSSPSPPAKKSKAKTSAAPPPSVLAATPMATAAAAAALLLNRML

SEQ ID NO: 5723 - protein, 105 aa, Zea mays
  unsure (1)..(105): unsure at all Xaa locations
  Clone ID: PAT_MRT4577_50413C.1.pep
MAVKIFRLRMLLGLSASAATATIFPHCSQAPIAYFHSPNLSPAWSLVCENPLLQPYMIQQAISAGILPXDPRFXQQSSCLLQQLHLAHLLAQNIMSQQLQQLELA

SEQ ID NO: 5724 - protein, 104 aa, Zea mays
  Clone ID: PAT_MRT4577_5049C.1.pep
MSGRGKSGGKGLGKGGAKRHRKILRDNIQGITKPAIRRLARRGGVKRISGLIYEETRGVLKIFLENVIRDSVTYTEHAKRKTVTSLDVVYALKRQGRTLYGFGA

SEQ ID NO: 5725 - protein, 206 aa, Zea mays
  Clone ID: PAT_MRT4577_50571C.1.pep
MAAAAVALSNGSGGDSKAEFAEIYSRLKEEMLEDPAFEFTDESLQWIDRMLDYNVLGGKCNRGLSVIDSYKTLKGVDVLRKEETFLACTLGWCIEWLQAYFLVLDDIMDNSQTRRGQPCWFRVPQVGLIAVNDGIILRNHISRILQRHFRGKPYYVDLIDLFNEVEFKTASGQLLDLITTHEGEKDLTKYNLNVHRRIVQYKTAYY

SEQ ID NO: 5726 - protein, 163 aa, Zea mays
  Clone ID: PAT_MRT4577_50591C.1.pep
MARVYVGNLDSRVTSGELEDEFRVFGVLRSVWIARKPPGFAFIDFDDRRDAEDAIRDLDGKNGWRVELSRSTSGRGGRDRHGGSESKCYECGETGHFARECRLRIGSGGLGSGRRRSRSRSRSRSPRYRRSPSYNRRSYSPRYRSPRRRTPSPARGRSYSRSP

SEQ ID NO: 5727 - protein, 163 aa, Zea mays
  Clone ID: PAT_MRT4577_50592C.1.pep
MARVYVGNLDARVTSGELEDEFRVFGVLRSVWVARKPPGFAFIDFDDRRDAEDAIRDLDGKNGWKVELSRSTNGRGSRDRHGGSESKCYECGETGHFARECRLRIGSGGLGSGRRRSRSRSRSRSPRYRRSPSYNRRSYSPRYRSPRRRTPSPARGRSYSRSP

SEQ ID NO: 5728 - protein, 141 aa, Zea mays
  Clone ID: PAT_MRT4577_50627C.1.pep
MSDSEEHHFESKADAGASKTYPQQAGTVRKNGFIVIKNRPCKVVEVSTSKTGKHGHAKCHFVAIDIFNGKKLEDIVPSSHNCDVSLLTSDGNTKDDLRLPTDETLVAQIKEGFESGKDLVVTVQSAMGEEQICALKDVGPK

SEQ ID NO: 5729 - protein, 160 aa, Zea mays
  Clone ID: PAT_MRT4577_50630C.1.pep
MSDSEEHHFESKGDDGASKTYPKEAATVRKNGFIVIKNRPCKVVEVSTSKTGKHGHAKCHCAAIDIFNGEKLEDIAPSSHFCDIPHVNRTEYQLIDISEDGFVSLLTSDGNAKDDLRLPTDETLVVQIRQGFESAKDLVVTVQSAMGEEQICALKDVAPK

SEQ ID NO: 5730 - protein, 161 aa, Zea mays
  unsure (1)..(161): unsure at all Xaa locations
  Clone ID: PAT_MRT4577_50631C.1.pep
MTDGEEHHLXTNADAXGTSNTYHKKGATARRNGSIVMKNRTCKGAEASTXKTGKHGHAKCHFVVIDIFNGKKLEDIVPSSHNCDIPHVNRTEYQLIDILEDGFVSLLTSDGNTKDDLRLPTDETLAAQIKEGHESGKDLVATVQSAMEEEQICALKDVAPK

SEQ ID NO: 5731 - protein, 618 aa, Zea mays
  unsure (1)..(618): unsure at all Xaa locations
  Clone ID: PAT_MRT4577_50635C.1.pep
EQINVTYKIMRRIEAEEWSLDASEIVIASTRQEIEEQWNLYDGFEVMLARKLRALVKRGANCYGRYMPRMVIIPPGVEFGQLIHDFDMYGDEDNQSPASEPSIWFEIMRFFTNPRKPMILAIARPYSEKNIATLVKAFGECHPLRELANLTLIMGNREAISKMNKISAAVLTSVLTLIDEYDLYGQVAYPKLHKHSEVPDIYRLAARTKGAFVNVAYFEQFGVTLIEAAMHGLPVIATKNGAPVEIYQVLENGLLVDPHDQHAIADALYKMLSEKQFWSRCRENGLKNIHQFSWPEHCKNYLSRISSLGPRHPAFACKEDHKVPVKCRKHISIIAVDSVNKEDLIQIIRNSVEATRTGTMSGSTGFVLSTSLTIAELQSVIVRTGMLPTDFDAFICNSGSDIYYPLQSSDVPSNSRVTFALDHNYRSHIEYRWGGEGLRKYLVKWASSVVERRGRTXEKQVIFEDSEHSSTYCLAFKVINPSHLPPLKELQKLMRIQSLRCHALYNHGATRLSVIPIHASRSQALRYLSICWGIELPDAVVIVGETGDSDYEELFGGLHKTVILKGGFNTPANRIHTVRRYPLQDVVALDSSNIIAIEGFSTGDIRSAMQQQLGIPTR

SEQ ID NO: 5732 - protein, 186 aa, Zea mays
  unsure (1)..(186): unsure at all Xaa locations
  Clone ID: PAT_MRT4577_50641C.1.pep
SPSAPLSISLLLRLLLEPTKPGDRHVWTQEEHHFESKADAGASKTYPQQGGTGRKNGFIVIKNRPCKVVEVXSTSKTGKHGHDKCHFVAVDIFHGKWLEDIVPSSHDCDIPHVNRTEYQLIEISEDGFVSLLTSHGDTMDDLRLPTDETLVDQIEEGFESVKDLAVTVQSAMRQEHICALKDVVPK

SEQ ID NO: 5733 - protein, 198 aa, Zea mays
  Clone ID: PAT_MRT4577_50802C.1.pep
MSRHPEVKWAQRIDKVYITVQLPDAKDAKVNLDPDGVFTFSGSAGTNLYELKLDLNDKVNVEASKISVGVRSIFCIVEKAEAKWWKKLVRDDQRAPHFVKVDWDKWVDEDDDGADINMDGMDFSNFGGMGGMGGMGDMAGMGGLGGMGGMGGMGGMGMDDFEDESDEEEVSKPQAADNAVEAEETESAEAKTEAAQSS

SEQ ID NO: 5734 - protein, 163 aa, Zea mays
  Clone ID: PAT_MRT4577_50804C.1.pep
MSRHPEVKWAQRIDKVYITVQLPDAKDAKVNLEPDGVFTFSGSVGTNLYELKLDLNDKVNVEASKISVGVRSIFCIVEKAEAKWWKKLVRDDQRAPHFVKVDWDKWVDEDDDGADVNLDGMDFSNFGGMGGMGGMGGMGDMAGVGGLGGMGGMGGMGGMGMDD

SEQ ID NO: 5735 - protein, 196 aa, Zea mays
  unsure (1)..(196): unsure at all Xaa locations
  Clone ID: PAT_MRT4577_50808C.1.pep
MSRHPEVKWAQRIDKVYITVQLPDAKDAKVNLDPDGVFTFSGSAGTNLYELKLDLNDKVNVEASKISVGXRSIFCIVEKAEAKWWKKLVRDDQRAPHFVKVDWDKWVDEDDDGADINMDGMDFSNFGGMGGMGDMGGLGGMGGMGGLGGMGGMGMDDFEDESDDEEEVSKPQAADKAVEAEETESAETKTEAAQSS

SEQ ID NO: 5736 - protein, 192 aa, Zea mays
  Clone ID: PAT_MRT4577_50812C.1.pep
MSRHPEVKWAQRIDKVYITVQLPDAKDAKVNLEPDGVFTFSGSAGTNLYELKLDLNDKVNVEASKISVGVRSIFCIVEKAEAKWWKKLVRDDQRAPHFVKVDWDKWVDEDDDGADVNLDGMDFSNFGGMGGMGGMGDMAGLGGLGGMGGMGMDDFEDDSDEEEVSKPQAAGHAAEAEKTESAEAKTESAQSS

SEQ ID NO: 5737 - protein, 211 aa, Zea mays
  Clone ID: PAT_MRT4577_50814C.1.pep
MSGIVFCSRHPEVKWAQRIDKVYITVQLPDAKDAKVNLDPDGVFTFSGSAGTNLYELKLDLNDKVNVEASKISVGVRSIFCIVEKAEAKWWKKLVRDDQRAPHFVKVDWDKWVDEDDDGADINMDGMDFSNFGGMGGMGGMGGMGDMAGMGGLGGMGGMGGLGGMGGMGMDDFEDESDDEEEVSKPQAADKAVEAEETESAETKIEAAQSS

SEQ ID NO: 5738 - protein, 131 aa, Zea mays
  Clone ID: PAT_MRT4577_50828C.1.pep
MSEEKHHHFFNHHKKDEEQPAGEYGYSETEVVTATGEGEYERYKKEEKEHKHKQHLGEAGAIAAGAFALYEKHEAKKDPEHAHRHKITEEVAAAAAVGAGGYVFHEHHEKKKDHKDAEEASGEKKHHHLFG

SEQ ID NO: 5739 - protein, 186 aa, Zea mays
  unsure (1)..(186): unsure at all Xaa locations
  Clone ID: PAT_MRT4577_50839C.1.pep
CTNNGGQQLCLLMLLGAFARGATATILPQCWXAAIDSLLPPYLSPAVSSVYEDPIVQPYWMQQGVTAGILPLSPLFLQQSSALLQQVPSVHLLAQNIMGPQLQQLVLANHVAYCQQQEVLACYQLPALNSASYLQQQQLPFCQVPAAYPQQFLACTQLATXNTPADLQQQQLLPFMHLVGVSTATF

SEQ ID NO: 5740 - protein, 128 aa, Zea mays
  Clone ID: PAT_MRT4577_50881C.1.pep
APQARRVQIPQSSCSTPLSSSNSAAMYGRGKGGKGLGKGGAKRHRKVLRDNIQGITKPAIRRLARRGGVKRISGLIYEETRGVLKIFLENVIRDAVTYTEHARRKTVTAMDVVYALKRQGRTLYGFGG

SEQ ID NO: 5741 - protein, 136 aa, Zea mays
  Clone ID: PAT_MRT4577_50884C.1.pep
HWVPRGRPGQSTAAGSISQSSCSTPLSSSNSAAMSGRGKGGKGLGKGGAKRHRKVLRDNIQGITKPAIRRLARRGGVKRISGLIYEETRGVLKIFLENVIRDAVTYTEHARRKTVTAMDVVYALKRQGRTLYGFGG

SEQ ID NO: 5742 - protein, 128 aa, Zea mays
  Clone ID: PAT_MRT4577_50885C.1.pep
TRVIAASSIPQSSCSTPLSSSNSAAMSGRGKGGKGLGKGGAKRHRKVLRDNIQGITKPAIRRLARRGGVKRISGLIYEETRGVLKIFLENVIRDAVTYTEHARRKTVTAMDVVYALKRQGRTLYGFGG

SEQ ID NO: 5743 - protein, 131 aa, Zea mays
  Clone ID: PAT_MRT4577_50886C.1.pep
RPGPEASRRVQIPQSSCSTPLSSSNSAAMSGRGKGGKGLGKGGAKRHRKVLRDNIQGITKPAIRRLARRGGVKRISGLIYEETRGVLKIFLENVIRDAVTYTEHARRKTVTAMDVVYALKRQGRTLYGFGG

SEQ ID NO: 5744 - protein, 204 aa, Zea mays
  Clone ID: PAT_MRT4577_50888C.1.pep
MRFTPPLRASLRIAGLVMPWMLSRSTLRWRFAPPLPRPLPPLPRPDIVAAGALSFTLSSPRRKWGIFLTSSRSRAAARDLELVQISQSSCSTPLSSSNSAAMSGRGKGGKGLGKGGAKRHRKVLRDNIQGITKPAIRRLARRGGVKRISGLIYEETRGVLKIFLENVIRDAVTYTEHARRKTVTAMDVVYALKRQGRTLYGFGG

SEQ ID NO: 5745 - protein, 145 aa, Zea mays
  Clone ID: PAT_MRT4577_50890C.1.pep
VSSLIRHPRLYTLCFRLVCCARRVQIPQSSCSTPLSSSNSAAMSGRGKGGKGLGKGGAKRHRKVLRDNIQGITKPAIRRLARRGGVKRISGLIYEETRGVLKIFLENVIRDAVTYTEHARRKTVTAMDVVYALKRQGRTLYGFGG

SEQ ID NO: 5746 - protein, 107 aa, Zea mays
  Clone ID: PAT_MRT4577_51028C.1.pep
VRIPVDHAPHWHLKGPLVPTMQPKYLPLMLLAFLKGCYGTIFPKCSRLYSFPLPRTFTSGAWDGKPQFSTLRIHRQSQLASYLITLVPPPIIALLHQLPWCHYWHKT

SEQ ID NO: 5747 - protein, 105 aa, Zea mays
  Clone ID: PAT_MRT4577_51197C.1.pep
LKKKGGAFFYRMGSQIFLHTDMLIVDDPADHLQLHTYLFRLIQHVATSEETYLQTTNLHNNNPALLLHRITNRQPRNCDNFTYTTQNHSDTTSPDYSLSTPDFSS

SEQ ID NO: 5748 - protein, 83 aa, Zea mays
  unsure (1)..(83): unsure at all Xaa locations
  Clone ID: PAT_MRT4577_51313C.1.pep
NRIEMAASDVEYRCFVCGLTWATDDHSLHNSFSTYCEVLXSKIILYLETQKSRSFCFFTFFTDDAIHNAIXGINGNELYRRNI

SEQ ID NO: 5749 - protein, 103 aa, Zea mays; identical to SEQ ID NO: 3995
  Clone ID: PAT_MRT4577_51322C.1.pep

SEQ ID NO: 5750 - protein, 54 aa, Zea mays
  Clone ID: PAT_MRT4577_51573C.1.pep
TVGPARPSYPVRDRDVYPSPEGLFSFASCLLFPICVFDCKVALCQLLVLCSSSV

SEQ ID NO: 5751 - protein, 70 aa, Zea mays
  Clone ID: PAT_MRT4577_51599C.1.pep
STCEARTYHHIKNIRPTGREHREKLLSNRQFMCIVRYPPSCTAVYLASLFVFSPWPLTLKALLLALLFSL

SEQ ID NO: 5752 - protein, 475 aa, Zea mays
  Clone ID: PAT_MRT4577_51643C.1.pep
MAGGFRVLHLVRPFLAFLPEVQSADRKIPFREKVIYTVISLFIFLVCSQLPLYGIHSTTGADPFYWMRVILASNRGTVMELGITPIVTSGMVMQLLVGSKIIEVDNSVREDRALLNGAQKLLGILIAIGEAVAYVLSGMYGSVSQLGTGNAILIILQLFFAGIIVICLDELLQKGYGLGSGISLFIATNICENIIWKAFSPTTINSGRGAEFEGAVIALFHLLITRTDKVRALHEAFYRQNLPNVTNLLATVLVFLIVIYFQGFRVVLPVRSKNARGQQGSYPIKLFYTSNMPIILHSALITNLYFISQLLYRKYSGNFLVNLLGKWKESEYSGHSVPVGGLAYYVTAPSSLADVLANPVHALFYVVFMLSACALFSKTWIEVSGSSAKDVAKQLKEQQMVMPGHRESNLQRELNRYIPTAAAFGGVCIGALTVLADFMGAIGSGTGILLAVTIIYQYFETFEKERATELGFFGF

SEQ ID NO: 5753 - protein, 120 aa, Zea mays
  unsure (1)..(120): unsure at all Xaa locations
  Clone ID: PAT_MRT4577_51656C.1.pep
MGDXEEHHFESXAHPRASKTYPQQAGTGRKNGFIXIKNRPRRXXXVSTSKTGXHGHAKCHFGAIDIFNGKKLEDIGPSAHNCDIPDVNRTEYQVXGISXDGFGSLLTSNGNTKEDLKLPT

SEQ ID NO: 5754 - protein, 94 aa, Zea mays
  Clone ID: PAT_MRT4577_51661C.1.pep
PKDIRFPAGNQVSLAARHLIYRLFPPDPPNRLGSYEGAMGIKPPPFFCGINWALVCAPPPPKLGAPPPDPLGAPLPPPAGDGAPPHMFCSSLGP

SEQ ID NO: 5755 - protein, 220 aa, Zea mays
  Clone ID: PAT_MRT4577_51897C.1.pep
MADEIDTRPASAGSRGRPAHATEDDDREEGEIAADAPSPALPAAHPLEHSWTFWFDNPHGKNKMAAWGSSIRPIHTLSTVEDFWGLYNNIHHPSKLIGGADFHCFKNKIEPKWEDPICANGGKWTISCGRGKSDTFWLHTLLAMIGEQFDYGDEICGAVVSVRGKQERIAIWTKNAANEAAQVSIGKQWKELLDYKDSIGFIVHDDAKKMDKGLKNRYTV

SEQ ID NO: 5756 - protein, 220 aa, Zea mays
  Clone ID: PAT_MRT4577_51899C.1.pep
MADEIDTRPAPAGSRGRPAHATEDDDREEGEIATDAPSPALPAAHPLEHSWTFWFDNPHGKNKMAAWGSSIRPIHTFSTVEDFWGLYNNIHHPSKLIGGADFHCFKNKIEPKWEDPICANGGKWTISCGRGKSDTLWLHTLLAMIGEQFDYGDEICGAVVSVRSKQERIAIWTKNAANEAAQISIGKQWKEFLDYKDSIGFIVHDDAKKMDKGLKNRYTV

SEQ ID NO: 5757 - protein, 218 aa, Zea mays
  Clone ID: PAT_MRT4577_51900C.1.pep
MAEETDTRPASAGSRGRPAPEDDDREEGEITDLACAPSPPATHPLEHSWTFWFDNPQSKSKQAAWGSSIRPIHTFSTVEEFWGLYNNINHPSKLIVGADFHCFKNKIEPKWEDPICANGGKWTISCGRGKSDTFWLHTLLAMIGEQFDYGDEICGAVVSVRGKQERIAIWTKNAANEAAQVSIGKQWKELLDYKDSIGFIVHDDAKKMDKGLKNRYTV

SEQ ID NO: 5758 - protein, 68 aa, Zea mays
  unsure (1)..(68): unsure at all Xaa locations
  Clone ID: PAT_MRT4577_51967C.1.pep
GYLRFRGRAIAAADAEYRTFVGGLAWATNNXSLENAFAFYGEILYSKVITDRETGRFRGLCFVTFSSD

SEQ ID NO: 5759 - protein, 136 aa, Zea mays
  unsure (1)..(136): unsure at all Xaa locations
  Clone ID: PAT_MRT4577_52020C.1.pep
MGGGSWQLHRIDNKINRQGMFSKRRNGLMKKDHDISVLCNAXVLLVVFSTKGNLNEYSSQSSMEGILERYQRFXSFEDMAVLNPRMENQKNWGDEYVRIKYKLDALHKSQRLLLXQQVSSLTIEELRQLSAQLDRS

SEQ ID NO: 5760 - protein, 133 aa, Zea mays
  unsure (1)..(133): unsure at all Xaa locations
  Clone ID: PAT_MRT4577_52027C.1.pep
NPFLQPYRIQQXXAAGILPXSPLFLXXSSALLQQLPLGRVLXQNIRAQXLQXLVXANLAAYSQHQPFLPFXQXAALXSASYLXHXLPFSPLAAACXQRFLPSHXLAAFGSPAYLRAGRLLPFGRLAGVGPAAL

SEQ ID NO: 5761 - protein, 100 aa, Zea mays
  unsure (1)..(100): unsure at all Xaa locations
  Clone ID: PAT_MRT4577_52063C.1.pep
MAAQISRVLMLLGISASAATATIFPQCSQAPIASLIPQYLLPAVSXICENPILQPYRIQQAIAAAILPLXPLLVQHSSDLLQHLPLVHLLSQYIRAQQLQ

SEQ ID NO: 5762 - protein, 84 aa, Zea mays
  unsure (1)..(84): unsure at all Xaa locations
  Clone ID: PAT_MRT4577_5207C.1.pep
LDCRNITFNXAQSRGGRGSVCSGRCCGGRGCRGYSGGXRRDGGCGYSGGRGYCGCCGGYGGGGGGYVHGNRGGCYGNSDGNWMN

SEQ ID NO: 5763 - protein, 115 aa, Zea mays
  unsure (1)..(115): unsure at all Xaa locations
  Clone ID: PAT_MRT4577_52121C.1.pep
MLDWGEHHFESNADAVAFKTYPQQAGTVRTNRFILIKNRPCKAEQVSTSQTGKHGHAXCHFVSIYIFNGKKLQDIVPSTQKCDIPDVNYTEYQLIDISQDGFVSLFTLDGNTKDD

SEQ ID NO: 5764 - protein, 110 aa, Zea mays
  Clone ID: PAT_MRT4577_5234C.1.pep
MAATKLQALWNHPAGPKTIHFWAPTFKWGISIANIADFAKPPEKISYPQQVAVACTGLIWSRYSLVITPRNWNLFSVNVAMAGTGLYQLSRKIRQDYLSDEKDAASQLEA

SEQ ID NO: 5765 - protein, 110 aa, Zea mays
  Clone ID: PAT_MRT4577_5235C.1.pep
MAATKLQAFWNHPAGPKTIHFWAPTFKWGISIANIADFAKPPEKISYPQQVAVACTGIIWSRYSLVITPKNWNLFSVNVAMAGTGLYQLSRKIRQDYLSGEKDAAPQLQE

SEQ ID NO: 5766 - protein, 296 aa, Zea mays
  Clone ID: PAT_MRT4577_52373C.1.pep
MFRRKHGSDVNSDDAEQREAKISELKAALGTLSARGEKYCSEACLRRYLEARNWNVAKSRKMLEESLKWRAAYKPEDIRWPDVSVEAETGKMYRASFRDREGRTVVVMKPTKQNTSSHEGQIRFLVYTLENAIFSLPEGQEKMVWLIDFTGWTVSHASPIKTCRETANILQNHFPERLAIGFLFNPPKVFEAFYKVIKIFLDPKSVEKVNFVYEKDEESMKVMYKYIDPEVLPVEFGGKSNVVYNHEEYSELMRQDDIKTASFWAVDAKTNHANPAINGTLVPEVAPQSSLAAKAS

SEQ ID NO: 5767 - protein, 110 aa, Zea mays
  Clone ID: PAT_MRT4577_5237C.1.pep
MAATKLQALWNHPAGPKTIHFWAPTFKWGISIANIADFAKPPEKISYPQQVAVTCTGLIWSRYSLVITPRNLNLLSVNVAMAGTGLYQLSRKIRQDYFSDEKDAAPQLEA

SEQ ID NO: 5768 - protein, 110 aa, Zea mays; identical to SEQ ID NO: 5764
  Clone ID: PAT_MRT4577_5238C.1.pep

SEQ ID NO: 5769 - protein, 112 aa, Zea mays
  Clone ID: PAT_MRT4577_52399C.1.pep
SSLSCCPRTGRPRTRKDPEAEVRHGHNYVPRDEQFSEVKQLTFGATTLRSGLHALLPAIRPMLIKRELRFPHFPAIDDLYSDGIPLPAQTGLGAIRSIVPRVVKLVEDTTEH

SEQ ID NO: 5770 - protein, 110 aa, Zea mays; identical to SEQ ID NO: 5765
  Clone ID: PAT_MRT4577_5241C.1.pep

SEQ ID NO: 5771 - protein, 55 aa, Zea mays
  Clone ID: PAT_MRT4577_52442C.1.pep
ACSCRSTIDVLARCVSCIGLAHNQVVDHACTSDLLGLVSLRSMSSSSSCTLRDML

SEQ ID NO: 5772 - protein, 63 aa, Zea mays
  Clone ID: PAT_MRT4577_5249C.1.pep
AIPRSCSGSIGLWGWGSRSVIYLALAGMAECLLPSTHLHGTRTGTRRLGYTDPGRVAGLAGAG

SEQ ID NO: 5773 - protein, 75 aa, Zea mays
  unsure (1)..(75): unsure at all Xaa locations
  Clone ID: PAT_MRT4577_5251C.1.pep
GSLGFFGGARAAADVEYRCFLGGLAWATSNEWLKNAFAFYGESLHSKVMTDRDTTRSRXSCLGTLSYENYMLDAL

SEQ ID NO: 5774 - protein, 43 aa, Zea mays
  unsure (1)..(43): unsure at all Xaa locations
  Clone ID: PAT_MRT4577_52526C.1.pep
MAAADVEYRCFVGGLAWATNNESMENALGYYGEILDXKVITDR

SEQ ID NO: 5775 - protein, 546 aa, Zea mays
  unsure (1)..(546): unsure at all Xaa locations
  Clone ID: PAT_MRT4577_52559C.1.pep
MALGEGGDHGAALPLIADQAKHAAAGGIVRSGSMWTAAAHVITAVIGSGVLSLAWSIAQLGWVAGPAAMLVFAAVTALQSTLFADCYRSPDPEHGPHRNRTYAKAVDRNLGXTARGCACFCSTRPCSAMASPTPSRPPSAAGKKHTWACGSLQYVSLYGCGVAYXITTATSIXAAVGRAILKANCYHEHGHDAHCDYDGNYYMLIFGGVQLLLSFIPDFHDMAWLSVVAAAMSFSYAFIGLGLGLARTIANGTIKGSITGVRMRTPMQKVWRVSQAIGDIAFAYPYSLILLEIQXVTCSRTPFFQKTLLATKHPLAVSVXGLKHSNELYLFTLRQXDTLKSPPAENKTMKRASMISILVTTFFYLCCGCLGYAAFGSDAPGNLLTGFGLYGPYWLIDFANACIILHLLGGYQVYSQPIFQFAERLLAERFPDSGFVNGGSYTVRFACLRACRVNPLRVCLRTLYVASTTAVAVALPYFNEVLALLGALSFWPLAIYFPVEMYFIQRNVRRWSARWVVLQTFSVVCLLVSAFALVGSIEGLISKKLG

SEQ ID NO: 5776 - protein, 335 aa, Zea mays
  Clone ID: PAT_MRT4577_52690C.1.pep
MGECEDGKEYRCWEELLPDALGLIFRNLPLQEVLTVLPRVCKSWGRVVAGPYCWQEIDIEEWSQQQSKPEQIGRMVELLVGRSGGSCRRISVSGLPCDPLFSFIADNARALGTLEIPRSEISDSVVEAVAPRLSNVTFLDISSCTKIGARALEAFGRHCRSLVGLRRVMHPIDLADKVCQHDEAHAIARSMPRLRHLEMGYMLVATEAVLEILGQCRELKFLDLRGCWAVDDRFLRERHPGLRVLGPRVVDDCYENSYWEECSDYYSDEDEDYDDDVVSWGLFVDDDDDYYYAVGSDDDEAIWDDAQGLENLEVRFYGGGGFGESFAGFDWPPSP

SEQ ID NO: 5777 - protein, 99 aa, Zea mays
  Clone ID: PAT_MRT4577_52894C.1.pep
RTRGQLAAVYPQQFLPFNQRAGLNSAAYLQQQQLPPFIQLADVSPVALLTHQQLLSFYLHAAPNACTLLQLEQLLAFNPIGLTNPTTFYPQPIIGGALL

SEQ ID NO: 5778 - protein, 224 aa, Zea mays
  Clone ID: PAT_MRT4577_52917C.1.pep
MVRGKTELKRIENATSRQVTFSKRRNGLLKKAFELSVLCDAEVGLVVFSPRGKLYEFASAASLQKTIDRYRTYTRENVNNKTVQQDIQQVKADAVSLASRLEALEKTKRMFLGENLEECSIEELHNLEVKLAKSLHVIRGKKTQLLEQQISKLKEKERTLLQDNKELRDKQRNLQSPPEAPPDLNRCVPPWPRSLPAPSNDMDVETELYIGLPGRERSSNRDSD

SEQ ID NO: 5779 - protein, 256 aa, Zea mays
  Clone ID: PAT_MRT4577_52946C.1.pep
MFPPGLIHHRPDATAPGDGPPRSGPGGPSLVLTADPKPRLRWTADLHERFVDAVAQLGGPEKATPKTILRTMGVKGLTLFHLKSHLQKYRLGKQSGKEGSEQSKDASYLLDAQSGMSVSPRVAAQDMKESQEVKEALRAQMEVQRRLHEQVEQVQKRVQIRMEALEKYIDSILESACKMVTEQFASSGFSISNPDLPEISPGGVMCGSTDTLGSSVLNQLSVSSIDSHSPGGKPSPSGMEGPTLLQKSPELKRRSS

SEQ ID NO: 5780 - protein, 186 aa, Zea mays
  Clone ID: PAT_MRT4577_52981C.1.pep
MAPKRSSEERAAAEQEQPRLRGVRKRPWGRYAAEIRDPVRKARVWLGTFDTPEQAARAYDAAARRLRGPRATTNYPGDVVREAPCTAPALAASASGSTESSSSSSSRDDGHPPPPMPPAPSSLGLGLGLFPATVATQPCLFLDPAPVEREEGERERSCCSRSPPSVLAGLGFDFDLNLPPPAEMVM

SEQ ID NO: 5781 - protein, 356 aa, Zea mays
  unsure (1)..(356): unsure at all Xaa locations
  Clone ID: PAT_MRT4577_53153C.1.pep
MATVEVVVANGLGGADTKTVFKETYSKLKEEMLDDPAFEFTDESLQWIDRMLDYNVLGGKCNRGLSVIDSYRILKGVDVLSKEETFLACTLGWCIEWLQAYFLVLDDIMDNSQTRRGQPCWFRVPQVGLIAVNDGIILRNHISRILQRHFKGKPYYVDVIDLFNEVEFKTASGQMLDLITTHEGEKDLTKYNLTVRRHIVQYKTAYYSFYLPVACAXLLLAGENLDNFGDVKNILVEMGTYFQVQDDYLDCFGDPEFIGKIGTDIEDYKCSWLVVQALEHADEKQKNILFESYGKSDPACVAKVKDLYKELKLEEVFQAYERESYNKLIADIEAQPSKAVQSVLKSFLHKIYKRDK

SEQ ID NO: 5782 - protein, 355 aa, Zea mays
  Clone ID: PAT_MRT4577_53154C.1.pep
MATAEVVVANGSGGADTKTAFKEIYSKLKQEMLEDPAFEFTDESLQWIDRMLDYNVLGGKCNRGLSVVDSYKILKGVDVLSKEETFLACTLGWCIEWLQAYFLVLDDIMDNSQTRRGQPCWFRVPQVGLIAVNDGIILRNHISRILQRHFKGKPYYVDIIDLFNEVEFKTASGQMLDLITTHEGEKDLTKYNLTVHRRIVQYKTAYYSFYLPVACALLLAGENLENFVDVKNILVEMGTYFQVQDDYLDCFGDPEFIGKIGTDIEDYKCSWLVVQALERAAENQKSILFENYGKSDPACVAKVKDLYKELKLEEVFHEYERESYNKLIADIEAQPSKAVQTVLKSFLHKIYKRDK

SEQ ID NO: 5783 - protein, 160 aa, Zea mays
  Clone ID: PAT_MRT4577_531C.1.pep
MDAGAKVVKKAAAGRRGGGGPKKKPVSRSVKAGLQFPVGRIGRYLKQGRYSQRVGTGAPVYLAAVLEYLAAELLELAGNAARDNKKNRIIPRHVLLAIRNDEELGKLLAGVTIAHGGVLPNINPVLLPKKTAVAAAKEGKEKKSPKKAAAAKSPKKVAAS

SEQ ID NO: 5784 - protein, 74 aa, Zea mays
  unsure (1)..(74): unsure at all Xaa locations
  Clone ID: PAT_MRT4577_53252C.1.pep
MVLSHASSGRNDDAVASTFASRYVRKRLPRYRMPERFIPAQASQQIISXELMLDGYPCLNLTSFVTTWMETECD

SEQ ID NO: 5785 - protein, 243 aa, Zea mays
  Clone ID: PAT_MRT4577_53460C.1.pep
MASADLLRKEEEFYSSLFDSAKGDGVKSRSQVIERKIESLEDMATKVSNRRSRRWLNDRLLIELVPRLHVEEIKGLFAPPPWGEELPLSAFCRTSVSDWEAFRSIDMDAEARLMQHMKRSSEKQRTHVDEDELIALNAWRRIGRQTREAIKKKFLPDLLQIYEEQVRAFIEGTGDSDVLVLNVQDPFQRLLLHGVCEFYNVTSMTTSSVRDGKPWKSTTIKKRHVTGLPPRITLVSFLRMRKN

SEQ ID NO: 5786 - protein, 44 aa, Zea mays
  Clone ID: PAT_MRT4577_5370C.1.pep
DPVVLAATSVSLSRMCNYTEPGFVSSHKQCCKILYVLRASVAVL

SEQ ID NO: 5787 - protein, 249 aa, Zea mays
  Clone ID: PAT_MRT4577_53779C.1.pep
MDPSGGAFLPPLQQGSSSFPRSSSNASLARSGSGGGGVGAGRGTRGRKMMRRVCRGVITFIFAIAGLFLGAVTGGLIGLATESGLFRGTGIGAITGALVSIEVVDSSIRLWQARRSGIWSILYVLNVIYSLLTGRLVREKVDPAVQRVVRSQMNAVDSSPFRESPDLFEVEATNGMPRASIDKLPESWITEEYRRDAVGDLSGCSVCLQDFQVGEKVRSLPDCWHVFHVPCIDGWLIKHGSCPLCRRKL

SEQ ID NO: 5788 - protein, 77 aa, Zea mays
  unsure (1)..(77): unsure at all Xaa locations
  Clone ID: PAT_MRT4577_53816C.1.pep
EGPGGGARGLRGFPLPRAPREEEGPQGARGGRRQKKPPLLRLIDPPVWWSXPCATRGCKSDIKPPPCCARVRMYALV

SEQ ID NO: 5789 - protein, 71 aa, Zea mays
  unsure (1)..(71): unsure at all Xaa locations
  Clone ID: PAT_MRT4577_53953C.1.pep
SRWRASDVEYRCFVGCLNWTTDDHSLHNSFITYXGNLXSKIILYRVTQMSLIFCFVTLSTDDALRYAFYVM

SEQ ID NO: 5790 - protein, 92 aa, Zea mays
  unsure (1)..(92): unsure at all Xaa locations
  Clone ID: PAT_MRT4577_54029C.1.pep
LVSLGXRDRTTGXXRKXGVAISASEGAIRTTAHASIAMPRSGGGGNGGGISSRSRVMTNLPDGIRFHPTDEDLMEHYLMRQAASMTRNAPII

SEQ ID NO: 5791 - protein, 80 aa, Zea mays
  Clone ID: PAT_MRT4577_54131C.1.pep
RVRGTILKAHHTALLYHGKNIDPVRSQQEKERLEKRQHEEKARIDAHVKAAESPAQQNVEEDMRMNRTHDKDARRLALRM

SEQ ID NO: 5792 - protein, 116 aa, Zea mays
  unsure (1)..(116): unsure at all Xaa locations
  Clone ID: PAT_MRT4577_54283C.1.pep
PRVRTVGEYFYSETYVVTASSVFDYERYNMEDNEYKHKQHLSEAVAIRRGSFSLYQKHXAKKDPXHAHSHKITDDVAASAAVCACGYVFHEHHXMKNDHNDSDEASCENNHHHLFG

SEQ ID NO: 5793 - protein, 400 aa, Zea mays
  Clone ID: PAT_MRT4577_54302C.1.pep
MEAPRPNNGRKRKPTPPAGLGALHDDLLERVLARLPPATYFRLRAVCSRWRAAAASPTFLHACARVPSRDPWFLMLSDSDSGPRPPVAFDAAGRSWNRCHAAPGAAVPVAASAGLVLYRAPATGALTVANPLTGASRALPSPPQQAARQLQAIAMYGAGGPYRVALFAGDLPDDLSMAVYDSSSNSWEGPLPLARKPGDDSCPDAPAPDDTVYFLSKSGDVVATNMQRSASKQYSSSVVVRRDGDGDAAFAYFLSYSGTVVACDTARRTFAELPRILPVYFEYSIDVVACGAAAYAVVLSEYLGTASLRVWEFAGGAWRQVAAMPPAMSHGFHGTRPDINCVGHGDRLMVCVTSAEANACFMCDVASNQWEELPKYVNADGEASEFLAAFSFEPRVEVTV

SEQ ID NO: 5794 - protein, 150 aa, Zea mays
  unsure (1)..(150): unsure at all Xaa locations
  Clone ID: PAT_MRT4577_54510C.1.pep
GGSGFSSPSGTDSGSRGDAGLVFERERIPTAASDVEYRCFVGRLAWAXGHHSVHXAFSTYREVLESKIMLDRXTQTSRSFGLGTLCTEEAMRNAIXEGMNGKELDGRHITVIEGQTAAXRGGGGGEYRGGRGGGAYCCCRRPDACSRYGG

SEQ ID NO: 5795 - protein, 147 aa, Zea mays
  unsure (1)..(147): unsure at all Xaa locations
  Clone ID: PAT_MRT4577_54533C.1.pep
MSSETETFAFHAEINQLLSLIINSFYSNKEIFLRELISNSSDVLDEIRLVSLTXKSKLDAQSELIIHLVPDKATNTLSIIDSGVGVTKSDLVNNLGTIARSGTKEFMEALAAGADVSMIGQFGVGFYSAYLVAERVVVTTKHNDDEQ

SEQ ID NO: 5796 - protein, 130 aa, Zea mays
  unsure (1)..(130): unsure at all Xaa locations
  Clone ID: PAT_MRT4577_54762C.1.pep
NAFSTYGEVLESKIILDRETHRSRGFGLPTFSTEEAMRNAIEGMNXKELDGRNITVNEAHPRRSRGGGGSRHSGGRGGGRYGGGRRRDGGRXYCGGSSYGGGRGYCGGGGGYRSGNRGCCYDNSCRNWQN

SEQ ID NO: 5797 - protein, 433 aa, Zea mays
  Clone ID: PAT_MRT4577_54782C.1.pep
MGVGAEPKDQAATAAGVPAEQDEAGGKEDKAAAVSCSICLDAVLAASGERSTARLHCGHEFHLDCIGSAFNAKGVMQCPNCRKIEKGNWLYANGSRSAHDVSMDEWAHDEDLYDVSYSDMPFRFHWCPFGRLTQLPSLFEEGESSPPVTFHDFMGQHVFTEQVAVSAAAGTTNPCPYVAYLHPLTPLTSLSSSHVPDRTTDRPAYHDHWNPMAGPSDVRSMQTMQPADFHHSHWAHVPHSYGQPNSNNEQPGIPFGARAVRVDGDSQRRASVVSPSYFSNGSGSRSRPPNVPPLMPQFMRAHGSISEQYQQNSSSSLFAGAHRSGGMRPAPTPLPENPTFTLFPPGSSGHSSMETDDAGGSRFYAWEGDRFAPYPLMPVDCETSWRTSQQQSHQSTSEPTSAPRRLFGQWLAVGRPSPSPEGSSYRQLHSPRM

SEQ ID NO: 5798 - protein, 82 aa, Zea mays
  Clone ID: PAT_MRT4577_55015C.1.pep
FNPFARCPFFSKKYPDLEETSTAVQATVVLGVAPEKKAAPEFFKAAADSCKAAHACGCGSGLKCDPCNCCYIDRRPWLWILS

SEQ ID NO: 5799 - protein, 154 aa, Zea mays
  unsure (1)..(154): unsure at all Xaa locations
  Clone ID: PAT_MRT4577_55137C.1.pep
LPLVHLXAQNIRAQQLHHLVLATLVAYYQQQQFLPFTXYAALTSACYLQRHHLPFSQLPAAYPHQFLPFNQLAALSSHAYXQQQQLLPFSQLAGVSLATFLRQPQLLPLCQHCAPNDGSLLHLQQLLPFNQLTFSNPAAFYQQPIIGGAFFSFL

SEQ ID NO: 5800 - protein, 206 aa, Zea mays
  Clone ID: PAT_MRT4577_55297C.1.pep
MASHQDKASYQAGETKARTEEKTGQAVGATKDTAQHAKDRAADAAGKGQDAKEATKQKASDTGSYLGKKTDEAKHKAGETTEAAKHKAGETTEAAKQKAGETTEAAKQKAGETTEAAKQKAADAMEAAKQKAAEAGQYAKDTAVSGKDKSGGVIQQATEQVKSAAAGAKDAVMSTLGMGGDNKQGDANTNTNTNTNKDSSTITRDH

SEQ ID NO: 5801 - protein, 195 aa, Zea mays
  Clone ID: PAT_MRT4577_55302C.1.pep
MASHQDKASYQAGETKARTEEKTGQAVGATKDTAQHAKDRAADAAGHAAGKGQDAKEATKQKASDTGSYLGKKTDEAKHKAGETTEATKQKAGETTEATKQKAGETTEAARQKAADAMEAAKQKAAEAGQYAKDTAVSGKDKSGGVIQQATEQVKSAAAGAKDAVMSTLGMGGDDKQGDANTNTNKDSSTITRDH

SEQ ID NO: 5802 - protein, 182 aa, Zea mays
  Clone ID: PAT_MRT4577_55304C.1.pep
MASHQDKASYQAGETKARTEEKTGQAVGATKDTAQHAKDRAADAAGHAAGKGQDAKEATKQKASDTGSYLGKKTDEAKHKAGETTEATKQKAGETTEAAKQKAADAMEAAKQKAAEAGQYAKDTAVSGKDKSGGVIQQATEQVKSAAAGAKDAVMSTLGMGGDDKQGDANTNKDSSTITRDH

SEQ ID NO: 5803 - protein, 76 aa, Zea mays
  Clone ID: PAT_MRT4577_55326C.1.pep
MCCNCGSSCDCCSSCKCGKKYPNLEETSTAEQATAVLVLAREKKAEPEFVKAVAVSGKGPHACFCGSSCKCYPCNC

SEQ ID NO: 5804 - protein, 115 aa, Zea mays
  unsure (1)..(115): unsure at all Xaa locations
  Clone ID: PAT_MRT4577_55853C.1.pep
MAEDDVEYRCXGGGLXWDTSSESLENASVYYGEILDSKVMTDRKTARSRGYXFGTFYYENSMLDXAIENMNGRELDGRNISRNQAQSRGGGSGGGGYGGGRGSGGYGGGRTXGGY

SEQ ID NO: 5805 - protein, 103 aa, Zea mays
  unsure (1)..(103): unsure at all Xaa locations
  Clone ID: PAT_MRT4577_55898C.1.pep
PLECDMKGDKFKGAAKADAKLAAKSKRAEKPDKDTKGKAGMDPNKPKRAPSAFYRSMAELHKEHKDKNPKNKLXAAEEKAAGDRWKYLSESNNDRYVAKANKL

SEQ ID NO: 5806 - protein, 44 aa, Zea mays
  Clone ID: PAT_MRT4577_55906C.1.pep
LTLLPTVRHSTLLPCNQLAALSSECYVEQEQLPYIQLPACYRQD

SEQ ID NO: 5807 - protein, 294 aa, Zea mays
  Clone ID: PAT_MRT4577_55970C.1.pep
MGDVAKDLTAGTVGGAANLIVGHPFDTIKVKLQSQPTPAPGQLPKYAGAIDAVKQTVAAEGPRGLYKGMGAPLATVAAFNAVLFSVRGQMEAFLRSEPGVPLTVKQQVVAGAGAGIAVSFLACPTELIKCRLQAQSSLAEAATASGVALPKGPIDVAKHVVRDAGAKGLFKGLVPTMGREVPGNALMFGVYEATKQYLAGGPDTSGLGRGSQVLAGGLAGAAFWLSVYPTDVVKSVIQVDDYKKPKYSGSLDALRKIVAADGVKGLYKGFGPHPPAPGAVLCPRGRRASSAQPL

SEQ ID NO: 5808 - protein, 105 aa, Zea mays
  Clone ID: PAT_MRT4577_55983C.1.pep
VVVTTEKEVATVATDTATQTGNGGNERWGPHGQVILLATVLFTLVQSVYNSSSRVCCCPYVFLIEGRSVTEVSNVFIIGSSRPMHQQAWNADRWVMLPQSGFILS

SEQ ID NO: 5809 - protein, 382 aa, Zea mays
  unsure (1)..(382): unsure at all Xaa locations
  Clone ID: PAT_MRT4577_56004C.1.pep
MASVTDETAKIEGLTSAAAFVEGGIQDACDDACSICLEAFCESDPSALTGCKHEFHLQCILEWCQRSSQCPMCWQPITMKDPTSQELLEAVERERNIRTNQTRNTTIFHHPALGDFELQHLPVGNDAELEERILQHLAAAAAMGRAHHLGRREGHRGRSGSHGRPHFLVFSTQPNSPSAGTISSSSAHMEGENDSNXLPHLELASHLHEXRIGEVGNQSPGMLTYDAEQDAVVSSGNSTPVSSPRFFNRRHSTGQSTPDRAGPSDIQSFSDSLKSRLNAVSMKYKESITKSTRGWKERLFSRNSSVADLGSEVRREVNAGIASVSRMMERLETRGNSRTSDSPAASTSEVPPATESSNERVTESNSAAAAVWWWYYHYGYQR

SEQ ID NO: 5810 - protein, 396 aa, Zea mays
  unsure (1)..(396): unsure at all Xaa locations
  Clone ID: PAT_MRT4577_56005C.1.pep
MASVTDETAKIEGLTSAAAFVEGGIQDACDDACSICLEAFCESDPSALTGCKHEFHLQCILEWCQRSSQCPMCWQPITMKDPTSQELLEAVERERNIRTNQTRNTTIFHHPALGDFELQHLPVGNDAELEERILQHLAAAAAMGRAHHLGRREGHRGRSGSHGRPHFLVFSTQPNSPSAGTISSSSAHMEGENDSNXLPHLELASHLHEXRIGEVGNQSPGMLTYDAEQDAVVSSGNSTPVSSPRFFNRRHSTGQSTPDRAGPSDIQSFSDSLKSRLNAVSMKYKESITKSTRGWKERLFSRNSSVADLGSEVRREVNAGIASVSRMMERLETRGNSRTSDSPAASTSEVPPATESSNERVTESNSAAAAGGGGTTTTGTSASNASAPCVATSGSN

SEQ ID NO: 5811 - protein, 111 aa, Zea mays
  unsure (1)..(111): unsure at all Xaa locations
  Clone ID: PAT_MRT4577_56006C.1.pep
NEGFSSPSGSGSVSTSPAFGLGCFQIQMAAPDVEYRCFFSSLTXATDDHSLHNAFSTYCEVLESKIILNRETHRSHNFRFITFYTDDAMRNAIEGMNGNELDGRIITVNEA

SEQ ID NO: 5812 - protein, 227 aa, Zea mays
  unsure (1)..(227): unsure at all Xaa locations
  Clone ID: PAT_MRT4577_56071C.1.pep
VLDRDHLIRDGVQDDCQNDRKMNERLVGVSEDTTTGVKRLYXMHETGALLFSAINVNDTVTNEXFDYLYGCRHSLPDGLISVTDVMIAGKXIASSCGYVDVHKGSAAALKXGGARVIETXNPPIXALQALMDVLQVLPLWEVVSETDIFMTTTVYKDILMAEHMRNMSNHAIGCNSGHFDNEIDMLGLETXPARKRITIKPQTDRWMLPXTNTDIIVLDEGRLKNLG

SEQ ID NO: 5813 - protein, 178 aa, Zea mays
  unsure (1)..(178): unsure at all Xaa locations
  Clone ID: PAT_MRT4577_56090C.1.pep
MPDSEEHRFKSKADAGATNTYPQQVGTARKNGFIVIKNRPCKDAEVSTSXTVNHDHAKXHFVTVHIFNAKKLEDIGPSSHNCDIPHANRTEYQLIDISEDGFAILLTSHGNSKEDLRLPTDETLVAQINEGIESCKDLDVTVQSATYEEQICTLKDVGAEQLPCLWTLYPTVSPLKSG

SEQ ID NO: 5814 - protein, 746 aa, Zea mays
  Clone ID: PAT_MRT4577_5615C.1.pep
MATGVAPAPLPHVRVHHGGVGFTRSVDFAKVLSAPGAGTMRASSSRGRALVAKSSSTGSETMELEPSSEGSPLLVPRQKYCESTHQTRRRKTRTVMVGNVPLGSDHPIRIQTMTTSDTKDVAKTVEEVMRIADKGADLVRITVQGRKEADACFEIKNTLVQKNYNIPLVADIHFAPTVALRVAECFDKIRVNPGNFADRRAQFEKLEYTDDDYQKELEHIEKVFSPLVEKCKQYGRAMRIGTNHGSLSDRIMSYYGDSPRGMVESALEFARICRKLDFHNFVFSMKASNPVIMVQAYRLLVAEMYNLGWDYPLHLGVTEAGEGEDGRMKSAIGIGTLLMDGLGDTIRVSLTEPPEEEIDPCQRLANLGTQAANLQIGVAPFEEKHRRYFDFQRRSGQLPLQKEGEEVDYRNVLHRDGSVLMSVSLDQLKAPDLLYRSLAAKLVVGMPFKDLATVDSILLRELPPVEDAEARLALKRLVDISMGVLAPLSEQLTKPLPHAIVLVNLDELSSGAHKLLPEGTRLAVTLRGDESYEQLDILKDVDDITMLLHNVPYGEEKTGRVHAARRLFEYLQANGLNFPVIHHINFPETIDRDGLVIGAGANVGALLVDGLGDGVFLEAADQEFEFLRDTSFNLLQGCRMRNTKTEYVSCPSCGRTLFDLQEISAEIREKTSHLPGVSIAIMGCIVNGPGEMADADFGYVGGAPGKIDLYVGKTVVQRAIAMEGATDALIQLIKDHGRWVDPPAEE

SEQ ID NO: 5815 - protein, 142 aa, Zea mays
  Clone ID: PAT_MRT4577_56175C.1.pep
MAMRSLCLPLLLFSVSISIPPAVSANEELASLLAFKVAAISGGYGDPLASWNESSAGGGGYCSWEGVRCWGKHRQVVKLSLPSRGLTGVLSPAIGNLSSLWTLNLSNNGFHNSIPASLGRLQRLHNLDLSHNAFSGKLPANL

SEQ ID NO: 5816 - protein, 147 aa, Zea mays
  unsure (1)..(147): unsure at all Xaa locations
  Clone ID: PAT_MRT4577_56505C.1.pep
MSCSEEDDFQCEADAGAMNTYPEEDGTARNNGFLAIQNRPCKAVEGATSKTAKCGRATCRFADLDIFDGKKLEDIVPSSHNCDIPHVNRTEYQLIDIXEDGFVSLLTSHGNTKDDLRLPTDETLVCQIKEGIESGXYLAVTVHPAMA

SEQ ID NO: 5817 - protein, 257 aa, Zea mays
  Clone ID: PAT_MRT4577_5661C.1.pep
MASAAGGGAAGEGEWLKVSQLRPMVEAQDPNAKAVDNLTLRRFLRARDHDVDKASAMFLKFLKWRREAAPGGSVPEEQVRRELSQDKLCMGGVDRAGRPILVAFAARHFSAGRDMAEFKTALNCAGFVVYFFDKICARIPRGQEKFLCIVDLKGWGYSNCDVRAYIAAIEILQNYYPERLGKALMIHVPYIFMKAWKMIYPFIDTNTRDKFVFVEDKSLQETLRREIDEGQLPEFLGGKMDVIPLKDYGVQQQPQAV

SEQ ID NO: 5818 - protein, 136 aa, Zea mays
  unsure (1)..(136): unsure at all Xaa locations
  Clone ID: PAT_MRT4577_56632C.1.pep
MADKLFCLLMLLGLSASAATGTIXPQCSQAPIACCFAPYLSPALSXVWDNPFIQPYRIHQAIPASILPLXPLLLQQRSALLQQLPLVDMLAQNMKAHQLQQLVLXNPACYSQXQQFLSFNQLGASNSAAYLQQQLP

SEQ ID NO: 5819 - protein, 180 aa, Zea mays
  Clone ID: PAT_MRT4577_56642C.1.pep
MRGAEEERSGAATDAGGEEEKRERSVGLMAGLMDKAKGFVVEKVTQIPKPEAALDHVSFRSISREGVELHSHVDISNPYSHRIPICEITYTFKSAGKVIASGTMPDPGWIAASGSTKLDLPVKVPYDFIVSLMKDLGGDWDIDYMMEVGLTVDLPAIGAFTIPLTTEGEIKLPTFRDLLF

SEQ ID NO: 5820 - protein, 81 aa, Zea mays
  unsure (1)..(81): unsure at all Xaa locations
  Clone ID: PAT_MRT4577_56806C.1.pep
FLGPSGPDPIGQIFQGPGVXIKITSNPTTRAYLNEPDFMQMLREVQRNPYSISMYLSDPRMMQVSILMLNVKIHIPYAFLP

SEQ ID NO: 5821 - protein, 911 aa, Zea mays
  Clone ID: PAT_MRT4577_56807C.1.pep
MAFKGLPRDSRGSLEVFNPDAPVSDRATTSPFLLPPAVASHPSLLAAGDGGDADVGRATQRAAEWGLVLQTDEHTGRPQGVVARPSGSNRTSESGNSIDERAAAAGAGRALPRVSEELRAALSAFQQTFVVSDATRPDHPILYASAGFFNMTGYSSNEVVGRNCRFLQGSGTDPVEISKIRQALAAGSNYCGRILNYKKDGTPFWNLLTVAPIKDEDGRVLKFIGMQVEVSKYTEGNKDTALRPNGLPESLIKYDARQKDHARSSVSELLLALKDPRSLSESRNNTLKRKSQESAGSALVPGKRSSETGSRRNSHSGIRNSLQKISEVPEGGNKTRKSGLRSFMGLIGMGHGNVEKNILKPREDPLLDSDDERPDSFDDDFRKKEMRKGIDLATTLERIEKNFVITDPRLPDNPIIFASDSFLRLTEYCREEILGRNCRFLQGPETDRGTVKKIRDAIDNQTEVTVQLINYTKSGKKFWNLFHLQPMRDQKGDVQYFIGVQLDGTERVREAAAKDGAILVKKTADNIDEAAKELPDANLRPEDLWANHSKPVLPKPHMKDTASWRAIQKVLENGESIDLKHFRPVRPLGSGDTGSVHLVELLGTGEYFAMKAMDKSVMLNRNKVHRATAERQILDMLDHPFLPTLYASFQTKTHICLIVDYCAGGELFMLLDRQPMKVLKEDAVRFYAAEVVTALEYLHCQGIIYRDLKPENILLHRDGHISLTDFDLSCLTSCRPQVFLPHDIDKKKKRRKSRSNPIFFAEPMRASNSFVGTEEYIAPEIITGAGHTSAVDWWALGILLYEMLYGYTPFRGKTRQRTFANILHKDIRFPASIQVSLAARQLIYRLLHRDPANRLGSYEGAMEIKQHPFFRGINWALVRAATPPELEAPLQDTLEATLPPPAADAAHTDMF

SEQ ID NO: 5822 - protein, 233 aa, Zea mays
  unsure (1)..(233): unsure at all Xaa locations
  Clone ID: PAT_MRT4577_56816C.1.pep
MAASNLEGVLLGMGNPLLDISAVVDEAFLAKYDVKPNNAILAEDKHLPMYDELSSKENVEYIAGGATQNSIRVAQWMLQTPGATSYMGCIGKDKYGEEMKSAAKAAGVTAHYYEDEAAPTGTCAVCVVGGERSLIANLSAANCYKSEHLKKPENWALVEKAKYIYIAGFFLTVSPESIQLVAEHAAANNKVFLMNLSAPFICEFFRDAQEKVLPYADYIFGNETXARIFSKSE

SEQ ID NO: 5823 - protein, 152 aa, Zea mays
  Clone ID: PAT_MRT4577_56889C.1.pep
MSDTAGKTITCKAAVAWEAGKDLVVEDIEVLPPRAHEVRIQVYYTGVCHTDAYMLSGKDPEGAFPVIAGHEGAGIVESVGEGVTNVKVGDTVVALYTPECKECKFCKSGKTNLCGKIRATQGKGVMPDGTSRFKCKGKDLLHFMGCSTFSQY

SEQ ID NO: 5824 - protein, 64 aa, Zea mays
  unsure (1)..(64): unsure at all Xaa locations
  Clone ID: PAT_MRT4577_56932C.1.pep
MAGRXXKAIGAGAAKKAXSRSSKAGLQFXVGRIXRFLKADKYAXXVGAGXPXXXXAVXEXLTXE

SEQ ID NO: 5825 - protein, 510 aa, Zea mays
  Clone ID: PAT_MRT4577_5697C.1.pep
MPGGAFLLNGSGGGMADYGGGLTVPVVVTCLMAASGGLIFGYDIGISGGVSEMEDFLNKFFPGLLKRTARANKDVYCIYNNQALTAFTSSLYAFGMVGTLLASRVTRRLGRQAVMLIGGGLFLAGALVNAAAANIAMLIVGRMLLGLGLGFSGQATPVYLAEVSPPRWRGGFISAFPLFISVGYLVANLINYGTSRIPGWGWRLSLGLASVPAAVMVVGAAFIPDTPSSLVLRGKHDDARAALQRVRGKGVDIGPEFADILAAAENDRRNEEGAFRRILRREYRPYLVMAVAFPVFLNLTGVAVTAFFSPILFRTVGFESDAALMGAVILGLMNIGGILASGFAMDRYGRKLLFMIGGALMFTCQVAMASIIGSHLGNGSKMPKGYAVTVLVVALIFSASFSWSWGALYWTIPGEIYPVEVRSAGQGAAVALNLGLNFLQAQFFLAMLCCFKYGTFLFYASWLVVMTAFAVAFVPETKGVPLESMAHVFARHWYWGRFVKDHQKLGEEST

SEQ ID NO: 5826 - protein, 251 aa, Zea mays
  unsure (1)..(251): unsure at all Xaa locations
  Clone ID: PAT_MRT4577_570C.1.pep
MATAGKVIKCKAAVAWEAGKPLSIEEVEVAPPQAMEVRVKILYTALCHTDVYFWEAKGQTPVFPRILGHEAGGIVESVGEGVTELVPGDHVLPVFTGECKDCAHCKSEESNLCDLLRINVDRGVMIGDGQSRFTINGKPIFHFVGTSTFSEYTVIHVGCLAKINPEAPLDKVCVLSCGISTGLGATLNVAKPKKGSTVAIFGLGAVGLAAMEGAKMAGAAGIIXGVDLNPAKYEQAKKFGCTDFVNPRDHQ

SEQ ID NO: 5827 - protein, 90 aa, Zea mays
  Clone ID: PAT_MRT4577_57211C.1.pep
PADRAYVHSYFTSWRRTFHLHVICSFVQGQLLFILEAKGHQKNDASYKAYVELWFKRTAAKNFVQATRYLSGQPVVLFLRGDHALNHTNG

SEQ ID NO: 5828 - protein, 251 aa, Zea mays
  unsure (1)..(251): unsure at all Xaa locations
  Clone ID: PAT_MRT4577_572C.1.pep
MATAGKVIKCKAAVAWEAGKPLSIEEVEVAPPQAMEVRVKILYTALCHTDVYFWEAKGQTPVFPRILGHEAGGIVESVGEGVTELVPGDHVLPVFTGECKDCAHCKSEESNLCDLLRINVDRGVMIGDGQSRFTINGKPIFHFVGTSTFSEYTVIHVGCLAKINPEAPLDKVCVLSCGISTGLGATLNVAKPKKGSTVAIFGLGAVGLAAMEGARMAWASRIIGVDLNPXKYEQAKXFGCTDFVNPKDTVA

SEQ ID NO: 5829 - protein, 69 aa, Zea mays
  Clone ID: PAT_MRT4577_57400C.1.pep
ASNSSGRHWGLGPFGGAPGEDGQGPRQASYRGGMRTDYQLGERVGMTRDETGELGPGWWLRHGSSLVPK

SEQ ID NO: 5830 - protein, 138 aa, Zea mays
  unsure (1)..(138): unsure at all Xaa locations
  Clone ID: PAT_MRT4577_57462C.1.pep
EGVQQIIRTELMLDANPRLNLGSLVPRWMEPKCDKLIMDSTTKNXVDMAEYPVPPEPQNPWVNIKAPLFNAPIKEDETAIGVGTVGSSEAIMLAGLAFKRKWQNKRKEQGKPCPPPNMVPGANVQDPGPPNNGCKCWV

SEQ ID NO: 5831 - protein, 61 aa, Zea mays
  Clone ID: PAT_MRT4577_5758C.1.pep
GQLEKQQILFINKMGSQIFLHTYMLIGGDAADHLELHTYLFRLIQHVATSEVHMLTDDKFS

SEQ ID NO: 5832 - protein, 76 aa, Zea mays
  Clone ID: PAT_MRT4577_5760C.1.pep
NNMVEQELPGGGLLVYQSFCVAENAVVTSPKFVFPCFDGENVESAPPPMKKGYKLGNFFFWEEETDPMEEKAGVLY

SEQ ID NO: 5833 - protein, 77 aa, Zea mays
  Clone ID: PAT_MRT4577_5761C.1.pep
PPPGEQHSSAGGLLVSQSFCLPQHPVATSPKSVFPCFPRENVESAPPPMKKGYQLANFLCWEEETDAMEEKAGVLYE

SEQ ID NO: 5834 - protein, 73 aa, Zea mays
  Clone ID: PAT_MRT4577_5765C.1.pep
KRTPSGLIFFAGRRKRIPWRKRRECFMSKTGFWGRFAFELFILNRRNFVVVVWLFCEAAKPGYCYENLWSVSM

SEQ ID NO: 5835 - protein, 69 aa, Zea mays
  Clone ID: PAT_MRT4577_5767C.1.pep
FIFCGFFFLVFFEKKQILFINKRGSQIFFHTYMPIGGDPVDHLELLTYLFKLIQLVATSEVHMLTDDKF

SEQ ID NO: 5836 - protein, 59 aa, Zea mays
  Clone ID: PAT_MRT4577_5768C.1.pep
TRKKQILFINKMGSQIFLHTFMPIGGDPADHLKQHTYLGGLVQPGATSEGHMLTNHKFL

SEQ ID NO: 5837 - protein, 84 aa, Zea mays
  Clone ID: PAT_MRT4577_57694C.1.pep
MKVKILQWHAVASWTWDAQDETCGICRMAFDGCCPDCKFPGDDCPLIWGVCNHAYHLHCILKWVNSQTSTPLCPMCRREWQFKG

SEQ ID NO: 5838 - protein, 84 aa, Zea mays; identical to SEQ ID NO: 5837
  Clone ID: PAT_MRT4577_57695C.1.pep

SEQ ID NO: 5839 - protein, 71 aa, Zea mays
  Clone ID: PAT_MRT4577_5769C.1.pep
TTNWLIFYAGRRKRIPWRRRRECLMSKTGFWGRFAFELFILNRRNFVVVVWLFCEAAKPSYCYENLSSVSM

SEQ ID NO: 5840 - protein, 59 aa, Zea mays
  Clone ID: PAT_MRT4577_5772C.1.pep
TRKKQILFINKMGSQIFLHTFMPIGGDPADPLKLHTYLFKLIHLGATSEGHMLTDHKFS

SEQ ID NO: 5841 - protein, 68 aa, Zea mays
  Clone ID: PAT_MRT4577_5774C.1.pep
GGGLLVDQSFCGAKDAVATSPQSVFPCFAGENVESAPPPMKKGFKLGNFFCWEEEADPMEEKAGVLYE

SEQ ID NO: 5842 - protein, 142 aa, Zea mays
  unsure (1)..(142): unsure at all Xaa locations
  Clone ID: PAT_MRT4577_57862C.1.pep
NTHNLTLKTGLHMLRGLSSNAATATILPQCSQAPITPLHPPYLSPTSHSLCQNPILQPYMIHQAITTHIXIPLSPLFLQQSSTLLHHXPLMHLLSQNINTQQLQQLDLTNLAAYSQHQQILTINQLSTINFDSNLQQQQLPS

SEQ ID NO: 5843 - protein, 221 aa, Zea mays
  unsure (1)..(221): unsure at all Xaa locations
  Clone ID: PAT_MRT4577_57865C.1.pep
MADAVDARRVCGMPEKAQLHVAMLALQFGYAGFHVVSRLALNMGISKLVFPVYRNIIALFLLVPFAYFLEKKDRPRLTLSFAVQFFFLALCGITANQGFYLLGLDNTSPTFASAIQNSVPAITFGMAAALRIEKVRLDRRDGVAKVLGTLACVAGASVITLYQGPTIFAPADDKPSLQQEVPFLAAVAXEGKNWTLGCVYLIGHCLSWSGWLVLQAPVLKK

SEQ ID NO: 5844 - protein, 61 aa, Zea mays
  Clone ID: PAT_MRT4577_57880C.1.pep
AHQRTFACTGLICSKYNLVITPINLNLFNVNLAMAFTGLYHLSLKIMQHYLSHDKDAASQL

SEQ ID NO: 5845 - protein, 86 aa, Zea mays
  unsure (1)..(86): unsure at all Xaa locations
  Clone ID: PAT_MRT4577_57930C.1.pep
FQPLEELLIHSFPLXSFXXXPGYXXLYRFIEKHGXEAVXYAEAXHDIGKKDAINNXLFVLGFNAXGGXSVFXPFLXAKVXGARRAR

SEQ ID NO: 5846 - protein, 106 aa, Zea mays
  unsure (1)..(106): unsure at all Xaa locations
  Clone ID: PAT_MRT4577_57991C.1.pep
RNAIEGMNVKELGVRNITVKEVQSRAVSEDDAGVYGGGREDGGYVGAGLRDAGGEYDGAVAVYGGXGGYGGGGEGYGGVNRGVGYGNSDGNWRNLPVGTGRPSYPV

SEQ ID NO: 5847 - protein, 65 aa, Zea mays
  Clone ID: PAT_MRT4577_58107C.1.pep
GGGYGGCRCGGGYGGGRRDCGYGGCGCYGGRCEGGGGCYRGCGGYCGWCEGGGGGYRCGGRRWRD

SEQ ID NO: 5848 - protein, 94 aa, Zea mays
  Clone ID: PAT_MRT4577_58174C.1.pep
KKKPFFVFYGGSNKIHFRGKKSPAYLSFHPPRTRSQSKQPRNLLLHYTTPPLQYVGPTVYYGPQAVGGNSNHIWTLCLFYSHAGCKVTSHRGQS

SEQ ID NO: 5849 - protein, 119 aa, Zea mays
  unsure (1)..(119): unsure at all Xaa locations
  Clone ID: PAT_MRT4577_58203C.1.pep
RRHRKHKPAPTLSAKRSGRLMLLGLSARAATGTILPQSSQAPIGSLVSPYLSPAVSXVXDNPTLEPYTIQQAMTAGMLPLSPXLLQQSSALLHELPLVHLLAQNIKAQQLQQLVLGNLA

SEQ ID NO: 5850 - protein, 86 aa, Zea mays
  Clone ID: PAT_MRT4577_58342C.1.pep
YIRFKSRQLCVNPLIPELARLIRNRSLEFLPFATTRRSRPRNEASKTDSLRRTRPHRRSRLLSGRRPTAAARGGNSLATRSVRLPA

SEQ ID NO: 5851 - protein, 64 aa, Zea mays
  unsure (1)..(64): unsure at all Xaa locations
  Clone ID: PAT_MRT4577_58516C.1.pep
MAGRGNAIGAGXAAKKAISRSSKAGLQFPVGRIARFLKAGKYAERVGAGAPVYIVAVIEYLTAE

SEQ ID NO: 5852 - protein, 308 aa, Zea mays
  unsure (1)..(308): unsure at all Xaa locations
  Clone ID: PAT_MRT4577_58620C.1.pep
PPQETEIVGFVKTHKSNAYFKRFQVKFKRRRAGKTDYRARIRLINQDXXKYNTPKYRFVVRFTNKDITAQIISASIAGDMVLASAYSHELPRYGLEVGLTNYAAAYCTGLLLARRVLKTRGLDKEYEGNVEATGEDFSVEPADERRPFRALLDVGLIRTTTGNRVFGALKGALDGGLDIPHSEKRFAGFKKDDKQLDADIHRKYIYGGHVADYMRNLAEEEPEKYQSHFSEYIKKGIEADDMEALYKKVHAAIRADPSIVKSTKQPPKEHKRYNPKKLTYEQRKASLIERLNQLNSSGGADDDDEDDE

SEQ ID NO: 5853 - protein, 155 aa, Zea mays
  unsure (1)..(155): unsure at all Xaa locations
  Clone ID: PAT_MRT4577_58622C.1.pep
MGGMVKTHKSNAYFKRXQVKFKRRRAGKTDYRARIRLINQDRNKCNTPKYRFVERFTNKDITAQIISASIAGDMVLASAYSHEVPRYGLEVGLTNYAAAYCTGLLLARRELKIRGLDQEYEGHVEATGEDFCVEPTDERRAFRALXGMWLIRTTT

SEQ ID NO: 5854 - protein, 302 aa, Zea mays
  Clone ID: PAT_MRT4577_58623C.1.pep
MGGHERTHRSNAYFKRFQVKFKRRRAVRTHYRARIRLINQDRNKYNTPKYRFVVRSTNKDITAQIISASIAGDMVLASDYSHELPRYGLEVGLTNYAAAYCTGLLLARRVLKIRGLDQEYEGNVEATGEDFSVEPADERRPFRALLDVGLIRTTTGNRVFGALKGALDGGLDIPHSEKRFAGFKKDDKQLDADTHRRYIYGGHVADYMKNLAEEEPEKYQSHFSAYIKKGVEAEEIEALYKKVHAAIRADPSVVKSTKQPPKEHKRYNPKKLTYEQRKASLIERLNQLNSSGGADDDDEDDE

SEQ ID NO: 5855 - protein, 302 aa, Zea mays
  Clone ID: PAT_MRT4577_58624C.1.pep
MGGFVKTHKSNAYFKRFQVKFKRRRAGKTDYRARIRLINQDKNKYNTPKYRFVVRFTNKDITAQIISASIAGDMVLASAYSHELPRYGLEVGLTNYAAAYCTGLLLARRVLKIRGLDQEYEGNVEATGEDFSVEPADERRPFRALLDVGLIRTTTGNRVFGALKGALDGGLDIPHSEKRFAGFKKDDKQLDADTHRRYIYGGHVADYMKNLAEEEPEKYQSHFSEYIKKGVEAEEIEALYKKVHAAIRADPSVVKSTKQPPKEHKRYNPKKLTYEQRKASLIERLNQLNSSGGADDDDEDDE

SEQ ID NO: 5856 - protein, 362 aa, Zea mays
  unsure (1)..(362): unsure at all Xaa locations
  Clone ID: PAT_MRT4577_58626C.1.pep
QNSCSTLPVRLTICVPFGYLPRGGFVKTHKTNAYFKRFQVKFKRRRAGKTDYRARIRLINQDKNKYNTPKYRFVVRFVSFDSFIICFLCSLIIWFLLITMVLELQWHNIVPLNXLXTNKDITAQIISASIAGDMVLASAYSHELPRYGLEVGLTNYAAAYCTGLLLARRVLKTRGLDKEYEGNVEATGEDFSVEPADERRPFRALLDVGLIRTTTGNRVFGALKGALDGGLDIPHSEKRFAGFKKDDKQLDADIHRKYIYGGHVADYMRNLAEEEPEKYQSHFSEYIKKGIEADDMEALYKKVHAAIRADPSVVKSTKQPPKEHKRYNPKKLTYEQRKASLIERLNQLNSSGGADDDDEDDE

SEQ ID NO: 5857 - protein, 246 aa, Zea mays
  Clone ID: PAT_MRT4577_58629C.1.pep
TNKDITAQIISASIAGDMVLASAYSHELPRYGLEVGLTNYAAAYRTGLLLARRVLKIRGLDQEYEGNVEATGEDFSVEPADERRPFRALLDVGLIRTTTGNRVFGALKGALDGGLDIPHSEKRFAGFKKDDKQLDADTHRRYIYGGHVADYMKNLAEEEPEKYQSHFSAYIKKGVEADEIEALYKKVHAAIRADPSIVKSTKQPPKEHKRYNPKKLTYEQRKASLIERLNQLNSSGGADDDDEDDE

SEQ ID NO: 5858 - protein, 302 aa, Zea mays
  Clone ID: PAT_MRT4577_58631C.1.pep
MGGFVKTHKTNAYFKRFQVKFKRRRAGKTDYRARIRLINQDKNKYNTPKYRFVVRFTNKDITAQIISASIAGDMVLASAYSHELPRYGLEVGLTNYAAAYCTGLLLARRVLKIRGLDQEYEGNVEATGEDFSVEPADERRPFRALLDVGLIRTTTGNRVFGALKGALDGGLDIPHSEKRFAGFKKDDKQLDADTHRRYIYGGHVADYMKNLAEEEPEKYQSHFSAYIKKGVEADEIEALYKKVHAAIRADPSIVKSTKQPPKEHKRYNPKKLTYEQRKASLIERLNQLNSSGGADDDDEDDE

SEQ ID NO: 5859 - protein, 133 aa, Zea mays
  Clone ID: PAT_MRT4577_58700C.1.pep
ARRLFRQRFDFPIAGVLQAYVSPSVSSLCENPILQPYTIQQAISSVILPLSPLFLQQSSALLQQQPLVHLLSHNIIAHQLQHLELAYLYTYSQQHQFFTFNQLSAYNSCSYLQQLLLPFNQLPVAYTQQFFPL

SEQ ID NO: 5860 - protein, 112 aa, Zea mays
  unsure (1)..(112): unsure at all Xaa locations
  Clone ID: PAT_MRT4577_58744C.1.pep
MDAGSMVVKKAAAALRGGGGPKKKPVSRSVKACLQFPVGRIGRYLKHGRYCQRVCTGSPVYLAAVLXYLAAELLELSGNAARDNMKNRIMPRHLLLSIRIDEDLWKLLSGLT

SEQ ID NO: 5861 - protein, 77 aa, Zea mays
  Clone ID: PAT_MRT4577_58840C.1.pep
YNFFFFFFFFLVFFKILSGKKKQILFINKMGSQIFFHTYMLIGVDAVDHLGLHTYLFRLIQLGATLEGYMLTDDKFL

SEQ ID NO: 5862 - protein, 203 aa, Zea mays
  unsure (1)..(203): unsure at all Xaa locations
  Clone ID: PAT_MRT4577_58945C.1.pep
FGSVLSLLXIVTTCIAQIMTNTIQKKFKVSSTQLLYQSCPYQALTLFIVGPFLDGFLTNKNVFAFAYTPQVLFFIVLSCLISVSVNFSTFLVIGKTSPVTYQVLGHLKTCLVLAFGYVLLHDPFSWRNILGILIAEVEMGLYSYFCTREAPKPTEASPQVTQVKEGESDPLIADSLNAAENGAAATTDEPLKVPMWSSKYARA

SEQ ID NO: 5863 - protein, 79 aa, Zea mays
  unsure (1)..(79): unsure at all Xaa locations
  Clone ID: PAT_MRT4577_59057C.1.pep
CMTSSIEPCACFFITMLIARSKMHHDTTLHXSCSFITSVNTLLRPECTKENTWVHWSTQTFACCSQNLDCDNNHHVGPI

SEQ ID NO: 5864 - protein, 222 aa, Zea mays
  unsure (1)..(222): unsure at all Xaa locations
  Clone ID: PAT_MRT4577_59249C.1.pep
MDRAGVLAVVDSRTGKRYEVKVSEDGTVRATDFKKITAGKDDKGLKTYDPGYLNTAPVRSSICYIDGDEGILRYRGYPIEEVAESSSFVEVAYLLMYGNLPSQSQLAAWGFAISQHSAVPQGLLDIIQSMPHDAHPMGVLASAMSTLSVFHPDANPALRGQDLYNSKQVRDKQIVRVLGKAPAIAAAAYLRLAGRPAVLPSKNLSYSQNXLDMLDSLGDQKY

SEQ ID NO: 5865 - protein, 144 aa, Zea mays
  unsure (1)..(144): unsure at all Xaa locations
  Clone ID: PAT_MRT4577_59359C.1.pep
RGWLLLLLRFGFFGRGAGFGFVGERVEMAASDVEYRCFVGGLAWAPDDRSLXHAFSTCGGVLVSKXILARETRRSRGFGFVPFSAGEAXRTAXEGXNGLELDGRXISVFVAHSRGGRGGGGGGGYGGGRGGGGFCGGGRRGGGG

SEQ ID NO: 5866 - protein, 302 aa, Zea mays
  Clone ID: PAT_MRT4577_59489C.1.pep
MGGFVKTHKTNAYFKRFQVKFKRRRAGKTDYRARIRLINQDKNKYNTPKYRFVVRFTNKDITAQIISASIAGDMVLASAYSHELPRYGLEVGLTNYAAAYCTGLLLARRVLKTRGLDKEYEGNVEATGEDFSVEPADERRPFRALLDVGLIRTTTGNRVFGALKGALDGGLDIPHSEKRFAGFKKDDKQLDADIHRKYIYGGHVADYMRNLAEEEPEKYQSHFSEYIKKGIEADDMEALYKKVHAAIRADPSVVKSTKQPPKEHKRYNPKKLTYEQRKASLIERLNQLNSSGGADDDDEDDE

SEQ ID NO: 5867 - protein, 302 aa, Zea mays
  unsure (1)..(302): unsure at all Xaa locations
  Clone ID: PAT_MRT4577_59492C.1.pep
MGGFVKTHKSNAYFKRFQVKFKRRRAGKTDYRARIRLINQDKNKYNTPKYRFVVRFTNKDITAQIISASIAGDMVLASAYSHELPRYGLEVGLTNYAAAYCTGLLLARRVLKTRGLDKEYEGNVEATGEDFSVEPADERRPFRALLDVGLIRTTTGXRVFGALKGALDGGLDIPHSEKRFAGFKKDDKQLDADIHRKYIYGGHVADYMRNLAEEEPEKYQSHFSEYIKKGIEADDMEALYKKVHAAIRADPSVVKSTKQPPKEHKRYNPKKLTYEQRKASLIERLNQLNSSGGADDDDEDDE

SEQ ID NO: 5868 - protein, 52 aa, Zea mays
  Clone ID: PAT_MRT4577_59534C.1.pep
PTRPGKTDSVASIFFAERRNKRIGGSFRRSRHVYYGTAAFYYLLLRVIRGLP

SEQ ID NO: 5869 - protein, 99 aa, Zea mays
  Clone ID: PAT_MRT4577_59635C.1.pep
MTGRGKGGKGLGKGGAKRHRKILRDNIQGITKPAIRRLARRGGVKRISAMIYEETRGVLKSFLEGVIRDAVTYTEHAKRKTVTSLDVVYALKRQGRTLY

SEQ ID NO: 5870 - protein, 177 aa, Zea mays
  unsure (1)..(177): unsure at all Xaa locations
  Clone ID: PAT_MRT4577_59654C.1.pep
AGRGRNGSGLMACRGQFRPSKAFAGARISGSLHMTIQTAVXLIETLSAFCAEVRWCSCNIFSTQDHGGAAIARDSDDVLAWEGETLEEHWRRTERCLDWGEAGGPHLIDDDGVRATLLIHEGVKAEEDYEKYGKIPDPESTDNAEFKIVLTIIRDGLKADPQKYRKMKERLVGVSEE

SEQ ID NO: 5871 - protein, 202 aa, Zea mays
  Clone ID: PAT_MRT4577_59729C.1.pep
TTRVGTVGEVAKNEKESKEKGKGSFALAWTMDESSEERERGVTMTVAVAYLETKKFRVVLLDSPGHKDFVPNMISGATQADAAILVVDASTGSFEAGMDGEGGKSVGQTKEHAQLVRSFGVEQLVVAVNKMDAVDYAKERFDFIKLQLGSFLRSCNFKDSAINWIPPSAVENQNLIQAPSDARLNSWYQGFCLLDAIDFLQL

SEQ ID NO: 5872 - protein, 317 aa, Zea mays
  unsure (1)..(317): unsure at all Xaa locations
  Clone ID: PAT_MRT4577_59850C.1.pep
MGAWVSVLLGMDGAAAAGPAAVGLGDLPELCAAQVLLRLDPPEICRLAQVNHAFRGAAGADFVWEAKLPENYNYLMEFVGSGDEGKRRRRRAGKKEIYARLARPVPFGDGKKEFWLDKNKGMICMALSSKALVITGIDDRRYWQHMPTSESRFQSVAYLQQIWWFEVVGEVDFCFPVGTYSLYFRVHLGKFYRRFGRRQCTSEHVHGWDKKPVRFQLSTSDGQQALSQCYLEEPGSWVLYHAGDFVASKPDQLMKLKFSMAQIDCTHTKGGLCIDSVLIYPKGKGFHQERVVRSQKXGCRCCGGIHIRMLEQMQLAA

SEQ ID NO: 5873 - protein, 342 aa, Zea mays
  unsure (1)..(342): unsure at all Xaa locations
  Clone ID: PAT_MRT4577_59C.1.pep
MKFGATYEEYLRAERDKFLGQCSHVEYKRLKKVLKKCRVGRSLQADXAQMVMSSRRGETXSNICECNSCTLCDEMFFTELNKEASEIAGCFRSRVQRLLHLHVPSGLQRCIWRFRQCFIDDQQIMVQEGRMLLNYVTMNAIAIRKILKKYDKIHGSVSGRDFKSKMQTEHIELLQSPWLIELAAFHLNCDDSDADEPRAGEFFKNGFFKNFSCDLSGAQPLLTMTISETLKYEYSLTCPICLDTLFNPYALSCGHLFCKACACGAASVYIFQGVKSAPPEAKCPVCRAVGVFDRAVRMTELELLLKRRDKDYFLQRLREERSVMVKQAKEYWDSQAMLSMGI

SEQ ID NO: 5874 - protein, 52 aa, Zea mays
  Clone ID: PAT_MRT4577_60029C.1.pep
KLRNYRAHIVTTDIADPVDHPAIPALGFDIPNASSSQMDVCVAILDTLTFTI

SEQ ID NO: 5875 - protein, 90 aa, Zea mays
  unsure (1)..(90): unsure at all Xaa locations
  Clone ID: PAT_MRT4577_60030C.1.pep
RTRGQAAAGGYGLSTXYTDARVRDVASTGENEYDEYKKEEMQHMHKQDLGEVGTIAXGAFALYEKHEAKKDSEHAHRHKIEEEVLEEVVV

SEQ ID NO: 5876 - protein, 81 aa, Zea mays
  Clone ID: PAT_MRT4577_60119C.1.pep
YLPVFSLLLGVQVIILFASLYCQPHYKISSFCFFGTKHFLIDSCARKMFFIYRTMVPMRKSRPCRIFISRNPVFSQALPKS

SEQ ID NO: 5877 - protein, 49 aa, Zea mays
  unsure (1)..(49): unsure at all Xaa locations
  Clone ID: PAT_MRT4577_60194C.1.pep
APTLPLTGTTTNRASPGSXSGXGEYGSAVLGXSHDERMGTKMGRGKIEI

SEQ ID NO: 5878 - protein, 102 aa, Zea mays
  unsure (1)..(102): unsure at all Xaa locations
  Clone ID: PAT_MRT4577_60373C.1.pep
ETTPQPLLKDDFEFNGRKLTKAGVRQMIXRDILEYHRQMLQDYIECADHIHFLYPSGVDRVQRQIAHLDENYRRRVSSSPSRTQPTSLPRERVCSSDHGHSH

SEQ ID NO: 5879 - protein, 110 aa, Zea mays
  Clone ID: PAT_MRT4577_60466C.1.pep
ERRWCCCRQRLGTASEAASCGEVTLSEAAYLEYAMRSAASPSTRCCSGLSSLNRRASATEDRKATCNCLKSMTGRLGGGRSMTNAANIPGKCAASAGVPIRPTDDCTKIN

SEQ ID NO: 5880 - protein, 125 aa, Zea mays
  Clone ID: PAT_MRT4577_60473C.1.pep
GRKGPRVRRGLGFSTATTAGGVSQRGRQFPRVPRVRGAWFRGHYYYYYGAAHVWGVATAKKTAAALAAPAAAAATLTAFHGNGRQRRIWPTRGGGWLLVVVRAWPAKQGVSLGDTFKIKIADTPT

SEQ ID NO: 5881 - protein, 55 aa, Zea mays
  Clone ID: PAT_MRT4577_60532C.1.pep
LQGRSVTVVSVVFVRGSGEPVHQPAWLVVRWLLFVLSGFVLGPTKASSGPSWWCG

SEQ ID NO: 5882 - protein, 78 aa, Zea mays
  Clone ID: PAT_MRT4577_60548C.1.pep
WGPGAHVTMLAPVLFTQAQSVYLRSSRVRCCPSVFLMEGRSVSVVSAVFIRGPTRTRHQPACCADPWVLLPPPGFIVS

SEQ ID NO: 5883 - protein, 33 aa, Zea mays
  Clone ID: PAT_MRT4577_60573C.1.pep
HASGLMWLDLNSNRLRGEIPRRLGRQLGSTPLS

SEQ ID NO: 5884 - protein, 256 aa, Zea mays
  Clone ID: PAT_MRT4577_60636C.1.pep
MVYIKNQKTRAYSKRFQVKFKRRRQGKTDYRARLRLTNQDKNKYNTPKYRFVVRFTNKDVTAQIVYATIAGDIVMAAAYSHELPRYGLEVGLTNYAAAYCTGLLLARRVLKNRDLDEEYEGNVEATGEDFSVEPSDERRPFRALLDVGLIRTTTGNRVFGALKGALDGGLDIPHSDKRFAGFKKDEKSLDAEIHRKYIFGGHVADYMRSLADEEPEKFQTHFSEYIKRGISADDMEAVYKKVHAAIRADPTWANHQ

SEQ ID NO: 5885 - protein, 88 aa, Zea mays
  Clone ID: PAT_MRT4577_60647C.1.pep
IGFWVSPRSYIFDVADDSQLIIHSRVLLFSETCHCSGLTSFFARKASSCTGGDSRRGFPILRSTPSLAAISSLLYSTRTNAAALVTEI

SEQ ID NO: 5886 - protein, 100 aa, Zea mays
  unsure (1)..(100): unsure at all Xaa locations
  Clone ID: PAT_MRT4577_6075C.1.pep
MAAKIFCRLMLLGLSASAATSTIFPRCSQAPIDYLLAPILSPSVSSVCENPILQPYKIQQAIASGILPLSPSVLQQSXDLLQHLPLVHLLAHYIRAQQLL

SEQ ID NO: 5887 - protein, 70 aa, Zea mays
  Clone ID: PAT_MRT4577_60822C.1.pep
TVKQRSSNALEAPVKRRDYLSLVSHTIGLREDHMKAIRMDEQSSICSPSTMQEDWKRSDSNGNSCTRSLS

SEQ ID NO: 5888 - protein, 399 aa, Zea mays
  Clone ID: PAT_MRT4577_60917C.1.pep
MDASKLRELRDFVEACKKNPSLLADPNLSFFRDYLQSLGAKIPAAAPSFESPKRSSMDDIDDDGDDDDDLDMRDPTPERDELDEEIVESDLELEGEIVQSDHDDPPQKMGNPSVEVTEENRDASQEAKGKAMEAISEGKLEDAIEHLTNAIVLNPLSAIMYGTRASVFIKMKKPAAAIRDANAALEINPDSAKGYKTRGMAYAMLGKWEEAAHDLHTASNMDYDEEINAVLKKVEPNAHKIVEHRRKYERLRKEREEKRAQRDRLRQRAEAQAAYDKAKRKEQSSSRSSGGASPRGFPGGMPGGGFPRGMPGGGFPGGGMPGGFPGGGMPGGFPGGVPGNVDMSKILNDPDLMAAFSDPEVMAALQDVMNNPANFAKHQANPKVGPIIAKMMAKFNGSQ

SEQ ID NO: 5889 - protein, 155 aa, Zea mays
  unsure (1)..(155): unsure at all Xaa locations
  Clone ID: PAT_MRT4577_60944C.1.pep
EEXHNETKADDGAAKTNPKEAGTERKNGIIVIKNRPCKGVEGTTSKTGKNGHAKGHWAAIDIVKGKKLEEIAPSSHNGDIPHVNRTEYQLRDISEDGFESRLTSEGNTKDERRLPTEETLEAQIKEGIERGKDLDVTDQSAMGEEQICALKDGGP

SEQ ID NO: 5890 - protein, 714 aa, Zea mays
  Clone ID: PAT_MRT4577_61009C.1.pep
MLHPSWVGVSAHVSEYWSVIIATVVFAFVGAVTIYYTVNQLNKNISLSLIRAIKARAKRYKKSKDKVPAASHIWRKEVVSRSKGLKCCVCLKSVSPPQYSGGTIHQCDICGAAAHPSCSGNAHKDCKCVSMAGLGHVLHQWAVQWIDSADHSEEDSFCCHCDESCNGAFLAGSPVWYCMWCQRLVHVDCHSSLAKETGDICDLGPLKRLILSPLCVKELHWTGAGILSSITNGANELASSVRETIRIRSKRYKRGSASADSDSSGAIELPSDAEGDSQEVNSKAKVRDDHANCKLNEVHQSSESEKDKQLVPDNAATTNMSDVQRENSHVQNNQKYEIINVPSDSRPLLVFINKRSGAQSGDSLRQRLQILLNPVQVFELSKQQGPDVGLALFRKVTHFRVLVCGGDGTAGWVLDAIEKQKFETPPPVAILPAGTGNDLARVLCWGGGLGVIEKRGGLFSVLQDVEHAAVTVLDRWKITIKDNQGKLMRPPKFMNNYFGVGCDAKVALDIHNLREENPERFYSQFMNKVLYAREGAKNIMDNTFDCFPWDVKLEIDGSKIDIPQDSEGILVANIRSYMGGVDLWKNEDDVSDTYLPQSMHDKKLEVVSFTGMLHLGKLQVGLSRAKRLAQGHHIKVEVSTTMPIQVDGEPWSQEPGTIEVSHHSQAFMLKRVSEEPLGHAASVMADILENAESSGIISALQKRTLLQEIASRLL

SEQ ID NO: 5891 - protein, 155 aa, Zea mays
  unsure (1)..(155): unsure at all Xaa locations
  Clone ID: PAT_MRT4577_61277C.1.pep
MDASGAGSKANNGAAGRKARPPCNKSVTPSVKDGMQFPVSRIGSYLNXGRYAPRVGTAAPVYLAAVLEYLFAEVLELARNPAQDNQKTRIIPRHVLLAIRNDNDLATLLAGVXIAHGGVLPXNFHSVLLPNNASHNAAIGVSKEPKFPKEGRQVP

SEQ ID NO: 5892 - protein, 895 aa, Zea mays
  Clone ID: PAT_MRT4577_61285C.1.pep
MASSSKASDSSSQRSKRSDQGTGREAAPASVVPIHGNLTQLIRQIKSRRLLYIKEKLEANRKTLQRHSCALFDVAAAAEVASRGSDGGNALSQRAAEGQFRLAGSDLAHGIGERDVVYMQEENLASGTLVLSSSGAAAQRTVVRFVKLPLVERIPPYTTWIFLDKNQRMADDQSVVGRRRIYYDPVGNEALICSDSDEEIPEPEEEKHFFTEGEDQLIWRATQEHGLNREVVNVLCQFIDSTPSEIEERSEVLFEKNEKNSGSSDKIERQLSLDKTMDAVLDSFDNLFCRRCLVFDCRLHGCSQNLVFPTEKQPYSFEPDENKKPCGRQCYLRWRGGFQEIHDVGLSGCATYNMESGTVSHKVDVSIMSESEDSNREKGNIRSMTLVGTSGSKIISSVSAEESTTPPSADTSETENASSDMPPSSLRKYKISKRGPRYRERSPGKRQKVFTYDISFASNILNKLSIPEIRDTRLESREPGGDKLQILDESTKKTSSKDICGESPITTTENVGRESKKVSSTKNFLEHTLSCWSALERDLYLKGIEIFGKNSCLIARNLLSGMKTCMEVANYMYNNGAAMAKRPLLNKSISGDFAETEQDYMEQDMVARTRIYRRRGRNRKLKYTWKSAGHPTVRKRIGDGKQWYTQYNPCVCQQMCGKDCPCVENGTCCEKYCGCSKSCKNKFRGCHCAKSQCRSRQCPCFAASRECDPDVCRNCWVSCGDGSLGEPPARGDGYQCGNMKLLLKQQQRILLGRSDVAGWGAFIKNPVNKNDYLGEYTGELISHKEADKRGKIYDRANSSFLFDLNDQYVLDAYRKGDKLKFANHSSNPNCYAKVMLVAGDHRVGIYAKEHIEASEELFYDYRYGPDQAPAWARRPEGSKKDEASVSHHRAHKVAR

SEQ ID NO: 5893 - protein, 894 aa, Zea mays
  unsure (1)..(894): unsure at all Xaa locations
  Clone ID: PAT_MRT4577_61287C.1.pep
MASSSKASDSSQRSKRSDQGMGKDAAAASVVPIHANLTQLIRQVQSGRLAYIKEKLEVNRKTLQRHSCSLFDVAAAAEVASRGTDGGNALSQRAAERQCGSDLANGIGERDVVSVQEENLATGTLALSSSGATAQRTIVRFVKLPLVEKIPPYTTWIFLDKNQRMADDQSVVGRRRIYYDTVGNEALICSDSDEEIPEPEEEKHFFTKGEDHLIWRATQDHGLNQEVVNVLCXFIGATPSEIEERSEVLFEKNEKHSGSSDKIESRLSLDKTMDAVLDSFDNLFCRRCLVFDCRLHGCSQNLVFPCEKQPYSFDPDENKKPCGHLCYLRFPQWREGFKEMHDDGLAGGATYTMESGTASQRVDVNVMYESEDSNRQKGNIRSMTLVGTSGSKIISSVSAEESTTTPSADISETENVSSDLPPSSLRKHKISKHGPRYREHSPGKRQKVFTSDISFEGNIMNKLSIPEIRDTRLESRESGGDKLRILDESTKKTSRKDMCGESPATTMENVGRQSNKVSSTKNFLESTLSCWSALERDLYLKGIEIFGKNSCLIARNLLSGLKTCIEVANYMYNNGAAMAKRPLLNKSISGDFAENEQDYMEQDMAARTRIYRRRGRNRKLKYTWKSAGHPTVRKRTDDGKQCYTQYSPCACQQMCGKDCPCADKGTCCEKYCGCSKSCKNKFRGCHCAKSQCRSRQCPCFAASRECDPDVCRNCWVSCGDGSLGEPLARGDGYQCGNMKLLLKQKQRILLGRSDVAGWGAFIKNPVNKNDYLGEYTGELISHKEADKRGKIYDRANSSFLFDLNDQYVLDAYRKGDKLKFANHSSNPNCYAKVMLVAGDHRVGIYAKEHIEASEELFYDYRYGPDQAPAWARRPEGSKKDEASVSHRRAHKVAR

SEQ ID NO: 5894 - protein, 162 aa, Zea mays
  unsure (1)..(162): unsure at all Xaa locations
  Clone ID: PAT_MRT4577_61348C.1.pep
LRRPYVPQCSQAPIASLLPPYLLPAXDAECENPILQPYMIQQAITGGILPLSPLFLQQSSPLLHQLPLEHQSPQNITAQQPQQLELANLAGYSTKQQXLTFNQLHGLNYACYXQHQQLPFIHVPDAYPQKYLTFNQLXASNSPAXLXQREQLLPFNQLAGVS

SEQ ID NO: 5895 - protein, 63 aa, Zea mays
  unsure (1)..(63): unsure at all Xaa locations
  Clone ID: PAT_MRT4577_61382C.1.pep
MAAADVEYRCFVGWLAWATSIESLENAFGSYCEILDSKVISDRXTWMSRGFGIAIFSSLRSML

SEQ ID NO: 5896 - protein, 123 aa, Zea mays
  unsure (1)..(123): unsure at all Xaa locations
  Clone ID: PAT_MRT4577_61462C.1.pep
MVLYVEKTSTGREYKVKDLSQADFXRLEIALAMVEMPGLMACRAEIGPYKPFSGARISGPFHMTIQTVRLIETLTALGAQVRWCSCNIFSTQDHARCGIVRDWYDAFAWKVETLVEYCGCTER

SEQ ID NO: 5897 - protein, 370 aa, Zea mays
  unsure (1)..(370): unsure at all Xaa locations
  Clone ID: PAT_MRT4577_61799C.1.pep
MDEGQGVRYWCHMCQEVIDPMPEMKCPGCEGGFVEEMDSEDFEPAANARSDRSVSLLAPLLLGMMGGSSRRSRLRREAMVEADADQDDEEDDSDHELELSRRRRRRRRSSALFSVLEAMRDRDEVRGXMTPTVIQRETWREGEGRGWRGRGRXRQIERVSARGRERTESLILINSNNEAIILQGTFGSDDNQEDSSNTSSGVSLGDYFLGPALDTLLQRLAESDLSRSGTPPAKKEAVAALPTVNIEEALGCSVCLEDFEMGGEAKQMPCQHKFHSHCILPWLELHSSCPICRFQLPTEETKNNPCESASTAGTVNGGGDNAAASGSDTESTNHNEDDHSDSPIFSALSTLFSDPFSSDDDESVPHSYEN

SEQ ID NO: 5898 - protein, 145 aa, Zea mays
  unsure (1)..(145): unsure at all Xaa locations
  Clone ID: PAT_MRT4577_61820C.1.pep
GAAGRKAGGPRNXSVTRSVKAGLHFPVGRIVRYLKKGRYAQRVGTGAPVYLSDVLEYLAADVLDLAWNSAIDNKKTRIIPRHVLLAIRNVXELVKLLSGVTISHGGVLPIIHSVLLPNKAEDKAAICLSNEPKSPKKVANSPKKA

SEQ ID NO: 5899 - protein, 116 aa, Zea mays
  unsure (1)..(116): unsure at all Xaa locations
  Clone ID: PAT_MRT4577_61834C.1.pep
LVPAKNKESPGGLYXTVGGLTPIDPTRHDRTDTIRKALVLGVNDNMITADQLAIVTETARRLGMSTNMYPSYALIGQNKDATLEPLSVDELIDKAYGLAALFPEHKYEIVQRLHEK

SEQ ID NO: 5900 - protein, 124 aa, Zea mays
  unsure (1)..(124): unsure at all Xaa locations
  Clone ID: PAT_MRT4577_61892C.1.pep
MAGKICWFPMLLGLSASAATVTIFPQCSQAPIAFFLARYLSPALSSVCENPTLQPYRIHQAIATGILPLSPLFIQQPIALLQQLPMKHFMAPNIKAHHLQQLGLXNLAAYSQXPPSLSFNQLAA

SEQ ID NO: 5901 - protein, 108 aa, Zea mays
  Clone ID: PAT_MRT4577_61933C.1.pep
MDAQYNPRTVEEVFRDYKGRRNGLARALTTDVEEFFRQCDPEKENLCLYGFPNEHWEVNLPAEEVPPELPEPALGINFARDGMQEKDWLSMVAAHSDAWLLSVAFYFG

SEQ ID NO: 5902 - protein, 258 aa, Zea mays
  Clone ID: PAT_MRT4577_62309C.1.pep
IRRALNLGVSVKMITGDQLAIGKETGRRLGMGTNMYPSSALLGQNKDESIAALPVDDLIEKADGFAGVFPEHKYEIVKRLQARKHICGMTGDGVNDAPALKKADIGIAVADATDAARSASDIVLTEPGLSVIISAVLTSRAIFQRMKNYTIYAVSITIRIVLGFMLLALIWEFDFPPFMVLIIAILNDGTIMTISKDRVKPSPLPDSWKLAEIFTTGIVLGGYLAVMTVIFFWAAYKTNFFPRIFHVESLEKTAQDDY

SEQ ID NO: 5903 - protein, 356 aa, Zea mays
  Clone ID: PAT_MRT4577_62540C.1.pep
MLVEMGSRAAFVVAFLLRAIYAGTQILTKAAFDEGMNTSVFVFYRHLTGILFLVPIAFVLERKTAPPLSFRVSLKLFFHALYGISGAINIYGLGLSYSSATSSSAIFNLLPAVAFFLAVLLGMETLNLKRFHGIAKAAGVLFSTAGVTVLAFYQGPAFRSFIHHTAFSHHNVHAGVVTAAHPKSVWILGIFLTTLSTASWALWTVLQGPMLEAYPSKLLNTTLQMIFATVQCFFIALAAERDLSRWKLALDIRLYAVIYSGILVSGVAYYMQVWVIEKSGPVFLAMTMPITLLVTIILSLFLGEPVTLGSILGGLIMVGGLYSVLWAKRSEQVHASKQQMAAPTPPPAGDTSVGRA

SEQ ID NO: 5904 - protein, 377 aa, Zea mays
  Clone ID: PAT_MRT4577_62558C.1.pep
MANSRIGRYKMSTLSDPSKEDTSPEGSGTTQRNGAWSNTLNTLLQQASVYGVAAGYCLSASLLSIINKWAIMKFPYPGALTALQYFTSVAGVLLCGQLKLIEHDGLNLRTMWKFLPAAVMFYISIFTNSELLLHANVDTFIVFRSAVPIFVAIGETLYLHQPWPSLKTWLSLSTILGGSVIYVFTDNQFTVTAYTWAVAYLASMSIDFVYIKHVVMTIGLNTWGLVLYNNLEALMLFPLELLIMGEFDQMKVDSSKVSNWLSFDVVLPVALSCLFGLSISFFGFSCRRAISATGFTVLGIVNKLLTVVINLLIWDKHASFVGTIGLLICMSGGVLYQQSTMKPKAPKVEPKEENDNDEEQQKLLQMQGVQESNPTQK

SEQ ID NO: 5905 - protein, 384 aa, Zea mays
  unsure (1)..(384): unsure at all Xaa locations
  Clone ID: PAT_MRT4577_62559C.1.pep
MANSRTGRYKMSNLSHTSKEDTSPEGSGTTERTGAWSNMLNTLMQQASIYGVAAGYCLSASLLSIINKWAIMKFPYPGALTALQYFTSVAGVLLCGQLKLIEHDGLNLRTMWKFLPAAVMFYISIFTNSELLLHANVDTFIVFRSAVPIFVAIGETLYLHQPWPSLKTWLSLSTILGGSVIYVFTDNQFTVTAYTWAVAYLASMSIDFVYIKHVVMTIGLNTWGLVLYNNLEALMLFPLELLVMGEFDQMKVDSSKVSNWLSFDVVLPVALSCLFGLSISFFGFSCRRAISATGFTVLGIVNKLLTVVINLLIWDKHASFVGTIGLLICMSGGVLYQQSTXRKPXAPRLSRKKKTTKKQQKLLPDAREVPRKVHKPLQKKTTTK

SEQ ID NO: 5906 - protein, 378 aa, Zea mays
  unsure (1)..(378): unsure at all Xaa locations
  Clone ID: PAT_MRT4577_62561C.1.pep
MANSRIGRYKMSTLSDPSKEDTSPEGSGTTQRNGAWSNTLNTLLQQASVYGVAAGYCLSASLLSIINKWAIMKFPYPGALTALQYFTSVAGVLLCGQLKLIEHDGLNLRTMWKFLPAAVMFYISIFTNSELLLHANVDTFIVFRSAVPIFVAIGETLYLHQPWPSLKTWLSLSTILGGSVIYVFTDNQFTVTAYTXKVAYLASMSIDFVYIKHVVMTIGLNTWGLVLYNNLEALMLFPIELLVMGEFSQMKVDSSKMTNWLSFDMILPVALSCLFGLAISFFGFSCRRAISATGFTVLGIVNKLLTVVINLLIWDKHSSLVGTIGLLICMSGGVLYQQSTTKPKAPNFEPKEENDEEEQKLLEMQQGRDISSTVEHSS

SEQ ID NO: 5907 - protein, 361 aa, Zea mays
  Clone ID: PAT_MRT4577_62565C.1.pep
MSNLSHTSKEDTSPEGSGTTERTGAWSNMLNTLMQQASIYGVAAGYCLSASLLSIINKWAIMKFPYPGALTALQYFTSVAGVLLCGQLKLIEHDGLNLRTMWKFLPAAVMFYISIFTNSELLLHANVDTFIVFRSAVPIFVAIGETLYLHQPWPSLKTWLSLSTILGGSVIYVFTDNQFTVTAYTWAVAYLASMSIDFVYIKHVVMTIGLNTWGLVLYNNLEALMLFPLELLVMGEFDQMKVDSSKVSNWLSFDVVLPVALSCLFGLSISFFGFSCRRAISATGFTVLGIVNKLLTVVINLLIWDKHASFVGTIGLLICMSGGVLYQQSTTKPKAPKVEPKEENDEEQQKLLQMQGVQESS

SEQ ID NO: 5908 - protein, 155 aa, Zea mays
  Clone ID: PAT_MRT4577_62747C.1.pep
MSLVRRSSVFDPFSVDLFDPFDSMFRSIVPSSSSAAAAASETAAFASARIDWKETPEAHVFKADLPGVKKEEVKVEVEDGNVLLISGQRSREKEDKGDKWHRVERSSGQFVRRFRLPENAKTEEVRAALENGVLTVTVPKAEVKKPEVKSIQISG

SEQ ID NO: 5909 - protein, 154 aa, Zea mays
  Clone ID: PAT_MRT4577_62749C.1.pep
MSLVRRSSVFDPFSVDLFDPFDSMFRSIVPPSLSSSAASETAAFASARIDWKETPEAHVFKADLPGVKKEEVKVEVEDGNVLLISGQRSREKEDKGDKWHRVERSSGQFVRRFRLPENAKTEEVRAALENGVLTVTVPKAEVKKPEVKSIQISG

SEQ ID NO: 5910 - protein, 154 aa, Zea mays
  Clone ID: PAT_MRT4577_62752C.1.pep
MSLVRRSSVFDPFSVDLFDPFDSMFRSIVPSSPSSAAASETAAFASARIDWKETPEAHVFKADLPGVKKEEVKVEVEDGNVLLISGQRSREKEDKGDKWHRVERSSGQFVRRFRLPENAKTEEVRAALENGVLTVTVPKAEVKKPEVKSIQISG

SEQ ID NO: 5911 - protein, 154 aa, Zea mays
  Clone ID: PAT_MRT4577_62754C.1.pep
MSLVRRGSVFDPFSVDLFDPFDSVFRSIVPSSSSAAAASETAAFASARIDWKETPEAHVFKADLPGVKKEEVKVEVEDGNVLLISGQRSREKEDKGDKWHRVERSSGQFVRRFRLPENAKTEEVRAALENGVLTVTVPKAEVKKPEVKSIQISG

SEQ ID NO: 5912 - protein, 154 aa, Zea mays
  Clone ID: PAT_MRT4577_62755C.1.pep
MSLVRRSSVFDPFSMDLFDPFDSMFRSIVPSSSSAAAASETAAFASARIDWKETPEAHVFKADLPGVKKEEVKVEVEDGNVLLISGQRSREKEDKGDKWHRVERSSGQFVRRFRLPENAKTEEVRAALENGVLTVTVPKAEVKKPEVKSIQISG

SEQ ID NO: 5913 - protein, 154 aa, Zea mays; identical to SEQ ID NO: 5909
  Clone ID: PAT_MRT4577_62757C.1.pep

SEQ ID NO: 5914 - protein, 152 aa, Zea mays
  Clone ID: PAT_MRT4577_62758C.1.pep
MSLVRRSSVFDPFSVDLFDPFDSMFRSIVPSSSSSGSETAAFASARIDWKETPEAHVFKADLPGVKKEEVKVEVEDGNVLLISGQRSREKEDKGDKWHRVERSSGQFVRRFRLPENAKTEEVRAALENGVLTVTVPKAEVKKPEVKSIQISG

SEQ ID NO: 5915 - protein, 154 aa, Zea mays; identical to SEQ ID NO: 5911
  Clone ID: PAT_MRT4577_62761C.1.pep

SEQ ID NO: 5916 - protein, 34 aa, Zea mays
  Clone ID: PAT_MRT4577_62928C.1.pep
ELQTGTAPCTVRRAVADGRSHHAGIRTSSLGSDC

SEQ ID NO: 5917 - protein, 46 aa, Zea mays
  Clone ID: PAT_MRT4577_62955C.1.pep
GGVVLANPPLIPWPSGLFFWPSDSGSHFAIIVPFSATCYWCWCVSI

SEQ ID NO: 5918 - protein, 122 aa, Zea mays
  unsure (1)..(122): unsure at all Xaa locations
  Clone ID: PAT_MRT4577_63094C.1.pep
FGENPIVQPYMIQQAIATCILPLSPVCVGQPSALLQQLPLVHLVAQNIRAQQLLHLVLANLAAYSQQHQFLPFNQLAALNSAAYLQQQLPFSQLVAAYPQRLXAFNQLATFDSAGYLQGATT

SEQ ID NO: 5919 - protein, 58 aa, Zea mays
  Clone ID: PAT_MRT4577_63141C.1.pep
SGTDLTNFSHFTTTRCSRPRAEIRSTDSLPSTRLVHRSGYLSGILAAAAAARGRNYVA

SEQ ID NO: 5920 - protein, 158 aa, Zea mays
  unsure (1)..(158): unsure at all Xaa locations
  Clone ID: PAT_MRT4577_63173C.1.pep
MAAADVEYRCFVGGLAWATSNESLENAFPSXGETSIQVIRDRGRXXSLCFXFXTFSSENSMLHAIENMNGKELHGRNITVNQAQSLGGGGGGGGYGGGLGGGGCYGGGRPDCGYGGGGGYCGPRXGGGGGYXGGDGYCGPREGGGGGYRGGGGGGLKD

SEQ ID NO: 5921 - protein, 219 aa, Zea mays
  unsure (1)..(219): unsure at all Xaa locations
  Clone ID: PAT_MRT4577_63185C.1.pep
MYGNDNWINSYLDAILDAGKGAGPARGRGGGGGDRPSLLLRERGHFSPARYFVEEVITGYDETDLYKTWLRANAMRSPQEKNTRLENMTWRIWNLARKKKEFEKEEANRLSKRRLEAEKPQNDATADMSEDLFEGVKGEDVGDPSVAYGDSTAGNTPRISSFDKLYIVVFSLHGLIRGENMELGRDSDTGGQVKYVVGLAKXLRSCPGVYXVDLLAGQS

SEQ ID NO: 5922 - protein, 199 aa, Zea mays
  unsure (1)..(199): unsure at all Xaa locations
  Clone ID: PAT_MRT4577_63188C.1.pep
MYGNDNWINSYLDAILDAGKGVAAAAAGAARGRGGGWGGDRPSLLLRERGHFSPARYFVEEVITGYDETDLYKTWLRANAMRSPQEKNTRLENMTWRIWNLARKKKEFEKEEAIRLSKHRLETKKPRNDATAEMSEDLFEGVKGEDAGDPSVAYGDSTTGNTPRTSLFDKLYIVXLISLHGLVRGENMELGRXCDPGGQ

SEQ ID NO: 5923 - protein, 140 aa, Zea mays
  unsure (1)..(140): unsure at all Xaa locations
  Clone ID: PAT_MRT4577_63251C.1.pep
KGCGGLPVDVTGTLFHKAMKARMLLGAAGDHIIXTDTRASGIAXSDLLASYLDDREALTDSQIADNLIGVICGDRDTTHRVLTWMVKLLGHHPAVHKAHIVEQQENLRSKGSSGELLTWADTRRMRTTSRVIQETMQVAS

SEQ ID NO: 5924 - protein, 122 aa, Zea mays
  Clone ID: PAT_MRT4577_63260C.1.pep
MSAMETDINAPPPAPAGEGSSVVGPSSSSRKPNKRFEIKKWNAVALWAWDIVVDNCAICRNHIMDLCIECQANQASATSEECTVAWGVCNHAFHFHCISRWLKTRQVCPLDNSEWEFQKYGH

SEQ ID NO: 5925 - protein, 123 aa, Zea mays
  Clone ID: PAT_MRT4577_63263C.1.pep
MSAMETDINAPPPAPAGEGSSVVGPSSSSSRKPNKRFEIKKWNAVALWAWDIVVDNCAICRNHIMDLCIECQANQASATSEECTVAWGVCNHAFHFHCISRWLKTRQVCPLDNSEWEFQKYGH

SEQ ID NO: 5926 - protein, 97 aa, Zea mays
  unsure (1)..(97): unsure at all Xaa locations
  Clone ID: PAT_MRT4577_63267C.1.pep
MAAYILWRVMLLGISSSAATATIFTHCPQAPIASLLSPXLLPSMSSXCENPILQPYRIQQAITTGILPFLPMXLQQSLSLFHQLPLVHLLDQIIMAQ

SEQ ID NO: 5927 - protein, 64 aa, Zea mays
  Clone ID: PAT_MRT4577_63382C.1.pep
SRGFIFVACGVCCCPICVFDSQGRYCVQLLVMCSSLGFQQTHAHTSMDCGSMEAVNPIQIYYKL

SEQ ID NO: 5928 - protein, 88 aa, Zea mays
  Clone ID: PAT_MRT4577_63385C.1.pep
FVMDSPITVFCHGDWSVFSIVLPVSSVLQSLRPLRWTVVVVEQYQVQIIPSIKLIMPTLVLHHTMLRVHLHGPLAALGYSWTQMHQCK

SEQ ID NO: 5929 - protein, 34 aa, Zea mays
  Clone ID: PAT_MRT4577_63436C.1.pep
MRPLRRGWIQIGRSYILAEIGLHGDFLSLITCEC

SEQ ID NO: 5930 - protein, 608 aa, Zea mays
  unsure (1)..(608): unsure at all Xaa locations
  Clone ID: PAT_MRT4577_63582C.1.pep
MEWDSDSDGGDDEEEEEVRPGGGDAGPGFSLAIEGVLGACGMVVSDALEPDFPIIYVNRGFESSTGYSAEEVLGRNCRFLQCRGPFAQRRHPLVDAAVVTRIRRCLDEGTEFHGDLLNFRKDCSPYMARLQLTPIYGDDEVITHYMGIQFFNDSNVDLGPSSGSVTKEXQDLHGLHLATLTHQLXVGKGXCGXSSLFLLSDEVICQKILSKLSPRDIASVNSVCKRLHHMTRNEDLWRMVCQNAWGTEATRALETVAGSRSLAWGRLARELTTLEAVAWRKLTVGGAVEPSRCNFSACAVGNRVVLFGGEGVNMQPMNDTFVLDLSASKPEWRHINVSAAPPGRWGHTLSCLNGSRLILFGGCGGQGLLNDVFILDLDAQHPTWREIPGLAPPVPRSWHSSCTVDGTKLVVSGGCADSGVLLSDTYLLDVTMERPVWREIPASWSPPSRLGHSLSVYDGRKILMFGGLAKSGPLRLRSSDVFTLDLSEDKPCWRCITGSRMPGAGNPAGVGPPPRLDHVVVSLPGGRVLIFGGSVAGLHSASKLYLLDPTEDKPTWRLLNVPGHPPRFAWGHSTCVVGGTKAIVLGGQTGEEWTLTEIHELSLASSLV

SEQ ID NO: 5931 - protein, 132 aa, Zea mays
  unsure (1)..(132): unsure at all Xaa locations
  Clone ID: PAT_MRT4577_63852C.1.pep
NIHEQYLLRHLLCNHCGYCEQQQLPLVHLXAQNITAQQLQQLVLANLDDYSNQQQILSFNQLAALNSAAYSHQQQLLPFSQLAAAYPRQFLTFNXLAALNSHAYVQXQQLLPFSQLAAASTVAFLTQQHLMS

SEQ ID NO: 5932 - protein, 176 aa, Zea mays
  unsure (1)..(176): unsure at all Xaa locations
  Clone ID: PAT_MRT4577_63854C.1.pep
QPIAFGISHLSPLFLLQSSXAILQQLPLRLLLARNIRALRLQQLVLANLVAYYKQHQFLPFNHQDALNFASYLQQQQLPFNQLAAAYPQQFLPFNQLAALNSPAYLQQQQLLPFSQLAGVSPAAFLTXPQLLPFYQHAAPNAGTLLQLQQLLPFSQLALTNPAVLYXQPIIGGALF

SEQ ID NO: 5933 - protein, 93 aa, Zea mays
  Clone ID: PAT_MRT4577_63857C.1.pep
MAAKIFCLLMLRGLSASAATATIFPQCSQAPIASLLPPSLSPPVSSVCETPILKPSRIPQAIAACHLTFITLVLQPLLTLLQQLPFVHLLAQN

SEQ ID NO: 5934 - protein, 150 aa, Zea mays
  Clone ID: PAT_MRT4577_63860C.1.pep
ENPLLQPYRIQQAMTAGILPLSALVLLQSSGLLHHIPLVHLLAQNIRAQQLQQLALANLDAYYQEQKFVTLNQLAWLNSASYLQQQQLPFRQLPAAYPQQFLPFNQLAALNSPAYLQQQQLLPFSQLAGASPATFLIQPQLLPIYQHAAP

SEQ ID NO: 5935 - protein, 129 aa, Zea mays
  unsure (1)..(129): unsure at all Xaa locations
  Clone ID: PAT_MRT4577_63862C.1.pep
MAAKIFCLLMLRGLSASAATATIFPQCSQAPIACLLPPYLSPAESYVCENPILQPYRIQQAIAAGILPLSPLLLQQSSGLLQQLPLVHLLAPNIKAQQLPQLVLTNLGGYCXQQQVPSFDPLGSLNSAS

SEQ ID NO: 5936 - protein, 156 aa, Zea mays
  unsure (1)..(156): unsure at all Xaa locations
  Clone ID: PAT_MRT4577_63865C.1.pep
MAAKIFCLLMLLGLSASAATVTIFPQCSQAPIASLLPPYLSPALSSVCXENPILQPYRIQQEIADGILPLSPLYLQQSSPLLQKLPSEHLLXAQNICVLPLQQLVPAYLAAYSQQQQLLQFNQLPAWNSASYLRLQRTTNQPNYAAAYPQEISFNS

SEQ ID NO: 5937 - protein, 138 aa, Zea mays
  unsure (1)..(138): unsure at all Xaa locations
  Clone ID: PAT_MRT4577_63866C.1.pep
MAAKIFCLLMLLGLSASAATATIFPQCSQAPIASLLPPYLSPTVSSVCENPILQPYRIQQAIAAGILPLSPLFLHXNXALLQQLPWGHXLAQKIRAHHFQQLGLANLVAYFXQQQVFSFNPLTGLDSASYLEQQQLPF

SEQ ID NO: 5938 - protein, 142 aa, Zea mays
  unsure (1)..(142): unsure at all Xaa locations
  Clone ID: PAT_MRT4577_63868C.1.pep
MAAGVCVHLMLPDISTRAATVTIFPQCSQAPIAILVAPYLSPAASSVCENPIHQPYMIQQAIAAGILPLSHLVLQQSXPLLQHVPLVHLLAQNMMAQQLQQLALSNLAAYSXQQQFLTFNQLTALNSASYLQEQQLPFRQLP

SEQ ID NO: 5939 - protein, 131 aa, Zea mays
  unsure (1)..(131): unsure at all Xaa locations
  Clone ID: PAT_MRT4577_63888C.1.pep
RGRVGATIFPQCSHAPSAYFLSPYLLPAGSSVCENPILQPYRIQQAVAEGILPLXPLLLQQPADLLQPLPLVHLLAQNIKGQQLQQLVLGNLAAYSQXQEFLAFNQLAALNSAAYLQQQLPFSQLAAAYPQ

SEQ ID NO: 5940 - protein, 362 aa, Zea mays
  Clone ID: PAT_MRT4577_6388C.1.pep
MDVEARKSDAPPARGKAMHRFLVALNCGMLAVGAIGGPLLSRLYFSKGGHRQWLSAWLETGGWPLLVIPVAASFVARRARDRGAPVLLAPPRILLAAAGLGVATGADDFIYAFGLAYLPVSTSAILISTQLAFTVFFAFLVVRQRLTAASVNAVALLTVGAVVLGLHVSSDRPPGVTRGQYWLGFVLTLGAAALYGLVLPLVELAYRRAAGAGRAVTYALVVEMQLVMGFFATAFCTVGMVVNKDFQAIPREARQYELGEARYYMVLAWAAVLWQCFFLGAVGVIFCVHTLLAGILIAVFIPVTEVAAVIFLHEKFSSEKGVALALSLWGLASYSYGEWSQAKAKKEKKSEEDDGEVAQAVP

SEQ ID NO: 5941 - protein, 244 aa, Zea mays
  unsure (1)..(244): unsure at all Xaa locations
  Clone ID: PAT_MRT4577_63892C.1.pep
CTNIWQYNILRLLMLLGLSGSAATATILPQCXQAPIXSLLPRXLSPTGFSVXENPILQPYRIQQAIAGGVLPLSPLFLQQSSALLQQVPLVHLLAQNIRAQQLQQLVLANLAAYSQQQQFLPFNQLAALNSASYLQQQQLPFSQLSAAYPQQFLPFNQLTAXLNSPAYLQQQQLLPFSQLAGVSPATFLTHPXQLLPFXYQHVAPXNLGPFLQLXQLLPFQPTLLLPNPAXAFYXNPIIGGALF

SEQ ID NO: 5942 - protein, 198 aa, Zea mays
  unsure (1)..(198): unsure at all Xaa locations
  Clone ID: PAT_MRT4577_63894C.1.pep
MLPWSFLQVAAYRRHIFPKCSQAPIASLFPPYLXPAVSWVWEXNPILQPYRIQQAITAGILPLSPLFLQQSSALLHQLPLVHLLAQNIRAQQLQQLVLANLAAYSQQQQFLPFNQLAALNSASYLQQHQLPFSLLPAACPQSFLPFIPLAALNSPAFLQPLQLLPFSLLSGVCPAAFLXHPQXLLPXFRLAAPPPGSP

SEQ ID NO: 5943 - protein, 235 aa, Zea mays
  unsure (1)..(235): unsure at all Xaa locations
  Clone ID: PAT_MRT4577_63895C.1.pep
MAGKIFWLLMLLGLFARAGTGTIFPERLEGSIAFLFSPYLLTTGALXWENPIFXPFRIQQAITGGILPLSPLFLQQSSALLXELPLVHLLAQNIRAQQXLQQLVLANLVAYSQQQQFLPFNQIGSLNSASYLQQQQLPFSQLLAAYPQQFLPFNQLAALNSPAYLQQQQLLPFSQLAGVSPATFLTQPQLLPFYQHVAPNAGTFLQLQQLLPFNQLVLTNPAVFYQQPIIGGALF

SEQ ID NO: 5944 - protein, 235 aa, Zea mays
  unsure (1)..(235): unsure at all Xaa locations
  Clone ID: PAT_MRT4577_63896C.1.pep
MAAKIFXLLMLLGLSATSATATIFPQGSQAXIASILPPYLSPTVCMVCENPILXPYRIQQAIAAGILPLSPLVLQQSSALLQQLPLVPLLAQNIRAQQLQQLVLANLAAYSQQHQFLPFNQLAALNSAAYLQQQXQLPFSQLPAAYPQQFLPFNQLAALNSPAYLQQQQLLPFSQLAGVSPATFLTQPQLLPFYQHAAPNAGTLLQLQQLLPFNQLALTNPTAFYQQPIIGGALF

SEQ ID NO: 5945 - protein, 246 aa, Zea mays
  unsure (1)..(246): unsure at all Xaa locations
  Clone ID: PAT_MRT4577_63901C.1.pep
LIPNCLLKRPIVSHIALRYVPPILLAFCSAATATMFPHCSQAPIASLLTPYLSPTVSSVCENPILQPYMIQQAIAAGILPLSPLFLQQSSALLQQLPXVHLLAQNIRAQQLQQLVLANLAVYSQQQQFLPFNQLAALNSASYLQQQQLPFSQLSAAYPQQFLPFNQLTNLNSSAYLQEQQLLPFSQLAGVSPGTFLTQPQLMAVYQNAGPNACTLLQLEQLLAFNPLGLTKPTRFYQPPNIGGALF

SEQ ID NO: 5946 - protein, 229 aa, Zea mays
  unsure (1)..(229): unsure at all Xaa locations
  Clone ID: PAT_MRT4577_63923C.1.pep
SLLMLLALSESAATATILPKCSQAPIASLLPPYLSPAVSSVCENPILQPYRIQQALTAXGILPISPLFLQQSSALLHQLPLVHLLAQNIRAQQLQQLVLANLAAYSQQQQVLPFNQLAALNSAAYLQQQQLPFSQLPAAYPQQYLPFNQVTALNSPAXYLQQQQLLPFSQIDGVSPGTFLTQPQVSPFTQHGARNAGSMYQLHPMLPFSHLALTSPAAFGQQPIIGGAL

SEQ ID NO: 5947 - protein, 221 aa, Zea mays
  unsure (1)..(221): unsure at all Xaa locations
  Clone ID: PAT_MRT4577_63926C.1.pep
MAFKIFXLLILLGRFASPVTAPIFPHCSQAPIASFFPPYLXPAVSSVCENPILQPYRIQQAIAAGILPLSPLFLQQSSALLQQLPLVHLLAQNIRAQQLQQLVLANLAAYSQQQQFLPFNQLGSLNSASYLQQQQLPFSQVPAAYPQQFLPFNQLGELNSPAYLQQQQLLPFXQLAGVSPATFXLAQPQVVAVYQHGGPNAGTPLXQLEQIGWPFNPNVLN

SEQ ID NO: 5948 - protein, 225 aa, Zea mays
  unsure (1)..(225): unsure at all Xaa locations
  Clone ID: PAT_MRT4577_63927C.1.pep
MLLGISASAATVTILTQCSQXPIAAVLPPYLSPAVPSVCENPILEPYRIQQAISXAYLPLSPLFLQQSSALLQQLPLVHLLAQNIRAQQLQQLVLANLAAYSQQQQFLPFNQLAALNSASYLQQQQLPFSQLPVAYPQQFLPFNQLAALNSPAYLQQQQLLPFSQLAGVSPATFLTQPQLLPFYQHAAPNAGTIKQLQQSLPFNRRALTTRAVFYQHPIVGGALF

SEQ ID NO: 5949 - protein, 233 aa, Zea mays
  unsure (1)..(233): unsure at all Xaa locations
  Clone ID: PAT_MRT4577_63929C.1.pep
TTAAKIFSLLMLLGLSASAXTVTIFLACSQAPIGSLLTXYLSPEESSVCXENPILQPHKIQQAMAGGILPLSPLFLQQXSALLQQVPLVHLLAQNIRAQQLQQLVLTNLAAYSXQHQVLPFNQLAALNSASYLQQQQLPFNQLAAAYPQEFLPFNQLAALDSLAYLQQQQLLPFNQLTGVSPATLLIQPQXVPVYQHAAPNAGTLLQLQQLLPWNQLXALTNXAGCVLQPIMG

SEQ ID NO: 5950 - protein, 220 aa, Zea mays
  unsure (1)..(220): unsure at all Xaa locations
  Clone ID: PAT_MRT4577_63935C.1.pep
MAAKKLRLLMLLGLSARADTATIIPNCSQAPIAPLLPPYLSPTASWVCENPILQPYRIQQAITGGILPLSPLFLQQSSGLLHQLPLVHPLAQNIRAQQLQXLVLANLAAYSQQQQFLPFNQLAALNSASYLQQQQLPFSQLPAAYPQQFLSFNQLAALNSPAYLQQQQLLTFNQLACVNPSYFFIQPQLVPFXQQPWPNACNLLTLQPLLAFNPIALTKP

SEQ ID NO: 5951 - protein, 188 aa, Zea mays
  Clone ID: PAT_MRT4577_63936C.1.pep
ALWENPIVQPYRIQQAIATGILPLSPLFLQQPSALLQQLPLVHLVAQNIRAQQLQQLVLANLAAYSQQHQFLPFNQLAALNSAAYLQQQLPFSQLVAAYPQQFLPFNQLAALNSAAYLQQQQLLPFSQLADVSPAAFLTQQQLLPFYLHAMPNAGTLLQLQQLLPFNQLALTNSTVFYQQPIIGGALF

SEQ ID NO: 5952 - protein, 198 aa, Zea mays
  unsure (1)..(198): unsure at all Xaa locations
  Clone ID: PAT_MRT4577_63951C.1.pep
MAAKIFGCLMLLGLSASGATGTIFPQWLQASIAFLLSPYLLTTGASMGENPIXNPYRSHQASEPGILPLXPLFLQQPSALLQQLPLVHLVAQNIRAQQLQQLVLANLAAYSQQHQFLPFNQLAALNSAAYLQQQLPFSQLVAAYPQQFLPFNQLAALNSAAYLQQQQLLPFSQLTYVNPCCFLTQQPVXPSYLHAMPN

SEQ ID NO: 5953 - protein, 235 aa, Zea mays
  unsure (1)..(235): unsure at all Xaa locations
  Clone ID: PAT_MRT4577_63957C.1.pep
MAAKIFCLLMLLGLSASAATATIFPQCSQAPIASLLPPYLSPVVSSVCENPILQPHRIQQAIAAGILPLSPLFLQQSSALLQQLPLVHLLAQNIRAQQLQQLVLANLAAYSQQHQFLPFNQLAALNSVSYLQQQQLPFNQLAAAYPQQFLXPFNQLAALNSPAYLQQQQLLPFSQLAGVSPAVFLTQPQLLPFYQHAAPNAGTLLQLQQLLPFNQLALTNPAVLYQQPIIGGALF

SEQ ID NO: 5954 - protein, 183 aa, Zea mays
  unsure (1)..(183): unsure at all Xaa locations
  Clone ID: PAT_MRT4577_63959C.1.pep
YRIATQAIAAXGILTFINPXFLQQSSAXLLQQLPLVHXLAQNIRAQQLQQLVLANLAAYSQQQQFLPFNQLAALNSASYLQQQQLPFSQLPVAYPQQFLPFNQLAALNSPAYLQQQQLLPFSQLAGVSPATFLTQPQLLPFYQHAWPKAWTLLQLQQLVAFNQLGLTKLTMVXQQPIIGGGLF

SEQ ID NO: 5955 - protein, 216 aa, Zea mays
  unsure (1)..(216): unsure at all Xaa locations
  Clone ID: PAT_MRT4577_63961C.1.pep
YVRPYFPKCSQAPIAHVLPMYLXPAVSSVCENPNLQPYRIQQEITAGILTISPLFLQQSSALXHQLPXAHLLAQIIRAQQLQQLVLPNLAAYCKQQQFLPFNQLTALNFGSYMQQQQLPCSQLPAGYPQQFLSFNQLAALNSSGYLQEQQLLPFNQLTGGNPGYFLIQPQVVAVXQHAGPKAGTLLQLQQLVAFNPLGLTKPTRVXQQPIIGGGLF

SEQ ID NO: 5956 - protein, 200 aa, Zea mays
  Clone ID: PAT_MRT4577_63967C.1.pep
MAAKIFCFLMLLGLSASAATATIFPQCSQAPIASFLPPYLSPAVSSVCENPILQPYRIQQAIAAGILPLSPLFLQQPSALLQQLPLVHLLAQNIKAQQLQQLVLGNLAAYSQQQQFLPFNQLAALNSAAYLQQQLPFSQLAAAYPQQFLPFNQLAALNSAAYLQQQQLPPFSQLADVSPIGLLDTAQLLPFYLHAAPKRC

SEQ ID NO: 5957 - protein, 230 aa, Zea mays
  unsure (1)..(230): unsure at all Xaa locations
  Clone ID: PAT_MRT4577_63970C.1.pep
MADKNIRLIMIVGVSGRAVTATIFSERXKACIGSVLQAXLXPAACLACENPILQPYRIQQAITAGILPLSPLFLQQSSALLHQLPLVHLLAQNIRAQQXLQQLVLANLAAYFQQQQFFPFNQXLAALNSAFILQQQQXLPFSQLSAAYPXAFFPFNQLTALNFPAYLQQQQLLPFSQLVGXVSPATFLIQPQLMPFYQHAAPNAGTLLQLQQLLPFNQLXALTNPAAFYQ

SEQ ID NO: 5958 - protein, 514 aa, Zea mays
  Clone ID: PAT_MRT4577_63975C.1.pep
MAGGVVVNAAGGKTYPGRMTPFVFFTCLVASSGGLIFGYDIGISGGVTSMASFLKEFFPSVYAKAAANKDTNQYCKFDSQLLTLFTSSLYLAALATSFVAASVTRVFGRKWSMFCGGVTFLAGSALNGAATDVMMLIMGRILLGVGVGFANQSVPLYLSEMAPAKLRGMLNIGFQLMTTIGILAANLINFWTAGIEGGWGWRIGLGLAGVPALIITLGALVLPDTPNSLIARGFNDDAKAVLVKIRGTDDVQDEYDDMVAASEEANAIEHPWRNILERRYRPQLTVAALIPFFQQLTGINVIMFYAPVLFLTIGFGDDASLMAAVITGLVNMFATVVSIVCVDRLGRRALFLQGGTQMFVSQIVVGTLIALQFGTAGVGEMSRSNAWLLVLFICLYVAGFAWSWGPLGWLVPSEVFALEVRSAGQSIAVCVNMLLTFIIGQAFLSMLCSLKFGLFYFFAGWMFIMTTFIALFLPETKGVPIEEMNLVWSRHWFWGKYVNVDTQHGGASPRSNGV

SEQ ID NO: 5959 - protein, 239 aa, Zea mays
  unsure (1)..(239): unsure at all Xaa locations
  Clone ID: PAT_MRT4577_63994C.1.pep
MAAKIFCLLMLLGLSASAVTGTIFPKCSQAPIAILLSPHLSPAVSSVWGIPILQPYRIQQAIAAGILPLSPLFLQQSSALLQQLPLXVHXLGQNIRAQQLQQLVLANLAAYSQQQQFLPFNQLGSLNLASYLQQQQLPFSQLPAXYPQQFFSFNQLAALNSSAYXQRQQLLPFSQLAGVSPATFLTQPQLXLPVYQXVAPNAXGALLQLRQLLAFDQLALANPAGVYQQPLIGGGLFWM

SEQ ID NO: 5960 - protein, 233 aa, Zea mays
  Clone ID: PAT_MRT4577_63998C.1.pep
MAAKIFCFLMLLGLSASAATATIFPQCSQAPIASLLPPYLSSAVSSVCENPILQPYRIQQAIAAGILPLSPLFLQQPSSLLQQLPLVHLLAQNIRAQQLQQLVLANLAAYSQQQQFLPFNQLAALNSAAYLQQQLPFSQLAAAYPQQLLPFNQLAALNSAAYLQQQQLPPFSQLADVSPAAFLTQQQLLSFYSHAAPNAGTLLQLQQLLPFNQLALTNPAAFYQQPIIGGALF

SEQ ID NO: 5961 - protein, 240 aa, Zea mays
  Clone ID: PAT_MRT4577_63999C.1.pep
STIIVPLITVKIFPFLRLLGISASAPTSTIFPQCSQAPIASFLPPYLSPPVSTVCENPILQPYTIQHAISASILPLSPLFLQQPSALLQHLPYVHLLAQNIKAQQLQQLVLGNLAAYSQQQQFLPFNQLAALNSAAYLQQQLPFSQLAAAYPQQFLPFNQLAALNSAAYLQQQQLPPFSQLADVSPIAFLTQQQLLPFYLHAAPNAGTLLQLQQLLPFNQLALTNPTAFYQQPIIGGALF

SEQ ID NO: 5962 - protein, 243 aa, Zea mays
  unsure (1)..(243): unsure at all Xaa locations
  Clone ID: PAT_MRT4577_64005C.1.pep
MAQPKYLWPGLMLLGSCLASALLRATPFSRXARKTPIASLLPPYPLHQLVSXSVCENPILQPYRIQXQAIAAGILPLSPLFLQQSSALLQQLPLVHLLAQNIRAQQLQQLVLANLAAYSQQQQFLPFNQLGSLNSASYLQQQQLPFSQLPAAYPQQFLPFNQLAALNSPAYLQQQQLPPFRQLADVSPIAFLTQXQLLPFYLHAEPNAGTLLQLKQWCGFKQLAVTNPTGVYQQPIXGGALLL

SEQ ID NO: 5963 - protein, 234 aa, Zea mays
  Clone ID: PAT_MRT4577_64024C.1.pep
MAAKIFCLLMLLGLSASAATATIFPQCSQAPIASLLPPYLSPTVSSVCENPILQPYRIQQAIAAGILPLSPLFLQQSSALLQQLPLVHLLAQNIRAQQLQQLVLANLAAYSQQQQFLPFNQLAALNSASYLQQQQLPFSQLSAAYPQQFLPFNQLTALNSPAYLQQQQLLPFSQLAGVSPATFLTQPQLLPFYQHAAPNAGTLLQLQQLLPFNQLALTNPAAFYQQPIIGGALF

SEQ ID NO: 5964 - protein, 234 aa, Zea mays
  Clone ID: PAT_MRT4577_64025C.1.pep
MAAKIFCLLMLLGLSASAATATIFPQCSQAPIASLLPPYLSPAVSSVCENPILQPYRIQQAIAAGILPLSPLFLQQSSALLQQLPLVHLLAQNIRAQQLQQLVLANLAAYSQQQQFLPFNQLAALNSASYLQQQQLPFSQLSAAYPQQFLPFNQLTALNSPAYLQQQQLLPFSQLAGVSPATFLTQPQLLPFYQHAAPNAGTLLQLQQLLPFNQLALTNPTAFYQQPIIGGALF

SEQ ID NO: 5965 - protein, 226 aa, Zea mays
  Clone ID: PAT_MRT4577_64028C.1.pep
ELMLLGLSASVATATIFPQCSQAPIASLLSPYLSPAVSSVCENPIVQPYRIQQAIATGILPLSPLFLQQPSALLQELPLVHLVAQNIRAQQLQQLVLANLAAYSQQHQFLPFNQLAALNSAAYLQQQLPFSQLAAAYPQQFLPFNQLAALNSAAYLQQQQLLPFSQLADVSPAAFLTQQQLLPFYLHAMPNAGTLLQLQQLLPFNQLALTNPAVFYQQPIIGGALF

SEQ ID NO: 5966 - protein, 257 aa, Zea mays
  Clone ID: PAT_MRT4577_64032C.1.pep
PGRESHILFRPTSNIESTIVYQQCAAKIFCLLMLLGISASAATATIFPQCSQAPIASLLPPYLSPAVSSVCENPILQPYRIQQAIAAGILPLSPLFLQQSSALLQQLPLVHLLAQNIRAQQLQQLVLANLAAYSQQQQFLPFNQLAALNSASYLQQQQLPFSQLPVAYPQQFLPFNQLAALNSPAYLQQQQLLPFSQLAGVSPATFLTQPQLLPFYQHAAPNAGTLLQLQQLLPFNQLALTNLAVFYQQPIIGGALF

SEQ ID NO: 5967 - protein, 234 aa, Zea mays
  Clone ID: PAT_MRT4577_64035C.1.pep
MAAKIFCLLMLLGLSASAATATIFPQCSQAPIASLLPPYLSPAVSSVCENPILQPYRIQQAITAGILPLSPLFLQQSSALLHQLPLVHLLAQNIRAQQLQQLVLANLAAYSQQQQFLPFNQLAALNSASYLQQQQLPFSQLPAAYPQQFLPFNQLAALNSPAYLQQQQLLPFSQLAGVSPATFLIQPQLLPFYQHAAPNAGTLLQLQQLLPFNQLALTNPAAFYQQPIIGGALF

SEQ ID NO: 5968 - protein, 147 aa, Zea mays
  unsure (1)..(147): unsure at all Xaa locations
  Clone ID: PAT_MRT4577_64087C.1.pep
PRVRLAGFNKDDKQLDADIHRKYIYGGHVANYMKNLAEXEPDKYQSHFREYIKKGIEADDMEALFKKVHAAIRADPSVDKXTKQPPKELKMLKLQKLTYEXQRKARLIERLXPINSSDGAYDDDEDDESGLDLSKKCYLMRRSLFEL

SEQ ID NO: 5969 - protein, 119 aa, Zea mays
  Clone ID: PAT_MRT4577_64111C.1.pep
MAAKIFCVLVLRGLSATAATVTILPQCSQASIAYLLPPYLSSSVSSVCENPILQPYRIQHAISSFIIPLSPLILQQPSSLLQHLPLMHLMAQNIKTQQLQQLVLSNLTAYSHNNQIIQL

SEQ ID NO: 5970 - protein, 40 aa, Zea mays
  Clone ID: PAT_MRT4577_64349C.1.pep
RGGLACPAPVTKSSSGQGSLGLCGRAMAAADVEHRWLVGR

SEQ ID NO: 5971 - protein, 67 aa, Zea mays
  Clone ID: PAT_MRT4577_64409C.1.pep
KKLSVETTVNQDPLVTKGASLVPLLGIDVWEHAYYLQYKNVRPDYLNNIWKVMNWKYAGEVYENVLA

SEQ ID NO: 5972 - protein, 70 aa, Zea mays
  Clone ID: PAT_MRT4577_64410C.1.pep
IHYFGPCTMIIHKLMHTHTYPYDRLSSHAYSCITRAHTYVRAHNTAGARYHSHTHAYALGDVRQYGRYQK

SEQ ID NO: 5973 - protein, 51 aa, Zea mays
  Clone ID: PAT_MRT4577_64472C.1.pep
GRHINSDQKLEQQVTRVSQKLRPPNGFGIPYFKRQGGIRPPDFTPKIRGNL

SEQ ID NO: 5974 - protein, 123 aa, Zea mays
  Clone ID: PAT_MRT4577_64503C.1.pep
TASGAIPWRWRCSQPNQGTRWAAAASTNQIQGGRDGGRRLASVPNGRRRVTRKTDCLGIEDEEVERRCGVAVGWSGVTDHRTSRGCMGWDASAGRKHPDLPASRVTFRSSRRLHRRPPRPAVV

SEQ ID NO: 5975 - protein, 75 aa, Zea mays
  unsure (1)..(75): unsure at all Xaa locations
  Clone ID: PAT_MRT4577_64568C.1.pep
HVNRPEDQLINISEDGFVSLFTSDGDAKDGLRLPTYXTLVAQNKERFXNGKDLVVTVQFAKGEEQIWALKDFGPK

SEQ ID NO: 5976 - protein, 771 aa, Zea mays
  Clone ID: PAT_MRT4577_64622C.1.pep
MASSAFLPELGTQVVVPVAAVVGIAFAVLQWVLVSKVKLSPEPRRGDGSAGKSGAGAGASEYLIEEEEGLNEHNVVVKCAEIQNAISEGATSFLFTEYKYVGLFMGIFAVLIFLFLGSVESFSTKSQPCHYSKGKTCKPALANAIFSTIAFVLGAVTSLVSGFLGMKIATYANARTTLEARKGVGKAFITAFRSGAVMGFLLAASGLFVLYIAINLFGIYYGDDWEGLYEAITGYGLGGSSMALFGRVGGGIYTKAADVGADLVGKVERNIPEDDPRNPAVIADNVGDNVGDIAGMGSDLFGSYAESSCAALVVASISSFGINHEFTPMLYPLLISSVGIIACLITTLFATDFFEIKAVDEIEPALKKQLIISTAVMTVGIALVSWLGLPYTFTIFNFGVQKTVYNWQLFLCVAVGLWAGLVIGFVTEYYTSNAYSPVQDVADSCRTGAATNVIFGLALGYKSVIIPIFAIAFSIFLSFSLAAMYGVAVAALGMLSTIATGLAIDAYGPISDNAGGIAEMAGMSHRIRERTDALDAAGNTTAAIGKGFAIGSAALVSLALFGAFVSRAEISTVDVLTPKVFIGLIVGAMLPYWFSAMTMKSVGSAALKMVEEVRRQFNTIPGLMEGITKPDYATCVKISTDASIKEMIPPGALVMLTPLIVGIFFGVETLSGVLAGALVSGVQIAISASNTGGAWDNAKKYIEAGASEHARTLGPKGSDPHKAAVIGDTIGDPLKDTSGPSLNILIKLMAVESLVFAPFFATHGGILFKWL

SEQ ID NO: 5977 - protein, 127 aa, Zea mays
  unsure (1)..(127): unsure at all Xaa locations
  Clone ID: PAT_MRT4577_64676C.1.pep
MGRQPXCDKEGVKRGPWTAXEDKKLISFILTHGRCCWRAVPKLAGLLRCGKSCRLRWTNYLRPDLKRGLLSTAEEQLVIDLHAKLGNRWSQIAAKLPXRTDNEIKNHWNTHIKKKLVKMGVDPATHE

SEQ ID NO: 5978 - protein, 887 aa, Zea mays
  Clone ID: PAT_MRT4577_64700C.1.pep
MLELLARRERAAACRPGDGPGTAPSGAFPGRRTTDSELVRTVQSLYLRINPSTSYPFVTPQASHRITTVELEQEQAVSACPRCSISIPHLMAPALSRTLGPSSVAALRPSPSCRGLLRAALAPQGRGASARCAVGVRWEAARRRRMAGVRCDAAVAEKPAGEEETAGEKYEYQAEVTRLMDLIVHSLYSHKEVFLRELVSNASDALDKLRFLSVTDPSVLADGGELEIRIKPDLEAGTITITDTGIGMTKDELKDCLGTIAQSGTSKFLKALKENKDLGADNGLIGQFGVGFYSAFLVAERVVVSTKSPKADKQYVWEAEADSSSYVIKEENDPEKMLSRGTEITLYLRDDDKYEFADPTRIQGLVKNYSQFVSFPIYTWQEKSRTVEVEEEEESKGEEATEESKSEEATEGEKQKKKKTITEKYWDWELANETKPIWMRNPKEVEKTEYNEFYKKTFNEFLDPLAYTHFTTEGEVEFRSVLYVPGMAPLSNEEIMNPKTKNIRLYVKRVFISDDFDGELFPRYLSFVKGVVDSNDLPLNVSREILQESRIVRIMRKRLVRKTFDMIQEIAEKDGKEDYNKFWESFGKFMKLGCIEDTGNHKRLAPLLRFYSSKNETDLISLDQYVENMPENQKAIYYIATDSLQSAKTAPFLEKLVQKDIEVLYLIEPIDEVAIQNLQTYKEKKFVDISKEDLELGDEDEDKEKESKQEYTLLCDWIKQQLGDKVAKVQISKRLSSSPCVLVSGKFGWSANMERLMKAQTLGDTSSLEFMRGRRIFEINPDHPIIKDLNAACKNEPESTEAKRAAELLYEAALISSGYTPDSPAELGGKIYEMMTMALGGRWGRLETEEAEVIASIDDADSSEGATTTTEVVEPSEVRTESDPWKD

SEQ ID NO: 5979 - protein, 766 aa, Zea mays
  Clone ID: PAT_MRT4577_64728C.1.pep
MGSACQAGTDGPSRKDVLGIGNAALENGHHQAEADADEWREKEEDLANNGHSAPPPGMQQVDEHKEEQRQSIHWERFLPVKTLRVLLVENDDSTRQVVSALLRKCCYEVIPAENGLHAWRYLEDLQNNIDLVLTEVFMPCLSGIGLLSKITSHKICKDIPVIMMSTNDSMSMVFKCLSKGAVDFLVKPLRKNELKNLWQHVWRRCHSSSGSESGIQTQKCAKLNTGDEYENGSDSNHDDEENDDGDDDDFSVGLNARDGSDNGSGTQSSWTKRAVEIDSPQPISPDQLVDPPDSTCAQVIHPRSEICSNKWLPTANKRNVKKQKENKDESMGRYLGIGAPRNSSAEYQSSLNDVSVNPIEKGHENHMSKCKSKKETMAEDDCTNMPSATNAETADLISSIARNTEGQQAVQAVDAPDGPSKMANGNDKNHDSHIEVTPHELGLKRSRTNGATAEIHDERNILKRSDQSAFTRYHTSVASNQGGARYGESSSPQDNSSEAMKTDSTCKMKSNSDAAPIKQGSNGSSNNDVGSSTKNVAARPSGDRERVASPLAIKSTQHASAFHTIQNQTSPANLIGEDKADEGISNTVKMSHPTEVPQGCVQHHHHVHYYLHVMTQKQPSTDRGSSDVHCGSSNVFDPPVEGHAANYSVNGGVSVGHNGCNGQNGSSAVPNIARPNIESINGTMSQNIAGGGIVSGSGSGNDMYQNRFLQREAALNKFRLKRKDRNFGKKVRYQSRKRLAEQRPRVRGQFVRQSEQEDQTAQGSER

SEQ ID NO: 5980 - protein, 750 aa, Zea mays
  Clone ID: PAT_MRT4577_64730C.1.pep
MGSACQAGTDGPSRKDVLGIGNAALENGHHQAEADADEWREKEEDLANNGHSAPPPGMQQVDEHKEEQRQSIHWERFLPVKTLRVLLVENDDSTRQVVSALLRKCCYEVIPAENGLHAWRYLEDLQNNIDLVLTEVFMPCLSGIGLLSKITSHKICKDIPVIMMSTNDSMSMVFKCLSKGAVDFLVKPLRKNELKNLWQHVWRRCHSSSGSESGIQTQKCAKLNTGDEYENGSDSNHDDEENDDGDDDDFSVGLNARDGSDNGSGTQSSWTKRAVEIDSPQPISPDQLVDPPDSTCAQVIHPRSEICSNKWLPTANKRNVKKQKENKDESMGRYLGIGAPRNSSAEYQSSLNDVSVNPIEKGHENHMSKCKSKKETMAEDDCTNMPSATNAETADLISSIARNTEGQQAVQAVDAPDGPSKMANGNDKNHDSHIEVTPHELGLKRSRTNGATAEIHDERNILKRSDQSAFTRYHTSVASNQGGARYGESSSPQDNSSEAMKTDSTCKMKSNSDAAPIKQGSNGSSNNDVGSSTKNVAARPSGDRERVASPLAIKSTQHASAFHTIQNQTSPANLIGEDKADEGISNTVKMSHPTEVPQGCVQHHHHVHYYLHVMTQKQPSTDRGSSDVHCGSSNVFDPPVEGHAANYSVNGGVSVGHNGCNGQNGSSAVPNIARPNIESINGTMSQNIAGGGIVSGSGSGNDMYQNRFLQREAALNKFRLKRKDRNFGKKVACFQLHACCSYDLKSVIVI

SEQ ID NO: 5981 - protein, 309 aa, Zea mays
  Clone ID: PAT_MRT4577_64777C.1.pep
SARPQSESSRTSCDGSRSNTSRRINLLNRSPFDPQIPLQSTFASRITNLATKVTNKVRSRVSTDDYGIEREGGSGESHCSDRGAKEEPTSSGTNTPRGNAPHGPFSTDENSPGKSTNPSSDELEGKVGLHKFLSSKAEALLNKKGISWPWKVRENDGPDERNHVILLHGDQENVMNHQKVSDSSIAPDSQGAEHNLPSKNEASGSWSSYNNNSTSSASSTGSTNSSALYKVDHEADCLDYEILWEDLVIGEQIGQGSCGTVYHALWYGSDVAVKVFSRQEYSEDVILSFRQEVSLMKKLRHSNILLFMG

SEQ ID NO: 5982 - protein, 316 aa, Zea mays
  Clone ID: PAT_MRT4577_64810C.1.pep
MSFLFKSSNGGTTEKIPSPEEQREKINELRKELGEHSSAAIKDFLSDASLARFLRARNWNVQKASKMMKAAVKWRLAFKPENICWDDIAEEAETGKIYRADYKDKHGRTVLVLRPGLENTTSAIGQIKYLVYSLEKAIMNLTEDQEKMVWLTDFQCWTLGSTPLKVTRETVNVLQDCYPERLGLAILYNPPRIFESFWKIVKPFLDHETRKKVKFVYSNDKESQKIMAEVFDMEELDSAFGGKNPATFEYNSYAEQMQDDDKKMGSSHGSANSLLGSAGKEANGADSDASSEASFYSGTDSPTHENGEHSIAKKNG

SEQ ID NO: 5983 - protein, 125 aa, Zea mays
  Clone ID: PAT_MRT4577_64914C.1.pep
RSPMASCSSAPSSSPAPPRPWPADPSHPLPVSWSSSPRRLQRASRRWFPAPHRRGHPRAMPTTWPSLQTVAAASRAAAPIYRRDLCSSVPTWSPSRLRGSPRHPWSLWTSRPRAVVASNLNPLSR

SEQ ID NO: 5984 - protein, 58 aa, Zea mays
  Clone ID: PAT_MRT4577_64958C.1.pep
GLSWYVTFVVTHLCFECQGPFVQVVSLVFILGPSKPVHQPAWTVDPWMLLLLSGFVLS

SEQ ID NO: 5985 - protein, 97 aa, Zea mays
  unsure (1)..(97): unsure at all Xaa locations
  Clone ID: PAT_MRT4577_65052C.1.pep
GSPSSVRGDGRDAAGDVEYRCFIGGLAWATDDHSLHNAFSTYGEVLESKIILDRETQMSRCFWFVTFYTEDAMRNAIEGMNGKELDXRIITVNEVQS

SEQ ID NO: 5986 - protein, 103 aa, Zea mays
  unsure (1)..(103): unsure at all Xaa locations
  Clone ID: PAT_MRT4577_65128C.1.pep
QHRKHTCVLTLAAKIWRCLMLLGRAASVATATIFPQCSQAPKASLLPPYLSPAVSSMCENPIVQPYTIQQAIATGILPLSPLVLQHLVALLQQLPWVXHLVAQ

SEQ ID NO: 5987 - protein, 50 aa, Zea mays
  Clone ID: PAT_MRT4577_65136C.1.pep
KRTTDDFFWLHLHKYGSFVPLCFTSYICALCHVCESSTFSLFLSRIGPSV

SEQ ID NO: 5988 - protein, 136 aa, Zea mays
  Clone ID: PAT_MRT4577_65217C.1.pep
PEEAIRNALEGINGKELDGRNIPVKEGQFPGGRGGGGGGYGGGRGGGGYGGGGPRDGGGGYGGGGGGYGGGGGYGGGGGGYGGGNRGGGFGNSPGNWRKLTVGPARPSYPVCSRDVFPSPKGLSSFVSFGVAPLGF

SEQ ID NO: 5989 - protein, 79 aa, Zea mays
  Clone ID: PAT_MRT4577_6533C.1.pep
YIKFKSTKLCVKHMINELARLIRNRSQEFLPFTTTRRSRHRDETRKTDSIRSTRPVHRLRHLSGRRAEKAADRGGNSLA

SEQ ID NO: 5990 - protein, 434 aa, Zea mays
  Clone ID: PAT_MRT4577_65496C.1.pep
MGQKDSKPSNGYGYSSDYGGTSSGYNLRNTGSTSSSYGARYVPSSENNVQPETHARLQRKYSRIGDDYRSLSQVTEALAQAGLESSNLIVGIDFTKSNEWTGKISFNRRCLHDIGNTPNPYEQAISIIGRTLSVFDEDNLIPCFGFGDASTHDQEVFSFYPENRPCNGFEEALDRYREIVPTLRLAGPTSFAPMIETAIGIVDSTGGQYHVLLIIADGQVTRSVDTQSGQLSPQERDTIDAIVRASQFPLSIVLVGVGDGPWDMMHQFDDNIPARSFDNFQFVNFTEIMSKSIAADRKEAEFALSALMEIPTHRRQRITPRIALPPPTRTAYSRTTSFSQQSGVYSRSSSFDQQTSVYQQRSESLKQQQPAAPKGPDTYVSESALEDRILCPICMYKSKDLAFGCGHQTCYECGRDLERCPLCQQHITTRIRLY

SEQ ID NO: 5991 - protein, 448 aa, Zea mays
  unsure (1)..(448): unsure at all Xaa locations
  Clone ID: PAT_MRT4577_65499C.1.pep
MGQKDSKPSHGYGYSSYDYGSASSGYTSRNTGNSSSSYSVRYAPSSENSVQPETHARLQRKYSKIGDDYRSLSQVTEALAQAGLESSNLIVGIDFTKSNEWTGKISFNRRCLHDIGXTPNPYEQAISIIGRTLSAFDEDNLIPCFGFGDASTHDQEVFSFYPEAHQXHRFEEALDRYREIVPTLRLAGPTSFAPMIETAIGIVDSTGGQYHVLLIIADGQVTRSVDTQSGQLSPQERDTIDAIVRASQFPLSIVLVGVGDGPWDMMHQFDDNIPARSFDNFQFVNFTEIMSKSIAADRKEAEFALSALMEIPTQYKATIDLQLLGRRQRITPRIALPPPTRTAYSRSSSFSQQSGVYSRSSSFDQQTSGASQQRSESLKQQKKPAAPKRPDTYASERALEDRILCPICMYKSKDLAFGCGHQTCYECGRNLERCPLCQQNITTRIRLY

SEQ ID NO: 5992 - protein, 174 aa, Zea mays
  Clone ID: PAT_MRT4577_65500C.1.pep
MGQKDSKPSHGYGYSSYDYGSASSGYTSRNTGNSSSSYSVRYAPSSENSVQPETHARLQRKYSKIGDDYRSLSQVTEALAQAGLESSNLIVGIDFTKSNEWTGKISFNRRCLHDIGNTPNPYEQAISIIGRTLSAFDEDNLIPCFGFGDASTHDQEVFSFYPENRPCNGFEEAL

SEQ ID NO: 5993 - protein, 448 aa, Zea mays
  Clone ID: PAT_MRT4577_65503C.1.pep
MGQKDSKPSHGYGYSSYDYGSASSGYTSRNTGNSSSSYSVRYAPSSENSVQPETHARLQRKYSKIGDDYRSLSQVTEALAQAGLESSNLIVGIDFTKSNEWTGKISFNRRCLHDIGNTPNPYEQAISIIGRTLSAFDEDNLIPCFGFGDASTHDQEVFSFYPENRPCNGFEEALDRYREIVPTLRLAGPTSFAPMIETAIGIVDSTGGQYHVLLIIADGQVTRSVDTQSGQLSPQERATIDAIVRASQFPLSIVLVGVGDGPWDMMHQFDDNIPARSFDNFQFVNFTEIMSKSIAADRKEAEFALSALMEIPTQYKATIDLQLLGRRQRITPRIALPPPTRTAYSRSSSFSQQSGVYSRSSSFDQQTSGASQQRSESLKQQKKPAATKRPDTYASERALEDRILCPICMYKSKDLAFGCGHQTCYECGRNLERCPLCQQNITTRIRLY

SEQ ID NO: 5994 - protein, 445 aa, Zea mays
  Clone ID: PAT_MRT4577_65505C.1.pep
MGQKDSKPSNGYGYSSDYGGTSSGYNLRNTGSTSSSYGARYVPSSENNVQPETHARLQRKYSRIGDDYRSLSQVTEALAQAGLESSNLIVGIDFTKSNEWTGKISFNRRCLHDIGNTPNPYEQAISIIGRTLSVFDEDNLIPCFGFGDASTHDQEVFSFYPENRPCNGFEEALDRYREIVPTLRLAGPTSFAPMIETAIGIVDSTGGQYHVLLIIADGQVTRSVDTQSGQLSPQERDTIDAIVRASQFPLSIVLVGVGDGPWDMMHQFDDNIPARSFDNFQFVNFTEIMSKSIAADRKEAEFALSALMEIPTQYKATLDLQLLGRRQRITPRIALPPPTRTAYSRTTSFSQQSGVYSRSSSFDQQTSVYQQRSESLKQQQPAAPKGPDTCASESALEDRILCPICMYKSKDLAFGCGHQTCYECGRDLERCPLCQQHITTRIRLY

SEQ ID NO: 5995 - protein, 41 aa, Zea mays
  Clone ID: PAT_MRT4577_65624C.1.pep
TRVALGSSIIDQTLYPIVLHTLAQHFIRNSADKSHLMSQSL

SEQ ID NO: 5996 - protein, 443 aa, Zea mays
  Clone ID: PAT_MRT4577_65639C.1.pep
MPPTGTPHFWLSQQRIGHIPRACTPTFGTFPSGPLSSARSKSGPAMDGGGQPPDTEMTDAGAGGGGQPPQQPLPPVGGGVMLDNIQATLSHGGRFIQYNIFGNVFEVTAKYKPPVLPIGKGAYGIVCSALNSETAEQVAIKKIANAFDNKIDAKRTLREIKLLRHMDHENIVAIRDIIPPAQRAAFNDVYIAYELMDTDLHQIIRSNQALSEEHCQYFLYQILRGLKYIHSANVLHRDLKPSNLLLNANCDLKICDFGLARTTSETDFMTEYVVTRWYRAPELLLNSSEYTAAIDVWSVGCIFMELMDRKPLFPGRDHVHQLRLLMELIGTPNEGDLDFVNENARRYIRQLPRHPRQSLPEKFPHVQPLAIDLVEKMLTFDPRQRITVEGALAHPYLASLHDISDEPGCSMPFSFDFEQHALSEEQMKDLIYQEALAFNPDYQ

SEQ ID NO: 5997 - protein, 76 aa, Zea mays
  unsure (1)..(76): unsure at all Xaa locations
  Clone ID: PAT_MRT4577_65653C.1.pep
MSYNCQSSCCCGSSCKCGKNYPNLKETSTAAQATTILRGGPQKKASPDLFXAAEDSSEAAHGCSCGGNCKCDPCTC

SEQ ID NO: 5998 - protein, 83 aa, Zea mays
  unsure (1)..(83): unsure at all Xaa locations
  Clone ID: PAT_MRT4577_6566C.1.pep
MMFWLSSNSVSCFFCGSSCNCGEMYPHLGAKSGGGPQASTAPIVLGXAPETKNAPQFXAGGESGEAPHGCSCCDSCKRSPCNC

SEQ ID NO: 5999 - protein, 75 aa, Zea mays
  Clone ID: PAT_MRT4577_65816C.1.pep
GVVGYEVCYTGLSVFFWRHMHFYIRSGGEGFLMVIALTKGEGRNCFLFFKKNGVIGWGKAIWVSKKSFVLLTPLI

SEQ ID NO: 6000 - protein, 359 aa, Zea mays
  unsure (1)..(359): unsure at all Xaa locations
  Clone ID: PAT_MRT4577_6582C.1.pep
ASAQVGHPSRFSARSAAEHGAGQHRVHVLLRQHGGRRHRRRHLVPAPSPLPQILLHRRYCRRQRGRRLRPRRCRRAGSGSGFAGXSPATGVHELLECPVCTNSMYPPIHQCQNGHTLCSTCKTRVHNRCPTCRQELGDIRCLALEKVAESLELPCKYYSLGCSEVFPYYSKLKHESQCNFRPYNCPYAGSECSVVGDISFLVAHLRDDHKVDMHSGCTFNHRYVKSNPREVENATWMLTVFHCFGQYFCLHFEAFQLGMAPVYMAFLRFMGDENDARNYSYSLEVGANGRKMIWEGTPRSIRDSHRKVRDSHDGLIIQRNMALFFSGGERKELKLRVTGRIWKEQQNPDSGACIPNLFS

SEQ ID NO: 6001 - protein, 118 aa, Zea mays
  unsure (1)..(118): unsure at all Xaa locations
  Clone ID: PAT_MRT4577_65893C.1.pep
ASRKENPTAVGVACSDGCGAILPDLATQVLIPVAAAVGIAFAGGHWVLGSKVRGTPERRSDRGPVNSAPTHYLMAEEEGLNDHIVAGQCPQIQTALSEGATXSFLFTDHKYAGLFMGI

SEQ ID NO: 6002 - protein, 120 aa, Zea mays
  unsure (1)..(120): unsure at all Xaa locations
  Clone ID: PAT_MRT4577_65914C.1.pep
TILKPYRFQHAIAAGILPLXPLFLQQPSGVLQKLPLVHTMVHSIKGQHLQQLVLGNLAGYCKQQXFIPFNQLGALNSGAYLQQQLPCKXIAAAYHQPFLPFNPLAALHSAAYLQQHQLPP

SEQ ID NO: 6003 - protein, 114 aa, Zea mays
  Clone ID: PAT_MRT4577_65929C.1.pep
GAPGFGFMDERIEMAASDVEYRCFAGGLAWATDDHSFHNAFSTYGEVLEYKIILDRETQRTRSFGFITFFTEEAMRNAIDDMNGKELDCRNITDNEAQSRSNRRGGGRRYYQGR

SEQ ID NO: 6004 - protein, 33 aa, Zea mays
  Clone ID: PAT_MRT4577_65932C.1.pep
GYGAGAGYGGGAAGYGGGNRGGGYGNSGGNWRT

SEQ ID NO: 6005 - protein, 63 aa, Zea mays
  unsure (1)..(63): unsure at all Xaa locations
  Clone ID: PAT_MRT4577_65936C.1.pep
AAGGYGGAREADGYGGAGLRXADDGYVGXDGYGGXDGYGGGDAGYGGGNRAGGYGNSDGNWRS

SEQ ID NO: 6006 - protein, 127 aa, Zea mays
  Clone ID: PAT_MRT4577_65937C.1.pep
PVMPPAATTLARQPQVPEQHPVVVATTRRMATVAEARATPMGTGGTERWGPPGQVILFAAVLFALVHRVYLRSCRVCCSPSVFFIARSLCVSCYCCVHPRLHQTHASNSMVCGSMDAVTPLTLYCEL

SEQ ID NO: 6007 - protein, 137 aa, Zea mays
  Clone ID: PAT_MRT4577_65975C.1.pep
SNYHHRKHIIVPTLAPKIFGLLMLLGLYASPDTATIFPQCSHAPITTLTTPYLSPTLYSVCENPLLQHYTIQQAICTGIIPLSPLLLQHSSHLLQQLPLLHTFAQNITAQHLQQLVLANLAVYSQQQQVLPFNQLPA

SEQ ID NO: 6008 - protein, 77 aa, Zea mays
  unsure (1)..(77): unsure at all Xaa locations
  Clone ID: PAT_MRT4577_659C.1.pep
MSCNCGSSCGCGSSCKCGKKYPDLQETSTAAQATVVLGVAPAKKAAPEFVEAXASESGEAXHACGCRSRCXCDPCNC

SEQ ID NO: 6009 - protein, 129 aa, Zea mays
  Clone ID: PAT_MRT4577_66050C.1.pep
MEGDSFSGGAMANGGGGGGGGSGQVVDGKLIHTFHRSFVQVQSLLDQNRMLISEINQNHESRAPDNLTRNVGLIRELNNNIRRVVGLYADLSASFARTMDHASSEGDSSGTGNNGRAGAGAGHKRVRPA

SEQ ID NO: 6010 - protein, 123 aa, Zea mays
  Clone ID: PAT_MRT4577_66051C.1.pep
MEGDSFSGGAMANGGGGGQVVDGKLIHTFHRSFVQVQSLLDQNRMLISEINQNHESRAPDNLTRNVGLIRELNNNIRRVVGLYADLSASFARTMDHASSEGDSSGTGTGRAGAGAGHKRVRPA

SEQ ID NO: 6011 - protein, 81 aa, Zea mays
  unsure (1)..(81): unsure at all Xaa locations
  Clone ID: PAT_MRT4577_66070C.1.pep
MGDKILCLLMLPGLSGCAGTATIFPKCSQAPIASILTSYXLSPAASSACENPIFQPYRIQQAITAGILPLSRLFLPQSSAL

SEQ ID NO: 6012 - protein, 152 aa, Zea mays
  Clone ID: PAT_MRT4577_66146C.1.pep
MSLVRRSNVFDPFSMDLWDPFDTMFRSIVPSAVSTNSETAAFASARIDWKETPEAHVFKADLPGVKKEEVKVEVEDGNVLVISGQRSREKEDKDDKWHRVERSSGQFVRRFRLPENAKVDQVKAGLENGVLTVTVPKAEEKKPEVKAIEISG

SEQ ID NO: 6013 - protein, 152 aa, Zea mays
  Clone ID: PAT_MRT4577_66149C.1.pep
MSLVRRSNVFDPFSMDLWDPFDTMFRSIVPSATSTNSETAAFASARIDWKETPEAHVFKADLPGVKKEEVKVEVEDGNVLVISGQRSREKEDKDDKWHRVERSSGQFIRRFRLPENAKVDQVKAGLENGVLTVTVPKAEEKKPEVKAIEISG

SEQ ID NO: 6014 - protein, 152 aa, Zea mays
  Clone ID: PAT_MRT4577_66150C.1.pep
MSLVRRSNVFDPFSMDLWDPFDTMFRSIVPSATSTNSETAAFASARIDWKETPEAHVFKADLPGVKKEEVKVEVEDGNVLVISGQRSREKEDKDDKWHRVERSSGQFVRRFRLPENAKVDQVKAGLENGVLTVTVPKAEEKKPEVKAIEISG

SEQ ID NO: 6015 - protein, 119 aa, Zea mays
  Clone ID: PAT_MRT4577_66168C.1.pep
GHTFIKKAPKPKGRGRFFEGFSFDNLGGAIFPWIRLHAYIHIYPHDRKTNQGNSSLISGALGHKHKQVGAKNYAMGPSRGTSKFFDWFPNFDQYTHSDAKPNKNGRVKTWAGKKARLLF

SEQ ID NO: 6016 - protein, 133 aa, Zea mays
  unsure (1)..(133): unsure at all Xaa locations
  Clone ID: PAT_MRT4577_66422C.1.pep
VEDGNETTNTTRRVAHRFACDALTVEFFRSXISAQERPAHRHAPKRVKSTLRLDRXDNPRRKWLNXDVLILNTGHWRTPTKSFDTGRYFQAARHLKLGTCIDAGFRMALETWASRVQKKVDLNRTHVLFHTYE

SEQ ID NO: 6017 - protein, 48 aa, Zea mays
  Clone ID: PAT_MRT4577_66479C.1.pep
EHINFFIWFLFWQKILDALFLHPASREVTGFLEKNPGKNNYNTRPLHF

SEQ ID NO: 6018 - protein, 909 aa, Zea mays
  Clone ID: PAT_MRT4577_66490C.1.pep
MFTPQGKGWTGWSTPTPANQRSGGGAPAASAPLGKGKGRVAELEQELHEYQYNMGLLLIEKKEWAAKFEEISEVLTQKEEILKREQAAHLNAISEYERREENMRKALGVEKQCVADLEKALRDIRAEIAEVKFTSEKKITDAQSLEASLEEKSLEIEGKLHAADAKLAEANRKKSQADRDLEEAEARQRRLEKEKLYFETERKAREKQLKEQEESLQEWEKKLKESQNRLNELQRSINEREERANKNDQLFKIKQDELEEARRTVEAAKVTLKVKEDDINKRLNELHLQEKDADSKRSALEEQGKKLDEREAKVTNREKEGLQKLLEDHQVELESKRRDFELELERERKSFDQNMTQKQADLLKREKDVKSLEAKLSKSEQALNDKKKSMENLQNDLDAKSKALKSWDESLKNDEKRLLKEKQQMDHEREQLETYKLELEKIKSALEAEKEKISEEQNNLKLTAQERQEHSLLIAKLKKEIEEYRMRSNSLSEEMEDLRKQRQKFEEEWEQLDEKRALLVEEDKRLNIERMNLERWRDNEEKRLNDMKLKMDEEYKQQLESLERKEKALSDDMKHKQMENDEFLKGERADVQRKLQLKRHELEMEMEQKQATKEKELEEKENELNKKIDFVENKLRHAIELNESKIEKLLLEKREVQMERELLLEERKKTETDKADIRRDIESLHSLSKSLKERREAYNRDRSRLIELFEKYKACKNCGISIFEGLDSLLLKDSAEIEHPSLAVEGDDHALTTDTSGPDTGTLVNSGGRFSLLQKCSRLFKFSPRKKGEQSSEQPSERNISFGARLEEATQSDGDYVPTPVYEIAHDSFNAEDELPSDGETRENEESERHDIADNAQMESSVGVADNSIDILGTKSFDGANDMAVEATIVSVDQNGEDSVVPAEAGVEP

SEQ ID NO: 6019 - protein, 380 aa, Zea mays
  Clone ID: PAT_MRT4577_66518C.1.pep
MASVAELKEKHAAATASVNSLRERLRQRRETLLDTDVARYSKSQGRVPVSFNPTDLVCCRTLQGHSGKVYSLDWTPEKNWIVSASQDGRLIVWNALTSQKTHAIKLHCPWVMACAFAPNGQSVACGGLDSACSIFNLNSQADRDGNMPVSRILTGHKGYVSSCQYVPDQETRLITSSGDQTCVLWDVTTGQRISIFGGEFPSGHTADVQSVSINSSNTNMFVSGSCDTTVRLWDIRIASRAVRTYHGHEDDVNSVKFFPDGHRFGTGSDDGTCRLFDMRTGHQLQVYSREPDRNSNELPTVTSIAFSISGRLLFAGYSNGDCYVWDTLLAEVVLNLGNLQNSHDGRISCLGMSSDGSALCTGSWDKNLKIWAFSGHRKIV

SEQ ID NO: 6020 - protein, 331 aa, Zea mays
  Clone ID: PAT_MRT4577_66519C.1.pep
LHIFGFCGDSWKFSTSAICVYSLDWTPEKNWIVSASQDGRLIVWNALTSQKTHAIKLHCPWVMACAFAPNGQSVACGGLDSACSIFNLNSQADRDGNMPVSRILTGHKGYVSSCQYVPDQETRLITSSGDQTCVLWDVTTGQRISIFGGEFPSGHTADVQSVSINSSNTNMFVSGSCDTTVRLWDIRIASRAVRTYHGHEDDVNSVKFFPDGHRFGTGSDDGTCRLFDMRTGHQLQVYSREPDRNSNELPTVTSIAFSISGRLLFAGYSNGDCYVWDTLLAEVVLNLGNLQNSHDGRISCLGMSSDGSALCTGSWDKNLKIWAFSGHRKIV

SEQ ID NO: 6021 - protein, 75 aa, Zea mays
  unsure (1)..(75): unsure at all Xaa locations
  Clone ID: PAT_MRT4577_665C.1.pep
ACNCGSSCGCGSSCKCGKKYPDMENTSTSAQATVVLGVAPXKKSAPEFVEAAAESGEAAHGCRYGGNCKCDPCNC

SEQ ID NO: 6022 - protein, 533 aa, Zea mays
  Clone ID: PAT_MRT4577_6674C.1.pep
MAGGGAAPPPKQEELQPHPVKDQLPSVSYCITSPPPWPEAVILGFQHYIVMLGTSVIIPSALVPQMGGGNEEKARVIQTLLFVAGINTLCQSFFGTRLPAVMGGSYTIVAPTISIIMAGRYSNEADPREKFLRTMRGTQGALIIASTIQIVLGFSGLWRNVVKLLSPLSAVPLVSLAGFGLYELGFPGVAKCVEIGLPEIILMLIFSQYLPHAVHAAKPVFDRFSVIFTIAIVWLYAYILTVSGAYKSARTKTQLHCRVDRSGLVGGAPWISVPYPFQWGAPTFDAGESFAMMVAAFVALVESSGAFIAVSRYASATMIPPSVLGRGIGWQGIGTLLGAFFGTANGTAVSVENAGLLALTHVGSRRVVQISAGFMIFFSVLGKFGAIFASIPLPIFAALYCILFAYIGACGLSFLQFCNLNSFRTKFIMGFSLFMGLSVPQYFNEYTSVAGYGPVHTGARWFNDMINVPFSSKPFVAVLVAFLLDNTIQVRDSGVRRDRGYHWWDKFRSFKTDSRSEEFYSLPFNLNKFFPSV

SEQ ID NO: 6023 - protein, 136 aa, Zea mays
  Clone ID: PAT_MRT4577_6675C.1.pep
VVGKYPLGGFVNKFPPGSLVMRLPDSEIGQIPPVIFGPINGGIGIIASLPPGQKIFLEKLPSPLVKYIKGVGNLSPEQWGSFHNDKKTGEGGNFLPGGLIEFFLALNRSKMEEGSKAMGVPLEELSKRVEKLTRLP

SEQ ID NO: 6024 - protein, 94 aa, Zea mays
  unsure (1)..(94): unsure at all Xaa locations
  Clone ID: PAT_MRT4577_66C.1.pep
ALARSVTNPQVSVAFIAASFVWRGEDRKWRRLRACSWGWATPLLDISAVVGDAFLTKYDIKLNNAILAEEEHLPMYDELASXSNVEYIAGGAAQ

SEQ ID NO: 6025 - protein, 163 aa, Zea mays
  unsure (1)..(163): unsure at all Xaa locations
  Clone ID: PAT_MRT4577_67053C.1.pep
GRRPAGHNVVLVIQVIIPSTPDKRGKXGXMFKGVLLPYIVVALCYFPVALIGYWAFXNSVQDNILITLSKPSWLIALANMMVVIHVIGSYQIYAMPVIDMIDTVLVKKLRFPSGLTLXFIAGTAYVAFTMFHMFSSFPFFCGTXLAFFGGFVFAPTXTLFLPC

SEQ ID NO: 6026 - protein, 87 aa, Zea mays
  unsure (1)..(87): unsure at all Xaa locations
  Clone ID: PAT_MRT4577_67111C.1.pep
RFVPLTGLAAMYCRVILQQRQVLPFIQLAGVSPGTFVMQPRLVPLXQRGGPNVGTLLXVRQFVPFNLLALTNPSAFYQQPIIGGALF

SEQ ID NO: 6027 - protein, 38 aa, Zea mays
  unsure (1)..(38): unsure at all Xaa locations
  Clone ID: PAT_MRT4577_67166C.1.pep
GPXPRSVNPIXKDMRIHVQCNLKGNMAEEIVKHAYAQS

SEQ ID NO: 6028 - protein, 83 aa, Zea mays
  Clone ID: PAT_MRT4577_67392C.1.pep
PLNAGGGYAGAAAASGAAGASGGGGGGYGGGTRGGGYGNSAGNWRNLPVGPARPSYPVRPRDVSPSPKGLSSFAPFVVAPLCF

SEQ ID NO: 6029 - protein, 573 aa, Zea mays
  unsure (1)..(573): unsure at all Xaa locations
  Clone ID: PAT_MRT4577_6745C.1.pep
CAFRRIGLHACATGTMWTASAHIITAVIGSGVLSLGWAIAQLGWVAGPVVMLLFSLVTYYTSSLLADCYRSGDPSTGKRNYTYMDAVNANLSACPSAFVPLLPTSLHCDFARVGDPLARAYSVHPVDWNFVEXGIKVQICGFLQYANIVGVAIGYTIAASISMLXERSLSXTVMHECRTSCDLIYIWCRVGXATACSAIRRANCFHQKGHGNPCKISSTPYMIIFGVAEIFFSQIPDFDQISWLSILAAVMSFTYSSIGLGLGVVQVIGTLQAHAVTHDAFFFRSGKHQVISRQCHXTYHECDAXANRGVQGSLTGITIGVVTPMDKVWRSLQAFGDVAFAYSYSLILIEIQDTIRAPPPSESTVMKRATVVSVAVTTLFYMLCGCMGYAAFGDGAPGNLLTGFGFYEPFWLLDVANAAIVVHLVGAYQVYCQPLFAFVEKWAAQRWPDSAYITGEVEVPLPLPASRRRCCKVNLFRATWRTAFVVATTVVSMLLPFFNDVVGFLGALGFWPLTVYFPVEMYVVQKKVPRWSSRWVCLQMLSLGCLVISIAAAAGSIAGIASDLKVYRPFKSY

SEQ ID NO: 6030 - protein, 341 aa, Zea mays
  unsure (1)..(341): unsure at all Xaa locations
  Clone ID: PAT_MRT4577_67667C.1.pep
MISLTKLLSSALHGYHSCSIRRFSWFAALGEHQFAVXLLKIRNQIGTTEELLCVLAFEPENMWQLYEPLRDKWITLPVMPSQIRNIARFGVASVAGKLYVIGGGSDRVDPLTGDHDRIFASNEVWSYDPLHRVWSQRAPMLVARAMFACCALDGKIIVAGGFTNCRKSISKAEIYDPEAGIWEPLPDLRLAHSSACTGLVIKGKMHVLHKGLSTVQILEDGGSHWAVEDFSWLQGPMAMVGGELYVLSNSCIMKQRGENFPDKMVSCASEFQSRIGFGMIGVGDNIYLVGGVIGPGPRNQCIKLLSDVDILNVTSERPTWRPGSPMTHCRGSICGCALLRI

SEQ ID NO: 6031 - protein, 342 aa, Zea mays
  Clone ID: PAT_MRT4577_67670C.1.pep
MPFSSDEYQKCLARVPFLFHPTLQLVCRSWRASVCSGELLKIRNQIGTTEELLCVLAFEPENMWQLYDPLRDKWITLPVMPSQIRNIARFGVASVAGKLYVIGGGSDRVDPLTGDHDRIFASNEVWSYDPLHRVWSQRAPMLVARAMFACCALDGKIIVAGGFTNCRKSISKAEIYDPEAGIWEPLPDLRLAHSSACTGLVIKGKMHVLHKGLSTVQILEDGGSHWAVEDFSWLQGPMAMVGGELYVLSNSCIMKQRGENFPDKMVSCASEFQSRIGFGMIGVGDNIYLVGGVIGPGPRNQCIKLLSDVDILNVTSERPTWRPGSPMTHCRGSICGCALLRI

SEQ ID NO: 6032 - protein, 65 aa, Zea mays
  Clone ID: PAT_MRT4577_67676C.1.pep
CLPWSRGFICVRVVFGRARLGFRWQGRPVPVVRAVFILGFSRPMHQTAWTADRWMLLPPSGFILS

SEQ ID NO: 6033 - protein, 221 aa, Zea mays
  Clone ID: PAT_MRT4577_67708C.1.pep
SYAYILIEIQDTIKAPPPSEVTVMKKATMVSVATTTVFYMLCGCMGYAAFGDDAPDNLLTGFGFYEPFWLLDVANAAIVVHLVGAYQVFCQPLFAFVEKRAAARWPDSRFMTRELRLGPFVLGVFRLTWRTAFVCLTTVVAMMLPFFGDVVGLLGAVSFWPLSVYFPVEMYKAQRRVRRWSTRWLCLQTLSAVCLLVSIAGAVGSTAGVINAVNLHRPFSG

SEQ ID NO: 6034 - protein, 194 aa, Zea mays
  unsure (1)..(194): unsure at all Xaa locations
  Clone ID: PAT_MRT4577_67784C.1.pep
KAMLMSQKRLEKRFGQSPIFTASTFMTQGGIPPSTNPASLLKEAIHVISCGYEDKTEWGKEIGWIYGSVTEDILTGFKMHARGWISIYCMPPRPCFKGSAPINLSDRLNQVLRWALGSVEILFSRHCPIWYNYGGRLKLLERVAYINTIVYPLTSXPLIAYCVLPAICLLTNKFIIPEISNXLGCXFILMFASI

SEQ ID NO: 6035 - protein, 423 aa, Zea mays
  unsure (1)..(423): unsure at all Xaa locations
  Clone ID: PAT_MRT4577_67810C.1.pep
MALAVRTPRIQPRPASVSAPTTPTSTSLAAGNALPCYGLAXRLCXPFTEATSSSRYRRDAWSYAADGSSNSASPSSAAAAAAGRRDDEIALQLPELRRLLDVLRASRGRGAEEGGGPGEVALVGTGPGDPELLTLKAVRAIEAADLVLYDRLVSNDVLDLVGEGARLLYVGKTAGYHSRTQEEIHELLLSFAEAGANVVRLKGGDPLVFGRGGEEMDFLQQQGIKVEVIPGITSASGIAAELGIPLTHRGVATSVRFLTGHSRNGGTDPLYVAGNAADPDTTLVVYMGLSTLPSLAPKLMKHGLPPDTPAVAVERGTTPQQRTVFASLKDLVDEVKSADLVSPTLIIIGKVVSLSPFWVESSEHDALKVQSSYANEAXDDNRFSWFLVTGQYLRNARSQIWEHRFDLVYTETSQEAWILNGGW

SEQ ID NO: 6036 - protein, 118 aa, Zea mays
  Clone ID: PAT_MRT4577_67817C.1.pep
QIPPANPQFLRVRAPMSGRGKGGKGLGKGGAKGPPKVFRDNIQGIPKPPIRRLARRGGVKRISGLIYEETPGVLKIFLENVIRDPVTYPEHAPPKTVPPMDVVYAPKRQGRPLYGFGG

SEQ ID NO: 6037 - protein, 99 aa, Zea mays
  unsure (1)..(99): unsure at all Xaa locations
  Clone ID: PAT_MRT4577_6783C.1.pep
MAAKIFCLLMLLGLSASAATATILPQCSQAPIAYLLPSYLSPAVSNVCENPMLHLYRIQLVFAVCILPLSXLXFLQQSSAILQHLPMVHRLTQNIRSHQ

SEQ ID NO: 6038 - protein, 323 aa, Zea mays
  Clone ID: PAT_MRT4577_67934C.1.pep
MASAIKAASTSSRWSSSPAAVHSSPLSKRRRAVAAVAPAAPAAPAKLTAGAGGRCLPVSQTMSRLRAQGKTAFIPYITAGDPDLATTAEALRLLDACGADVIELGVPFSDPYADGPVIQASAARALASGTTPDGVLAMLKEVTPELSCPVVLFSYFNPIVRWGLADFAAAVKEAGVHGLIVPDLPYGNSCALTLRTEAIKNNLELVLLTTPSTPADRMEEITRASRGFVYLATVNGVTGPRANVNTRVQSLIQEVKQVTDIPVAVGFGISKPEHVKQIAEWGADGVIIGSAMVRQLGEAASPKEGLKRLEKYARSMKNALPCQ

SEQ ID NO: 6039 - protein, 144 aa, Zea mays
  unsure (1)..(144): unsure at all Xaa locations
  Clone ID: PAT_MRT4577_68005C.1.pep
SCKRNFDRSALRGTAVKAPCLPFPRLTPLGEPPSPRAAHVATAVXTMVVIQGGIGPAGLSAEDLHXLDLKQQRPRWHRVVVQGPGPWYGYVMALVGQRFLLTIGGNDGKRPPADVWALDTAAKPYEWRKLEPEGEGPPPCITCV

SEQ ID NO: 6040 - protein, 63 aa, Zea mays
  Clone ID: PAT_MRT4577_68112C.1.pep
NGGGLSLDYCVYTGPQKAFFFNQAKKHLRPFLAQKWALFIAYARAFIRCNFYRAEPARWGLLD

SEQ ID NO: 6041 - protein, 768 aa, Zea mays
  Clone ID: PAT_MRT4577_6821C.1.pep
MASLGDIGLAAGLNVLTAVAFLLAFAFLRLQPINDRVYFPKWYLRGMRDNPIVSGAAVQKFVNLDARSYLKFLNWMPAALKMPQDELINHAGLDSVVYLRIYVTGLKIFVPITVLAFLVLVPVNWTNDTLGRINVVYSPIDKLSISNVPNGSKRFIAHLGMAYAITFWTCYVLLKEYEIISNMRLRFLASEKRRPDQFTVLVRSVPPDPDESISELVEHFFLVNHPDHYLQHQVVYNANKLADLVEKKKKMRNWLDYYLLKYERNSSLRPTTKTGFLGCFGSKVDAIDYYKSEIEKIGKQEAEERKNVMKDPKSVVPAAFVSFRSRWGAAVCAQTQQTSNPTLWLTEWAPEPRDVYWNNLSIPFVSLTIRRLIVAVAFFFLNFFYVIPITFVQSLANLEGIEKALPFLKPLIDLPFIKSFIQGFLPGIALKIFLIVLPTILMFMSKFEGLISQSSLERRSASKYYIFLFFNVFLGSVIAGSALEQLKTYLHTSANDIPRIIGDSIPMKATFFITYVMVDGWTGIAGEILRLKPLIFFHLKNFFLVKTEKDREEAMDPGSICFDSTEPRIQLYFLLGLVYAAVTPFLLPFILVFFGFAYVVFRHQIINVYNQQYESAAQFWPSVHGRIITALIVSQLLLLGLMSTNDFEQTTPVLLVLPVLTFGFYKYCKNRFEPAFVRNPLQEAMKKDTLERAREPNLDLKAYLANSYLHPVFKGDEGDDRYSVMDDDGWMEEEVIVPTKRHSRRTTPAQSKHEGSDSLSVLESSLQR

SEQ ID NO: 6042 - protein, 99 aa, Zea mays
  Clone ID: PAT_MRT4577_68294C.1.pep
LLPFSQLVVAYHQQFFPFNQLAALNFPVYVQQQLLPFSQLVVVSPAAFLTKQQLLRFYLHAGPKVGTFLQLQQLLPFNQHVLTNPTGFYQQPIIGGALF

SEQ ID NO: 6043 - protein, 178 aa, Zea mays
  Clone ID: PAT_MRT4577_68371C.1.pep
GDGAKLVRDAFQLAKEKAPCIIFIDEIDAIGTKRFDSEVSGDREVQRTMLELLNQLDGFSSDERIKVIAATNRADILDPALMRSGRLDRKIEFPHPSEEARARILQIHSRKMNVNPDVNFEELARSTDDFNGAQLKAVCVEAGMLALRRDATEVTHEDFNEGIVQVQAKKKSSLNYYA

SEQ ID NO: 6044 - protein, 430 aa, Zea mays
  Clone ID: PAT_MRT4577_68373C.1.pep
MSSSGAPAPAAAMAVDDAEDDQLASMSTEDIIRASRLLDNEIRVLKDELQRTNLELESFKEKIKENQEKIKLNKQLPYLVGNIVEILEMNPEDEAEEDGANIDLDSQRKGKCVVLKTSTRQTIFLPVVGLVDPDKLKPGDLVGVNKDSYLILDTLPSEYDSRVKAMEVDEKPTEDYNDIGGLEKQIQELVEAIVLPMTHKDRFQKLGIRPPKGVLLYGPPGTGKTLMARACAAQTNATFLKLAGPQLVQMFIGDGAKLVRDAFQLAKEKAPCIIFIDEIDAIGTKRFDSEVSGDREVQRTMLELLNQLDGFSSDERIKVIAATNRADILDPALMRSGRLDRKIEFPHPSEEARARILQIHSRKMNVNPDVNFEELARSTDDFNGAQLKAVCVEAGMLALRRDATEVTHEDFNEGIVQVQAKKKSSLNYYA

SEQ ID NO: 6045 - protein, 137 aa, Zea mays
  unsure (1)..(137): unsure at all Xaa locations
  Clone ID: PAT_MRT4577_68380C.1.pep
CLMPPXVSLLXATQGDAIRNYYHDNHVIQDMLVPLYKVGDALEFVHHEMEVYPLWLCPHRLFKLPVKTMIYPEPGFEHQQRQGDTSYAQMFTDVGVYYTPACIFRGEEFDGAESVKRLEQWLIENHSYQPQYAVTEL

SEQ ID NO: 6046 - protein, 80 aa, Zea mays
  Clone ID: PAT_MRT4577_68431C.1.pep
RIGCSCLSPGSAASGGGEGEKLVRSVPDHACLLVNQGSHTYLRLLECGVLMESKGGKKSSSRHSMLVEAPLGYRFDVFRP

SEQ ID NO: 6047 - protein, 123 aa, Zea mays
  Clone ID: PAT_MRT4577_68483C.1.pep
ASGKLSCRPIIYMTSWKRKTCSSTNHSAWLRYKKEKASAYLSMHASADLEPGAGQLCRGFGPWGTSLLDTIRICLQQSSPRCRPDAEEDDWLGKQQPLPGGEPPPPPPLSLTANAPSSATLRL

SEQ ID NO: 6048 - protein, 87 aa, Zea mays
  unsure (1)..(87): unsure at all Xaa locations
  Clone ID: PAT_MRT4577_6864C.1.pep
GARTKNRDKWVSQMPRFYYLLVLAANWFSRPSLFYERGRLIWCNFCSRQYSVPDLTLYYFQRXAWRVALCAINHLXEAWRRRVIVRM

SEQ ID NO: 6049 - protein, 286 aa, Zea mays
  unsure (1)..(286): unsure at all Xaa locations
  Clone ID: PAT_MRT4577_69309C.1.pep
DECNTSASTTRSRSRLTTHDWRSVGGGGSKRPSNNRHPHARNPRFLKELDLQKSCVKHQDHQWINCFPKSSTSLECLNFSCLTGEVNAVALEELVARSPNLKSLRLNLAVPFDVLSRILSRTPKLEDLGTGSFLQGNDPAAYASLCRALENCTSLKSISGFWDAPGFYVQGILSNCKIRNLTCLNLSYATLIQSTQLIGIIRHCKKLHVLWVLDHIGDEGLKAVSFSCPDLQELRVYPSVVAPRGTVTXEEGLVALSSCXKLQHVLFSCVRMTNTALMTIARYCPR

SEQ ID NO: 6050 - protein, 573 aa, Zea mays
  Clone ID: PAT_MRT4577_69310C.1.pep
MAYFPDEVVGYILGYVTSHQDRNAVSLVCRAWYDIERHGRHSVLVRNCYAVCPERVHMRFPNMRALSLKGKPHFAEFNLVPAGWGATANPWVDACARACPGLEELRLKFMVVTDECLKLLSLSFTNFKSLVLVCCEGFSTTGLANIATNCRFLKELDLQKSCVKHQDHQWINCFPKSSTSLECLNFSCLTGEVNAVALEELVARSPNLKSLRLNLAVPFDVLSRILSRTPKLEDLGTGSFLQGNDPAAYASLCRALENCTSLKSISGFWDAPGFYVQGILSNCKIRNLTCLNLSYATLIQSTQLIGIIRHCKKLHVLWVLDHIGDEGLKAVSFSCPDLQELRVYPSVVAPRGTVTEEGLVALSSCRKLQRVLFSCVRMTNTALMTIARYCPRLTSFRLCIRKPRSADAVTGQPLDEGFGAIVRSCRGLRRLAMSGLLTDSVFLYIGMYAEKLEMLSVTFAGDTDDGMVYVLNGCRNLKKLVIKESPFGDAALLAGAHRYESMRSLWMSSCQITLGGCKALAATMPNINVEVIGGASFGAMDGGVSGARKVDMLYLYRTLAGPRCDTPGFVSIL

SEQ ID NO: 6051 - protein, 573 aa, Zea mays; identical to SEQ ID NO: 6050
  Clone ID: PAT_MRT4577_69311C.1.pep

SEQ ID NO: 6052 - protein, 351 aa, Zea mays
  Clone ID: PAT_MRT4577_69313C.1.pep
MMMLIDCSRCRTPLQLPHGAPCIRCAICGAITHVAPAPPVEPNRGAVQPPPGWGPPPPPVHGRKRAVVCGISYRHSRYELKGCINDVKCMRHLLMTRFNFPDDSIIMLNEEQTDPYKIPTKHNIGMAMYWLVQGCQPGDSLVFHYSGHGAQQRNYNGDEVDGFDETLCPLDFETQGMIVDDDINTALVRPLPRGVKLHAFIDACHSGTALDLPYLCRMNRSGQYVWEDHRPPSGVWKGTSGGEAISFSGCDDDQTSADTSALSKVTSTGAMTFGFIQAIERGQGTTYGSILNSMRSTIRNTDDSAGVGGGAVTSLITMLLTGGSLSAGGLRQEPQLTACEPFDVYAKPFSL

SEQ ID NO: 6053 - protein, 63 aa, Zea mays
  unsure (1)..(63): unsure at all Xaa locations
  Clone ID: PAT_MRT4577_69357C.1.pep
MASSEGVLLGMGLPLLDISSVVHDAFLXQYDIXLNNAILADDIHSPMYDDSTSISNVAYIVAG

SEQ ID NO: 6054 - protein, 55 aa, Zea mays
  Clone ID: PAT_MRT4577_69475C.1.pep
DRPSQYNGPCFIQQWNGFTWCRVHHKKGAYIHVLELFRFSSHCDVLFLLSSCYNR

SEQ ID NO: 6055 - protein, 64 aa, Zea mays
  Clone ID: PAT_MRT4577_69499C.1.pep
GEGDEAESAGPLRLPMYHDLELYALARRCSRRCGGSGSPWHRRGRPRSSGTQLSDAAISIGRVG

SEQ ID NO: 6056 - protein, 278 aa, Zea mays
  Clone ID: PAT_MRT4577_69510C.1.pep
MGRQPCCDKVGVKKGPWTAEEDQKLVGFLLTHGHCCWRVVPKLAGLLRCGKSCRLRWTNYLRPDLKRGLLSDDEERLVIDLHAQLGNRWSKIAAQLPGRTDNEIKNHWNTHIRKKLVRMGIDPVTHLPLQEPPAPAPAPAEQQEQSHRQQEELQLQELQNGRELIMQEGAGEDDITPMIQPHEIMPTAAAASNCGSVSSAHAGSASVVSPSCSSSAVSGVEWPEPMYLLGMDGIMDADWGSLFPDTGAGGGGGGFDLGVDPFDQYPGGGFDQEDDHRI

SEQ ID NO: 6057 - protein, 119 aa, Zea mays
  unsure (1)..(119): unsure at all Xaa locations
  Clone ID: PAT_MRT4577_69619C.1.pep
IFCLLMLLYLSAIAPTATIFPQYSQASIAFLLPTYLXPTVSSVCXNPILQPYTIQQSITACILPLSPLFLQQSSYLLQQLPFVHLLAQNIKAQQLQQLLLTNLATYSXQHQFLSFNQLT

SEQ ID NO: 6058 - protein, 116 aa, Zea mays
  Clone ID: PAT_MRT4577_69631C.1.pep
MDQGDVAVAVPPAAPSSSCGGAGCKKGKRFEIKKWNAVALWAWDIVVDNCAICRNHIMDLCIECQANQASATSEECTVAWGVCNHAFHFHCISRWLKTRQVCPLDNSEWEFQKYGH

SEQ ID NO: 6059 - protein, 276 aa, Zea mays
  Clone ID: PAT_MRT4577_69730C.1.pep
MDEENVVELLQRYRRDRQVLLNYILSGNLIKKVAMPPGAISLDDVDIDQVSVDYVLNCAKKGEPLDLGDAIRLFHDSLDYPYVNNTGAVDEFYLLTKPEYSGPAPTREPPPIPATAPSSVVVPPPDVEPAPIIVSSPVTATNLPKSQPFDSPTEKELTIDDIEDFEDDEDEFDGRRASRRHQTDASDLSLLLPLFETGITDNDLRETAYEILVAAAGASGGLIVPQKEKKKEKRHRLMRKLGRSKSESVDINTQRQPGLVGLLETMRAQLGITESM

SEQ ID NO: 6060 - protein, 266 aa, Zea mays
  Clone ID: PAT_MRT4577_69830C.1.pep
MKALPRIDLSNATTDITEWRPPDAPVSASRRRLDVGRGKQNNAGSATASASRAPCHGADTESGNRKGGREMDSSTSAAAAGEAAVPPEDDVCSVCHDRFRIPCQANCSHWFCGECIIRVWNYGPPVQACKCPICRRLINLLVPAALSGQEDGPQAQRILGEIQHYNCIFGGAPRSLTQRLQDLPFFIRRLFRELMDPQRTLPLVFRARMLMMVALSAIYVLSPVDILPESMLGLFGFVDDLLILLIVFLHLAAVYRSLLLYRHGGQ

SEQ ID NO: 6061 - protein, 163 aa, Zea mays
  Clone ID: PAT_MRT4577_69852C.1.pep
MLVHQQNLEEQEPLSSIFDGSSPASAIVAVDTNLDTSTPDTYRAPPAPLPYDVILAVPNNPGFGNSVGLEKPDTKSKTDDQQESINDQESLEVDESCKKSVTEDKADEEDVCPICLEEYDEENPRSITKCEHHFHLCCILEWMERKDTCPVCDQITLVDEMFE

SEQ ID NO: 6062 - protein, 184 aa, Zea mays
  Clone ID: PAT_MRT4577_69855C.1.pep
MGGCCCCSSRTSEAVRARAPVDIYHQQNLEEQEPLSSIFDGSSPASAIVAVDTNLDTSTPDTYRAPPAPLPYDVILAVPNNPGFGNSVGLEKPDTKSKTDDQQESINDQESLKVDESCKKSVTEDKADEEDVCPICLEEYDEENPRSITKCEHHFHLCCILEWMERKDTCPVCDQITLVDEMFE

SEQ ID NO: 6063 - protein, 104 aa, Zea mays
  unsure (1)..(104): unsure at all Xaa locations
  Clone ID: PAT_MRT4577_6991C.1.pep
KQQQQPPVSQQPAANPQQFHTINQPAARDSPAXAQQQQXXPXSQQAGVSXATIRTQPQKKPFNQHEAXNAGTLXQXQQLXPFNQXALTNPAVFXQQPIIGGVLF

SEQ ID NO: 6064 - protein, 156 aa, Zea mays
  Clone ID: PAT_MRT4577_69980C.1.pep
MDAVMFGLETPLMAALQHLLDVPDGDNKTGGGATRTYVRDARAMAATPADVKELPGAYAFVVDMPGLGTGDIRVQVEDERVLVVSGERRREEREDDAKYLRMERRMGKFMRKFVLPDNADVDKVAAVCRDGVLTVTVEKLPPPEPKKPKTIEVKVA

SEQ ID NO: 6065 - protein, 166 aa, Zea mays
  Clone ID: PAT_MRT4577_69981C.1.pep
MDAVMFGLETPLMAALQHLLDVPDGDAGAGGDSDNKTGSGGSATRTYVRDARAMAATPADVKELPGAYAFVVDMPGLGTGDIRVQVEDERVLVVSGERRREEREDDAKYLRMERRMGKFMRKFVLPDNADVDKVAAVCRDGVLTVTVEKLPPPEPKKPKTIEVKVA

SEQ ID NO: 6066 - protein, 163 aa, Zea mays
  Clone ID: PAT_MRT4577_69984C.1.pep
MDAVMFGLETPLMAALQHLLDVPDGDAGAGGDNKTGGGGATRTYVRDARAMAATPADVKELPGAYAFVVDMPGLGTGDIRVQVEDERVLVVSGERRREEREDDAKYLRMERRMGKFMRKFVLPDNADVDKVAAVCRDGVLTVTVEKLPPPEPKKPKTIEVKVA

SEQ ID NO: 6067 - protein, 163 aa, Zea mays
  Clone ID: PAT_MRT4577_69985C.1.pep
MDAVMFGLETPLMAALQHLLDVPDGDAGAGGDSDNKTGGGATRTYVRDARAMAATPADVKELPGAYAFVVDMPGLGTGDIRVQVEDERVLVVSGERRREEREDAKYLRMERRMGKFMRKFVLPTNADVDRVAAVCRDGVLTVTVEKLPPPEPKKPRTIEVKVA

SEQ ID NO: 6068 - protein, 164 aa, Zea mays
  Clone ID: PAT_MRT4577_69986C.1.pep
MDAVMFGLETPLMAALQHLLDVPDGDAGAGGDNKTGSGGSATRTYVRDARAMAATPADVKELPGAYAFVVDMPGLGTGDIRVQVEDERVLVVSGERRREEREDDAKYLRMERRMGKFMRKFVLPDNADVDKVAAVCRDGVLTVTVEKLPPPEPKKPKTIEVKVA

SEQ ID NO: 6069 - protein, 164 aa, Zea mays; identical to SEQ ID NO: 6068
  Clone ID: PAT_MRT4577_69987C.1.pep

SEQ ID NO: 6070 - protein, 164 aa, Zea mays
  Clone ID: PAT_MRT4577_69988C.1.pep
MDAVMFGLETPLMAALQHLLDVPDGDAGAGGDSDNKTGGGATRTYVRDARAMAATPADVKELPGAYAFVVDMPGLGTGDIRVQVEDERVLVVSGERRREEREDDAKYLRMERRMGKFMRKFVLPDNADVDKVAAVCRDGVLTVTVEKLPPPEPKKPKTIEVKVA

SEQ ID NO: 6071 - protein, 103 aa, Zea mays
  unsure (1)..(103): unsure at all Xaa locations
  Clone ID: PAT_MRT4577_70077C.1.pep
GFPGFGFVGERIEIAASDVEDRXLVCGLAWATDDHSLHNAFSTYGEVLQFMIILGRETQRFRGFSFATFFTGEAMRNAIXGMNGLELDSRNISVNEAHSRGGR

SEQ ID NO: 6072 - protein, 416 aa, Zea mays
  unsure (1)..(416): unsure at all Xaa locations
  Clone ID: PAT_MRT4577_70092C.1.pep
LFGXYAESSCAALVVASISSFGINHQFTPMVYPLLVSSVGIIACLITTLFATDFFEIKAANEIEPALKKQLIISTVVMTIGIALISWLGLPYTFTIYNFGAQKTVQSWQLFLCVAVGLWAGLVIGFITEYYTSNAYSPVQDVADSCRTGAATNVIFGLALGYKSVIIPIFAIAFSIFLSFSLAAMYGVAVAALGMLSTIATGLAIDAYGPISDNAGGIAEMAGMSHRIRERTDALDAAGNTTAAIGKGFAIGSAALVSLALFGAFVSRAAISTVDVLTPKVFIGLIVGAMLPYWFSAMTMKSVGSAALKMVEEVRRQFNTIPGLMEGTTKPDYATCVKISTDASIKEMIPPGALVMPTPLIVGILFGVETLAGVLAGALVSGVQIAISASNTGGAWDNAKKYIEAGASEHARTLGP

SEQ ID NO: 6073 - protein, 766 aa, Zea mays
  Clone ID: PAT_MRT4577_70096C.1.pep
MAAAAILPELATQVLIPVAAAVGIAFAVVQWVLVSKVRVTPERRADGGAVKSGPSDYLIEEEEGLNDHNVVVKCAEIQTAISEGATSFLFTEYKYVGLFMGIFAILIFLFLGSVEGFSTKSQPCHYIKDQTCKPALANAIFSTIAFVLGAVTSLVSGFLGMKIATYANARTTLEARKGVGKAFITAFRAGAVMGFLLAASGLLVLYIAINLFGIYYGDDWEGLFEAITGYGLGGSSMALFGRVGGGIYTKAADVGADLVGKVERNIPEDDPRNPAVIADNVGDNVGDIAGMGSDLFGSYAESSCAALVVASISSFGINHEFTPMVYPLLVSSVGIIACLITTLFATDFFEIKAVDEIEPALKKQLIISTIVMTIGIALISWLGLPYTFTIFNFGVQKTVQSWQLFLCVAVGLWAGLVIGFVTEYYTSNAYSPVQDVADSCRTGAATNVIFGLALGYKSVIIPIFAIAFSIFLSFSLAAMYGVAVAALGMLSTIATGLAIDAYGPISDNAGGIAEMAGMSHRIRERTDALDAAGNTTAAIGKGFAIGSAALVSLALFGAFVSRAAISTVDVLTPKVFIGLIVGAMLPYWFSAMTMKSVGSAALKMVEEVRRQFNNIPGLMEGTTKPDYATCVKISTDASIKEMIPPGALVMLTPLIVGILFGVETLSGVLAGALVSGVQIAISASNTGGAWDNAKKYIEAGVSEHARTLGPKGSDPHKAAVIGDTIGDPLKDTSGPSLNILIKLMAVESLVFAPFFAAHGGILFKWL

SEQ ID NO: 6074 - protein, 235 aa, Zea mays
  unsure (1)..(235): unsure at all Xaa locations
  Clone ID: PAT_MRT4577_70099C.1.pep
MAAKIFCLLMLLGISASAATATIFPQCSQAPIASLLPPYLSPAVSSVCENPIVQPYRIQQAIAAGILPLSPLFLQQSSALLQQLPLVHLLAQNIRAQQLQQLVLANLAAYSQQQQFLPFNQLAALNSASYLQQQQLPFSQLPVAYPQQFLPFNQLAALNSPAYLQQQQLLPFSQLAGVSPATFLTQPQLLAVYQHAAPNAGTLLQLXQLVAFTQLVLTNLAGXYQQPIFGGCPSL

SEQ ID NO: 6075 - protein, 200 aa, Zea mays
  unsure (1)..(200): unsure at all Xaa locations
  Clone ID: PAT_MRT4577_70100C.1.pep
RGSHANIAACLSPYLXQRAYSECESPILQXPYRIQQAASGGIIPLSPLFLQQSSALLQQLPLVHLLAQNIRAQQLQQLVLANLAAYSQQQQFLPFNQLAASNSASYLQQQQLPFSQLSAAYPQQFLPFNQLTALNSPAYLQQQQLLPFSQLAGVSPATFLTQPQLLPFYQHAAPNAGTLLQLQQLLPFNQLALTNPTAFY

SEQ ID NO: 6076 - protein, 220 aa, Zea mays
  unsure (1)..(220): unsure at all Xaa locations
  Clone ID: PAT_MRT4577_70102C.1.pep
AXKIFRILVLLALLACAATVAIVPQCSQGSIATLLXPYLSPTVSSVCENPIFQTYRNQQANAGDILPLSPLMLQQSSALXQQLPLVHLLTQNIRAQQLQQLVLANLAAYSQQQQFLPFNQLAALNSASYLQQQQLPFSQLSAAYPQQFLPFNQLTALNSPAYLQQQQLLPFSQLAGVSPATFLTQPQLLPFYQHAAPNAGTLLQLQQLLAFNQLALTNPA

SEQ ID NO: 6077 - protein, 220 aa, Zea mays
  unsure (1)..(220): unsure at all Xaa locations
  Clone ID: PAT_MRT4577_70103C.1.pep
MGAKTFCLLMLLGLSASTATASILPQCXQAPIATLFSPYLSPTVPSVCENPILQPYRIQQAIAAAILPLTPLFLQQXSALLQXLPLVHLLAQNIRPQQLQQLVLANLAAYSQQQQFLPFNQLAALNSATYLQQQQLPFSQLSAVYPQQFLPFNQLTALNSTAYLQXQQLLPFNQLAGVSPATFLTQPQVLXYYQHAVPNAGTLLQLTQLVPFNQFDLTNP

SEQ ID NO: 6078 - protein, 201 aa, Zea mays
  unsure (1)..(201): unsure at all Xaa locations
  Clone ID: PAT_MRT4577_70107C.1.pep
FCLLMLLGLSARAAAATMLPKCSQAPIASLLPPPYXPAGPSVXENPILQPYRIQQAIAVGTLPLSPLFLQQSSTLLQQTPXVHLLAQNIRAQQLQQLALANLAGYSPQQQCLPFNQLAALNSAYYWQQQQLPFSQLPVDYPHQLLPFNQLAALNSPAYXQEQQLLPFNQLAGVSPATFLTQPQLLPFYQHAAPNAGTLLQL

SEQ ID NO: 6079 - protein, 122 aa, Zea mays
  unsure (1)..(122): unsure at all Xaa locations
  Clone ID: PAT_MRT4577_70109C.1.pep
NPIVQPYMIQHAIATCILPLSPLFLQQPSSLLHHLPLVHLLAHNIIAQHLQQLVLANLAAYSQQHQFLPFNQPGFIXNSAAYLQQQLPFIQLVASYPHXILSFNQLTTLNSAAYLQQQQLLP

SEQ ID NO: 6080 - protein, 141 aa, Zea mays
  Clone ID: PAT_MRT4577_70114C.1.pep
VLAPQVRQLVLTVLGHYFQRQQSLPFTLLDALNSAYYALQQVLPFSQLRFAYQQQYLPFNHLSALNSPAYLQQQHLLPFSQLAGVSPATFLMQPQLLPFYQHAAPNAGTLLHLQQLLPFNQLALTSPAAFYQQPIIGGALF

SEQ ID NO: 6081 - protein, 160 aa, Zea mays
  unsure (1)..(160): unsure at all Xaa locations
  Clone ID: PAT_MRT4577_70133C.1.pep
SSALLHQXRLVHLLAHNISAHQXLQQLVLANLAAYFQHQQFLPFNQRAALNYACYLHQRXMLPFSQLPDAYPQQFLPFNQLAALNSHAYLQQHQLLPVSQIAGVSLVTFWIQPQLLPFYQHDAPTAGTLLHLQQLLPFNQLALTNPAAFYQQPIIGGALF

SEQ ID NO: 6082 - protein, 141 aa, Zea mays
  unsure (1)..(141): unsure at all Xaa locations
  Clone ID: PAT_MRT4577_70137C.1.pep
FLPFNQLGSLMSACYLHQQXLPFSQLPAAYQQQFLPFNQLAALNSPAYLQQQQLLPFSQLAGVSPATFLTQPQLLPFYQHVAPNVGTLFHLQQLMPFRQLALSNSSVFYQQAFIGGALLLYLLVSYSSSNKVFFFMFVASH

SEQ ID NO: 6083 - protein, 225 aa, Zea mays
  unsure (1)..(225): unsure at all Xaa locations
  Clone ID: PAT_MRT4577_70138C.1.pep
MAAKIFCFLMLLGLSASAATATIFPQCSQAPIASLLPPYLSSAVSSVCENPILQPYRIQQAIAAGILPLSPLLLQQPSFLLQQPPLQHLVPHNMTPQQLQQLVLDHLADYYQQQQLPSYQQPAVNNAADXQQQQLPFSQLSAAYPQQFLPFNQLTALNSAAYLQQQQLLPFSQLAGVSPATFLTQPQLLPFYQHAAPNAGTLLQLQQLLAFNQLALTNPAAFYQQ

SEQ ID NO: 6084 - protein, 143 aa, Zea mays
  unsure (1)..(143): unsure at all Xaa locations
  Clone ID: PAT_MRT4577_70140C.1.pep
MAAKISCLLMLLGLPARAATATIIPHCSQADIACLLPTYLSPTVSSVCENTMLQPYRIQHAITAGILPLSPLFLQQXSALLQQVPLVHLLTQNIRAQQLLQLXVLTYLAAYSQQQQLLPFNQLAALNSASYLQQQQLPFIQLS

SEQ ID NO: 6085 - protein, 175 aa, Zea mays
  unsure (1)..(175): unsure at all Xaa locations
  Clone ID: PAT_MRT4577_70141C.1.pep
QAIAAGILHLSPMFVQQSSAILQQLRLVHLLAHIIRAQQVQQLVIANLAAYSQQHQFLPFNQLVALNSASYLQHHQLPFIQLVAAYPQQFLPFNQLAALNSPAYLQQQHLLPFSQVAGVSPAAFLTQPQLFPLYQHAAPNAGTLLQMQQLLPFSXLLCTNPAVLYQQPIIGGALF

SEQ ID NO: 6086 - protein, 163 aa, Zea mays
  unsure (1)..(163): unsure at all Xaa locations
  Clone ID: PAT_MRT4577_70142C.1.pep
QHRRHNRVPTRAAKIFGFLRLLGLFERAATGTIFPKGXQAPIASFFPPYLXRGVLXVWENPIFKPYRIQQAIAAGILPLSPLFLQQPSSLLQKLPLGHLWAQNIRAQQLQQLGLANLAAYFXKQQFFPFNQLAALTSAAYLQQQLPFSQLVVAYPQQLLPFNQ

SEQ ID NO: 6087 - protein, 129 aa, Zea mays
  unsure (1)..(129): unsure at all Xaa locations
  Clone ID: PAT_MRT4577_70145C.1.pep
SPVQVLTLVFKIFCLLMRGGLSASAATATIIPQCSQAPIASLLPPYLSPVVSSVCXENPILQSHKIQQXAIAAGILPLSPXFLQQSXVLLQQIPLVHLLAHNIMAQHLQHLVLANLAAYSQKHKYLPFN

SEQ ID NO: 6088 - protein, 170 aa, Zea mays
  unsure (1)..(170): unsure at all Xaa locations
  Clone ID: PAT_MRT4577_70162C.1.pep
MAAKILCLLMLLGLSAXAVTATIFPQCSQAPIAXFFSAYLSPAVSWVCENPILQPYRIQQAXTAGIXPLSPLXLHQSXALLHQLPLVHLLXQNIRAQQLQQLVLANLAXYFQQQXFXLXNQLAXXNSASYLQQQQLPLSQXPAAYPQXFLPLYQLXAXNSSAYXQHQQLL

SEQ ID NO: 6089 - protein, 111 aa, Zea mays
  unsure (1)..(111): unsure at all Xaa locations
  Clone ID: PAT_MRT4577_70166C.1.pep
MNYACYFIKQQVPFSQLSAAYRQQFLPFNQLSALNYLGYLQQHQVLPFSQLAGVSRVTFLTQPQLLPFYQHGAPSDGSLFQLQQLVPFTQLVLXTNPAAFYQQPIMGGALI

SEQ ID NO: 6090 - protein, 111 aa, Zea mays
  unsure (1)..(111): unsure at all Xaa locations
  Clone ID: PAT_MRT4577_70175C.1.pep
MAAKIFRFLMLLGLSASDATATIFPQCSQAPIAFLFPPYLSPAVXSVCENPIVQPYRIQQAIATGILPLSPLFLQQPSALIQELPWVHWGAQNLRDQHLQQLGLANLAVTL

SEQ ID NO: 6091 - protein, 122 aa, Zea mays
  unsure (1)..(122): unsure at all Xaa locations
  Clone ID: PAT_MRT4577_70190C.1.pep
MMRHHTMAAKIXCLLMLLGIXASAATATIFPQCSQAPIASLLPPYLSPAASSVCEXNPILQPYRIQQAIATGMLPLSPLLLQQSXTLLQHLPWVHXLAQNIRAQQLQQLVLSNRAAYCQHQK

SEQ ID NO: 6092 - protein, 230 aa, Zea mays
  Clone ID: PAT_MRT4577_70195C.1.pep
KIFCFLMLLGLSASAATATIFPQCSQAPITSLLPPYLSPAVSSVCENPILQPYRIQQAIAAGILPLSPLFLQQPSALLQQLPLVHLLAQNIRAQQLQQLVLGNLAAYSQQHQFLPFNQLAALNSAAYLQQQLPFSQLAAAYPQQFLPFNQLAALNSAAYLQQQQLPPFSQLADVSPAAFLTQQQLLPFYLHAAPNAGTVLQLQQLLPFDQLALTNPTAFYQQPIIGGALF

SEQ ID NO: 6093 - protein, 111 aa, Zea mays
  Clone ID: PAT_MRT4577_70196C.1.pep
MAAKIFCLLMLLGLSASAATATIFPQCSQAPIASLLSPYLSPTGSSVWENPILQPFRIQPAIAACILPLLPLVLQQSLGLLQQVPLGHLLAQNIKGQQLPQPGLANPGCLL

SEQ ID NO: 6094 - protein, 184 aa, Zea mays
  unsure (1)..(184): unsure at all Xaa locations
  Clone ID: PAT_MRT4577_70202C.1.pep
MFQQWLSQIFSLLMLPALSGSAATXTIFPQCSQAPIAYLLPPYLSPTVCSICQNQLLQPYMIQQGITADILPFHTVFLQQLLDILQQLPSVHLLTQNIRSQQLQQLVLANLAAYSQQQQFLTFNQLGSLNSASYVQQQQLPFSQLPAAYPHQCLPFNQLATLNSPAYLQQQQLLPFIQLACVSP

SEQ ID NO: 6095 - protein, 258 aa, Zea mays
  unsure (1)..(258): unsure at all Xaa locations
  Clone ID: PAT_MRT4577_70203C.1.pep
TIIRTSSSIQSSIVGQQWPAKYACLLMLLGXLSASAGTGTTFPXQCSQAPIASLMPPYLSPEEHRVCENPMLQXPYRIQQAXVAAGILPLXPSFLHQSSALLQQLPLVHLLAQNIRARQLQXQLVLADLAAYCQEQQILPLNQLAALNSASYLQQQQLPFSQLPAAYPQQXFLPFNQLAALNSAAYLQQQQLLPFSQLAGVSPATFLIQPQVLPVYQHAAPNAGTLLQLQQLLPFNQLALTNPAAFYQQPIIGXGALF

SEQ ID NO: 6096 - protein, 104 aa, Zea mays
  unsure (1)..(104): unsure at all Xaa locations
  Clone ID: PAT_MRT4577_70204C.1.pep
MAAKIFCLLMLLGLSARAGTATIFPKCSQASIAFLLSPYLSPAGSSVCENPILXPYRIQQAITGGILPLSPLVLQQSSGLLHQVPLVHLLAQNIKAQQLQQLVL

SEQ ID NO: 6097 - protein, 93 aa, Zea mays
  unsure (1)..(93): unsure at all Xaa locations
  Clone ID: PAT_MRT4577_70229C.1.pep
MAAEGEKLMITLKSSDGEEFDMEDAVAMESQTIRHMIDDYCVDNGIXPLPNVNSMIVSTVLEYCNKHVHGAAAAADVSTAGSDDVGDESGNST

SEQ ID NO: 6098 - protein, 143 aa, Zea mays
  unsure (1)..(143): unsure at all Xaa locations
  Clone ID: PAT_MRT4577_70230C.1.pep
TNHVADSQQQQFLPFKQLVALNTTCNLQQQQVPFSQLLAAYPQQFLPFNQLAALNSPAYFQQQQLVPFSQLAGVSPATFLMQXQLFPFYQHAAPSAGTLLQGQQWLPFNQRALTNPAAFXYQQPIIGGASLSLYEDSQKNLLV

SEQ ID NO: 6099 - protein, 162 aa, Zea mays
  unsure (1)..(162): unsure at all Xaa locations
  Clone ID: PAT_MRT4577_70234C.1.pep
RPPGAGNALQRTTDQVLWAQNIKEQXLQELXLANLAAYSQQHQFLPFNQLAALNSASYLQQQQLPFNQLAAAYPQQFLPFNQLAALNSPAYXQQQQLLPFSQLAGVSPAAFLTQPQXMPFYQLAEPNAGTLLQLQQLLPYNQLAXDKPSXIYQQPIIGGAPL

SEQ ID NO: 6100 - protein, 232 aa, Zea mays
  unsure (1)..(232): unsure at all Xaa locations
  Clone ID: PAT_MRT4577_70239C.1.pep
AHQQWQRKILGLLMLLGLSXSAVTATXLFPHCSQAXPIASLLPPYXLTPAGCSGCENPILQPYRIQQAIAAGILPLSPLFLQQXSALLQQLPLEHLLVQNIRAQQQQLVLANLAAYSQQQQFLPFNQLGSLNSASYLQQQQLPFSQLPAAYPQQYXPFNQLAALNSPAYLQQQQLLPFSQLAGVSPATFLTQPQMLPFYQHVAPNAGTLLQLQQLLAFNQLALTNPAVLYQQ

SEQ ID NO: 6101 - protein, 111 aa, Zea mays
  Clone ID: PAT_MRT4577_70242C.1.pep
MAAKGVCLIMLLGLSASAATASIFPQCSQAPIASLLPPYLSPAMSSVCENPILLPYMIQQAIAAGILPLSPLFLQQSSSLLQQVPLRHLFGQIIMAQHLQQLALSNLASYS

SEQ ID NO: 6102 - protein, 143 aa, Zea mays
  unsure (1)..(143): unsure at all Xaa locations
  Clone ID: PAT_MRT4577_70245C.1.pep
HIKHNHIPSISTKIFCFLVSLXLYASAATATIFPQCSQAPIASFLPPYLSPAVSSLCENPILQPYKIQHAIAACILPLSPLFLQQPSALLQHLPFVHFLAQNINAQQLQQLFLXNLATYSHQQHFLPFNQLASFNSTAYFQQQ

SEQ ID NO: 6103 - protein, 135 aa, Zea mays
  unsure (1)..(135): unsure at all Xaa locations
  Clone ID: PAT_MRT4577_70261C.1.pep
MAAKIFCLLMLLGITASAATATILPQCSQAAIDSLFPPYLSPAESSVCENPILQPYRIQQAIAAGILPLSPLFLQQSSALLQELPMVHLLAQNIRAQQLHQLALXNLAVYSQEQQFFPFNQLAALNFASXQHQQL

SEQ ID NO: 6104 - protein, 194 aa, Zea mays
  unsure (1)..(194): unsure at all Xaa locations
  Clone ID: PAT_MRT4577_70267C.1.pep
ISPTVSSVCXNTILHPNRIQQAIAVGMLPLXALVACNNNXLLQKIPLEHLLAQNIRAQRLQQLVLANLAAYSQQQQFLPFNQLAALNSASYLQQQQLPFRQLSAAYPQQFLPFNQLTALNSPAYLQQQQLLPFSQLAXGVSPATXFLTQPQLLPFYQHAAPNAGTLLQLQQLLPFNQLALTNPAAFYQQPIIEW

SEQ ID NO: 6105 - protein, 117 aa, Zea mays
  Clone ID: PAT_MRT4577_70268C.1.pep
VAAVNYHYSSQQPLVPFRQIPAANPQQFLPFNQLAALNSPAYLQQQQLLPFSQLAGVSPATFLIQPQLLPFYQHDAPNAGTLLQLQLLLPFNLLDLPNSAAFYHQPIIGGALLLDFL

SEQ ID NO: 6106 - protein, 106 aa, Zea mays
  unsure (1)..(106): unsure at all Xaa locations
  Clone ID: PAT_MRT4577_70270C.1.pep
QLPFSQLVAAYLQQFVPSNLLAALSSAVYXQQQQLLPFSQLADVRRDAFFTQQQLLLFYVHAMPNAGTLLHLQQLLPFNLLALTNPTVFYHQPIIGGALFYIAYEL

SEQ ID NO: 6107 - protein, 169 aa, Zea mays
  unsure (1)..(169): unsure at all Xaa locations
  Clone ID: PAT_MRT4577_70275C.1.pep
TSPFFSSECENPGGYFYKIQHAFTADMLPLSPLVLQQSSPLLHPSPLVHLLAQNIMAQQLPQLVLANLAVYSQQQQFLPFNQLAALNSASYLQQQQLPFSQLPAAYPQQFLSFKQLAALNSPAYLQQQQLLPFKQLAGVSPATFLIQPQFVPFXQHAAPNACPLLQLEQ

SEQ ID NO: 6108 - protein, 121 aa, Zea mays
  unsure (1)..(121): unsure at all Xaa locations
  Clone ID: PAT_MRT4577_70277C.1.pep
FLPFKQLVALYSACYLQQQQLPFSQLLVAYPQQFLPFMQLAALTSPAYFQQQQLLPFSQLAGVSPATFLTQPQLLPFYQHAAPNAGTLLQVQQFLPFNQLALTNLAVSTXQPIIGGASFRF

SEQ ID NO: 6109 - protein, 299 aa, Zea mays
  Clone ID: PAT_MRT4577_7027C.1.pep
MAGAQESLSLVGTMRGHNGEVTAIATPIDNSPFIVSSSRDKSLLVWDLTNPVHSTPESGATADYGVPFRRLTGHSHFVQDVVLSSDGQFALSGSWDGELRLWDLSTGLTTRRFVGHEKDVLSVAFSVDNRQIVSASRDKTIKLWNTLGECKYTIGGDLGGGEGHNGWVSCVRFSPNTFQPTIVSGSWDRTVKVWNLTNCKLRCTLDGHGGYVNAVAVSPDGSLCASGGKDGVTLLWDLAEGKRLYSLDAGSIIHSLCFSPNQILYCTSLSWSADGSTLYTGYTDGSIRVWKISGYGYAG

SEQ ID NO: 6110 - protein, 235 aa, Zea mays
  unsure (1)..(235): unsure at all Xaa locations
  Clone ID: PAT_MRT4577_7028C.1.pep
MANMQESLGLVGTMRGHNDVVTAIAAPIDNSPYIVSGSRDKSLLVWDLTNPVQSLGDGTVGTDYAVPFRRLTGHGHFVQDVVISSDGQFALSGSWDGELRLWDLSTGLTTRRFVGHSKDVISVAFSVDNRQIVSASRDNTIKLWNTLGECKYTIGGDMGGGEGHTGWVSCVRFSPNIQQPTIVSGSWDKTVKVWNLTNCKLRSTLXRHGGYVNAVAVSPDGSLCASGXGKDGVTL

SEQ ID NO: 6111 - protein, 128 aa, Zea mays
  unsure (1)..(128): unsure at all Xaa locations
  Clone ID: PAT_MRT4577_70292C.1.pep
MHFNVPTMAAKRSGLLMLLGLSASAATATIFPQCSQATIASILTPYLXPAVYSVCENPILQPYRIQLAITDGILPLSPLFLQQSSALLHQLPQVHLLAQNIMAHQLQQLVLTYLAAYSQQHHYVAFNQ

SEQ ID NO: 6112 - protein, 135 aa, Zea mays
  unsure (1)..(135): unsure at all Xaa locations
  Clone ID: PAT_MRT4577_70294C.1.pep
LFALYLTSIVQQHHSFSQLAAAYRQQFLPFNQLAALNYAAYLQQQQLPPFSQLADVSPIAFLXTQHQLLPFYLPAAPSAGTLLQLQQLLPFNQRALTNPAAFYQQPIIGGASFRLHMSDSSIMNFLYDECGFPEI

SEQ ID NO: 6113 - protein, 124 aa, Zea mays
  unsure (1)..(124): unsure at all Xaa locations
  Clone ID: PAT_MRT4577_70296C.1.pep
MAAKIFXLIAPCLSASAAREHLPQCSQAAIASLLPPXYLSQRVFSMXENPILLPYRIQQAIAAGILPLSPLFLQQSSALLQQLPMVHXLAQNIRAQQLQQLVLVHLAAYSQHQLLPMVHLEAXN

SEQ ID NO: 6114 - protein, 156 aa, Zea mays
  unsure (1)..(156): unsure at all Xaa locations
  Clone ID: PAT_MRT4577_70299C.1.pep
YSSYPLVHLLAQXXIRAQQXLQQLVLASLAAYYQQQQFLPFXRLAALNCAAYLHXELPFSQLAAAYLQQLLPFIQLAALICAAYLQQHQLPPFSQLADVSPAAFLTQQQLLSFYSHAAPNAGTLLHLQQLLPFXQLCFVQYSAAFYHQPIIGGVLF

SEQ ID NO: 6115 - protein, 129 aa, Zea mays
  unsure (1)..(129): unsure at all Xaa locations
  Clone ID: PAT_MRT4577_70303C.1.pep
MAAKIFCLLMLLGLSASAATATIFPQCSQAPIASLLAPYLSPTVSSVCENPGVEPYRIQQAIAAGILPLSPLFLQQXSGLLQQXPLLHLLAQNIWAHQLHQLVXLQPAADYFYQQXFFSFNQLTALNPV

SEQ ID NO: 6116 - protein, 173 aa, Zea mays
  unsure (1)..(173): unsure at all Xaa locations
  Clone ID: PAT_MRT4577_70306C.1.pep
MADKKFCLLMLLGXLSACAATATIFPQCSQAAIASLLPPYLSPALSSVCENPILQPYRIQQAIAAGILPLSPLFLQQSSALLQQLPLAHLYGTTTCRAQQLQQLVLSILAAYSQQQQFLPFMQLGSSNSASYLQRQQLPFSQLPAAYPQQCLPFNQLAVWNYCAYFLHQQLLP

SEQ ID NO: 6117 - protein, 171 aa, Zea mays
  unsure (1)..(171): unsure at all Xaa locations
  Clone ID: PAT_MRT4577_70307C.1.pep
RRPGGRASPLILQQPTALXTVTPLGHLXEQNIKGQQLQQLVLRNLAVYSQQQQCVGCNQLAASNSAAYLQQQLPFSQLAAAYPQQFLPFNQLAEMNSAAYLQQQQVPPFRQLADVSPIALLTQQQLLSDYLHAAPNASTLLQLQQLLPFNQLVLTNPTAFYQQRIIGGALF

SEQ ID NO: 6118 - protein, 129 aa, Zea mays
  unsure (1)..(129): unsure at all Xaa locations
  Clone ID: PAT_MRT4577_70308C.1.pep
MAAKILCVLMLLGLSACVATATHFPXQCSQAHIASLLPPYLSPAPSSMSQTPIVQPYKIQQAIATRILPLSPLFLQQLAPLLQQLPLVHLMAQNIRAQQLQQLVLANLVAYSHEHQCLPFNQMAALNSA

SEQ ID NO: 6119 - protein, 334 aa, Zea mays
  Clone ID: PAT_MRT4577_7030C.1.pep
MGGAQESLSLGGTMRGHNGEGTAIATPIDNSPLIVSSSRDKSLLGGDLTNPGHSTPESGATADYGVPFRRLTGHSHFAQDVVLSSDGQFALSGSWDGELRLWDLSTGLTTRRFVGHEKDVLSVAFSVDNRQIVSASRDKTIKLWNTLGECKYTIGGDLGGGEGHNGWVSCVRFSPNTFQPTIVSGSWDRTVKVWNLTNCKLRCTLDGHGGYVNAVAVSPDGSLCASGGKDGVTLLWDLAEGKRLYSLDAGSIIHSLCFSPNRYWLCAATQDSVKIWDLESKHVVQDLKPDIQISKNQILYCTSLSWSADGSTLYTGYTDGSIRVWKISGYGYAG

SEQ ID NO: 6120 - protein, 167 aa, Zea mays
  unsure (1)..(167): unsure at all Xaa locations
  Clone ID: PAT_MRT4577_70311C.1.pep
QLVLVNQATXSHLNQFLPFNXLFALYFTAYFQQHLPFSQLATAYPQQFLPFNQLAALNSAAYLQQQQLPPFSQLADVSPIAFXTQQQLLPFYLPAAPNAGTLLQLQQLPPPNQLALTNPTAFYQQPIIGGASFRLLMSYSSIMKFLDDVCGLPRNKLSPPSPRLSRA

SEQ ID NO: 6121 - protein, 365 aa, Zea mays
  Clone ID: PAT_MRT4577_7031C.1.pep
MAIKKKKKNRIILSLAPPPTQPLQPQSLTATMAGAQESLSLVGTMRGHNGEVTAIATPIDNSPFIVSSSRDKSLLVWDLTNPVHSTPESGATADYGVPFRRLTGHSHFVQDVVLSSDGQFALSGSWDGELRLWDLSTGLTTRRFVGHEKDVLSVAFSVDNRQIVSASRDKTIKLWNTLGECKYTIGGDLGGGEGHNGWVSCVRFSPNTFQPTIVSGSWDRTVKVWNLTNCKLRCTLDGHGGYVNAVAVSPDGSLCASGGKDGVTLLWDLAEGKRLYSLDAGSIIHSLCFSPNRYWLCAATQDSVKIWDLESKHVVQDLKPDIQISKNQILYCTSLSWSADGSTLYTGYTDGSIRVWKISGYGYAG

SEQ ID NO: 6122 - protein, 218 aa, Zea mays
  unsure (1)..(218): unsure at all Xaa locations
  Clone ID: PAT_MRT4577_70330C.1.pep
SAATAXISXQCSQTRIASFLPXPYLSPAVSSVCENSILQPYRIQQAIAAGILPLSPLFLQQXSAILQQXRLVHLLAQNIKALQLQQLVLGNLAAYSQQQQFLPFNQLAALKCAAYLQQQLPFSQLAAAYPQQFLPFNQLAALNSAAYLQQQQLPPFSQLADVSPTAFLTQQQLLPFYLHAAPNARRIKQLQQLMPFNQLALTNPTAFYQQPIIGGALF

SEQ ID NO: 6123 - protein, 187 aa, Zea mays
  unsure (1)..(187): unsure at all Xaa locations
  Clone ID: PAT_MRT4577_70334C.1.pep
ENTNIFNTYTIQQAIADGVLPLSCLCLQHSSALLQQXPLEHLLGQNMKTQQLQQLVLANLAAYSQQQQILPFNQLGSLNSASYLQQQQLPFNQLPAAYPQQLLPFNQLAALNSTAYLQQQQLLPFIQLAGVRPDKLLTQTQVMTFYQHNAPNAGTLLQLRQLLTFNQLGLTNPEWFYQQPIIGGALF

SEQ ID NO: 6124 - protein, 173 aa, Zea mays
  unsure (1)..(173): unsure at all Xaa locations
  Clone ID: PAT_MRT4577_70337C.1.pep
AGDFDLLMLVGLFCSAGTATXLFPQCSQAPIASLLPPYLSPAASSVCXENPILQPYRIQQAIAADILPLSPLXLQQSSXALLQQLPLVHXLAQNIRAQQLQQLVLANLAAYSQQQQVLPFDQLGSLNSGAYLEQQQLRCRQLPAGYPQQFLSLNQLAGLHSAGCLQEEQLLPC

SEQ ID NO: 6125 - protein, 334 aa, Zea mays
  Clone ID: PAT_MRT4577_7033C.1.pep
MAGAQESLSLVGTMRGHNGEVTAIATPIDNSPFIVSSSRDKSVLVWDLTNPVHSTPESGVTADYGVPFRRLTGHSHFVQDVVLSSDGQFALSGSWDGELRLWDLSTGLTTRRFVGHEKDVISVAFSVDNRQIVSASRDKTIKLWNTLGECKYTIGGDLGGGEGHNGWVSCVRFSPNTFQPTIVSGSWDRTVKVWNLTNCKLRCTLDGHGGYVNAVAVSPDGSLCASGGKDGVTLLWDLAEGKRLYSLDAGSIIHSLCFSPNRYWLCAATQDSVKIWDLESKHVVQDLKPDIQVSKNQILYCTSLSWSADGSTLYTGYTDGSIRVWKISGYGYAG

SEQ ID NO: 6126 - protein, 228 aa, Zea mays
  unsure (1)..(228): unsure at all Xaa locations
  Clone ID: PAT_MRT4577_70342C.1.pep
MAAKIFCFLMLLGLSASVATATIFPQCSQAPIASLLPPYLSPAVSSMCENPIVQPYRIQQAIATGILPLSPLFLQQPSALLQQLPLVHLVAQNIRAQQLQQLVLANLAAYSQQHQFLPFNQLAALNSAAYLQQQLPFSQLVAAYPQQFLPFNQLAALNSAAYLQXQQLLPFSQLADVSPAAFLTXQQLLPLYLHAMPNAGTLLQLQQXLLPYHXQLAFTNXTVFLPNN

SEQ ID NO: 6127 - protein, 225 aa, Zea mays
  Clone ID: PAT_MRT4577_70343C.1.pep
MKERLVGVSEETTTGVKRLYQMQESGTLLFPAINVNDSVTKSKFDNLYGCRHSLPDGLMRATDVMIAGKVAVVCGYGDVGKGCAAALKQAGARVIVTEIDPICALQALMEGIQILTLEDVVSDADIFVTTTGNKDIIMVDHMRKMKNNAIVCNIGHFDNEIDMNGLETYPGVKRITIKPQTDRWVFPETNTGIIVLAEGRLMNLGCATGHPSFVMSCSFTNQVIA

SEQ ID NO: 6128 - protein, 136 aa, Zea mays
  unsure (1)..(136): unsure at all Xaa locations
  Clone ID: PAT_MRT4577_70345C.1.pep
SLPSVHPLASYIKPHHLPLLELPNXLDAYSQEQQVLPFIQLSALNSACYLQQQQLPFSQLPAAYPHQLLPFNQLAALNSPAYLQQHQLLPFSQLAGVSPATFLIQPQVLAIYQDAAPNAGTLLPLXQLVAFNQLGL

SEQ ID NO: 6129 - protein, 209 aa, Zea mays
  unsure (1)..(209): unsure at all Xaa locations
  Clone ID: PAT_MRT4577_7035C.1.pep
MAVLNLLALIIATLLLLFRRTSGAGISPADTLNSGGNVTDGETLVSAGGTFTLGFFSPSTTVLTKRYLGIWFTASGTDAVLWVANRETPLNNTSGVLVMSSRVGLRLLDGSGRTAWSSNTTGAPTSSVAQLLGSGNXXVVREKSSNAVFQWXSFDHPQNTLLAGMRFGKNLKTGXXWSXTSWRAQDDPATGDYXRVMDTKGLPDIVTWH

SEQ ID NO: 6130 - protein, 213 aa, Zea mays
  unsure (1)..(213): unsure at all Xaa locations
  Clone ID: PAT_MRT4577_70364C.1.pep
MAAKIFCFLMLLGLSASVATATIFPQCSQAPIASLLPPYLSPAVSSMCENPIVQPYRIQQAIATGILPLSPLFLQQPSALLQQLPLVHLVAQNIREQQLQQLVLANLAAYSQKHQILPFNQLDELNSAAYLQQQLPFSQVDDDYPQQFLPFNQLAELNSAAYLQQQQLLPFKQLHDVRPDDFLTKQXQMMTIYLNNMHNDGTLLQMKKLMKLN

SEQ ID NO: 6131 - protein, 235 aa, Zea mays
  Clone ID: PAT_MRT4577_70368C.1.pep
MAAKIFCLIMLLGLSASAATASIFPQCSQAPIASLLPPYLSPAMSSVCENPILLPYRIQQAIAAGILPLSPLFLQQSSALLQQLPLVHLLAQNIRAQQLQQLVLANLAAYSQQQQFLPFNQLAALNSAAYLQQQQLLPFSQLAAAYPRQFLPFNQLAALNSHAYVQQQQLLPFSQLAAVSPAAFLTQQQLLPFYLHTAPNVGTLLQLQQLLPFDQLALTNPAAFYQQPIIGGALF

SEQ ID NO: 6132 - protein, 254 aa, Zea mays
  unsure (1)..(254): unsure at all Xaa locations
  Clone ID: PAT_MRT4577_70372C.1.pep
PHISCDLLPHRKHNSRPTLAAKIYRFLMLLGLYAGDATAIIRPQXCSQAPIASLLPPYLSRSGVXMCENPIVQPYRIQQAIATGSLTMISPXVLQHPPALLQQXPLDHLVAQNIRAQQLQQLVLANLAAYSQQHEVLPFNQLAALNSAAYLQQQLPFSQLGAAYPQQFLPFNQLAALNSAAYLQQQQLLPFSQLADESPAAFLTQQQLLPFYLHAMPNAGTLLQLQQLLPFNQLALTDSSVVYQQPIIGGRPLL

SEQ ID NO: 6133 - protein, 152 aa, Zea mays
  unsure (1)..(152): unsure at all Xaa locations
  Clone ID: PAT_MRT4577_70374C.1.pep
QLPLGHGXAQNSRAHQLHQLGRANLLANSQQQQFLPFNQEAALDSAYNWQRQQLPFSQLSAAYPQQFLPFNQLTALNSPAYXQQQQLLPFSQLAGVSPATFLTQPQLLPFYQHAAPNAGTLLQLQQLLPFNQPALTNPAAFHQQPIIGGALF

SEQ ID NO: 6134 - protein, 144 aa, Zea mays
  unsure (1)..(144): unsure at all Xaa locations
  Clone ID: PAT_MRT4577_70375C.1.pep
TIRPLSPFLFQHSSALMQELPMADLLPQNIMTHQLQHPMLANLVAYSQQHQFLSFNQLAALNSASYLQQQQLPFSQIPAVYPQQFLPFNQLSALNSPAYLQQQQLLPFSQLAGVSPATFLIQPQFLSFYQHAXPNAGTLLQLQQ

SEQ ID NO: 6135 - protein, 163 aa, Zea mays
  unsure (1)..(163): unsure at all Xaa locations
  Clone ID: PAT_MRT4577_70376C.1.pep
MAAKIFCLLMLLGISASAATATIFPQCSQAPIASLLPPHLSPAVSSVCENPILQPYXIQQAIAGGILPLSPLFLQQSXALLQQLPLVHLLAQNMRAQQLQQLVLANLAAYSKQQRVLPFNQLSELNSACYLEQQQLPFSQLPVAYPQELVALNQLGRWNSAAY

SEQ ID NO: 6136 - protein, 149 aa, Zea mays
  unsure (1)..(149): unsure at all Xaa locations
  Clone ID: PAT_MRT4577_70378C.1.pep
MAAKILCLLMXLGLHASAATDTIFPQCXQAPIASLLPPYLSPTVSSVCENPIXLQPYRIQQAIAAGILPISPLFLQQSSALLQQLPLVHLLAQNIRAQQLQQLVLANLAAYSQQQHFLTFNQLACIDSASYLQQQQLPFSQLSACHPQQ

SEQ ID NO: 6137 - protein, 274 aa, Zea mays
  unsure (1)..(274): unsure at all Xaa locations
  Clone ID: PAT_MRT4577_70465C.1.pep
MFFFXGCRKECAFYLVSLPVSYRYEYLMAETIFSQLLLLPNPPFKPIYYTLVIIDLCKALPGAFPSVVVGAVHALFDRISNMDMECRTRLILWFSHHLSNFQFIWPWQEWSYVKDLPKWAPQRVFVQEVLEREVRLSYFEKIKQSIEDAAELEELLPPKAGPNFKFHSDESNESTDGLKLSKELIGLIRGKKSTYDIILWVEEQIIPKNGTEFALDVVSQTLLDMGSKSFTHLVTILERYNKIISKLCPNEEMQLLLMNGVSAYWKDKYQMTAI

SEQ ID NO: 6138 - protein, 783 aa, Zea mays
  unsure (1)..(783): unsure at all Xaa locations
  Clone ID: PAT_MRT4577_70528C.1.pep
MAKSSADDAELRRACAAAVAASGARGEEVAFSIRVAKGRGIFEKLGRLAKPRVLALTVKQSSRGEANKAFLRVLKYSSGAVLEPAKLYKLKHLTKVEVISNDPSGCTFVLGFDNLRSQSVAPPQWTMRNIDDRNRLLFCILNMCKEILSYLPKVVGIDIVELALWAKENTLTIDNQVSTQDGQETSVATQTERKVTVTVAYGIXLLERLRIHKPFVIYRLHLXHCYVIQSVNNKGLMEELDKLLERLRIPQEFAASLTGGSFEESRMLKNVEACEWLTGAIRSLEVPNLDPCYVNMRAVREKNXDREKLKTTFVRRASEFLRNYFSSLVDFMISDKSYFSQRGQLKRPDHADLRYKCRTYARLLQHLKSLDKSCLGPLRKAYCHSLNLLLRREAREFANELRASTKAPKNPAVWLEGSGGSGHNGSSSDTSQVSDAYSKMLTIFIPLLVDESSFFAHFMCFEVPALVPAGSPNANKSKSGGNDPDDDLGLMDPDGNDLKPDSTSAELGTLNEALQELLDGIQEDFYAVVDWAYKIDPLRCISMHGITERYLSGQKADAAGFVRKLLDDLESRISVQFSRFIDEACHQIERNERNVRQTGILAYIPRFAVLASRMEQYIQGQSRDLIDKAYTKLVSTMFATLEKIAQSDPKTADIVLIENYAAFQNSLYDLANVVPTLAKFYHQASESYELACTRHISSLIYLQFERLFQFNRKVDELTYTIAAEEIPFQLGLSKTDLRRVLKSSLSGIDKSISAMYRRLQKTLTSDELFPSLWDKCKKEFLDK

SEQ ID NO: 6139 - protein, 46 aa, Zea mays
  Clone ID: PAT_MRT4577_70616C.1.pep
KFVFPCFYGENVESAPPLFKKDSKLVIFFFWEEEADPMEEKAGVFF

SEQ ID NO: 6140 - protein, 391 aa, Zea mays
  unsure (1)..(391): unsure at all Xaa locations
  Clone ID: PAT_MRT4577_70810C.1.pep
MDPWISSQPSLSLDLRVGLPPLSLHHQAPVAVALPRPKLLVEENFLLPPPKKEPEVRIYTLHSDPMCDASMHPPHLDWTETAGVTTSKDSNGLSPXLIPXAALETELQRMGEENRRLAEALAEVASKYEALRGQYTEMVAAAATACGNHPSSTSEGGSVSPSRKRKSESTDTAPPAQQLLHQHYPAVAPDQTECTSGEPCKRIREAECKPRVSKLHVHADPADLSLVVKDGYQWRKYGQKVTKDNPCPRAYFRCSFAPACPVKKKVQRSADDPTILVATYEGDHNHGQPPPQAQAPHDGSSPGASKKPPSPPRPVAAAPAPLHHQQVQQHQQQQAVGAVKCEPPVAAAASELIRRNLAEQMAMTLTRDPSFKAAFVTALSGRLFEMSPTKD

SEQ ID NO: 6141 - protein, 347 aa, Zea mays
  Clone ID: PAT_MRT4577_70811C.1.pep
MDPWISSQPSLSLDLRVGLPPLSLHHQAPVAVALPRSKLLVEENFLLPPPKKEPEVAALETELQRMGEENRRLAEALAEVASKYEALRGQYTEMVAAAATACGNHPSSTSEGGSVSPSRKRKSESTDTAPPAQQLLHQHYPAVAPDQTECTSGEPCKRIREAECKPRVSKLHVHADPADLSLVVKDGYQWRKYGQKVTKDNPCPRAYFRCSFAPACPVKKKVQRSADDPTILVATYEGDHNHGQPPPQAQAPHDGSSPGASKKPPSPPRPVAAAPAPLHHQQVQQHQQQQAVGAVKCEPPVAAAASELIRRNLAEQMAMTLTRDPSFKAAFVTALSGRLFEMSPTKD

SEQ ID NO: 6142 - protein, 172 aa, Zea mays
  unsure (1)..(172): unsure at all Xaa locations
  Clone ID: PAT_MRT4577_70834C.1.pep
MSDSKEHHFQSKVDAGASKIYPQQAGTVRKNGFIDIXNRPCEVXQVSTSKTGMYDHAKCHFVAIDIFNEXKLEDIVPSXHNCXIPHVNRTEYHLIDISEDGFVSLLTSDGNTKDDLTLPNDDTREAQIKESFESDKDLAVTVQSAMSNEXICTLKDGVPKQLPCLGILHLTI

SEQ ID NO: 6143 - protein, 161 aa, Zea mays
  Clone ID: PAT_MRT4577_70875C.1.pep
MDGRMFGLETPLMVALQHFLDVPDGDAGAGGDKAGGGGPTRTYVRDARAMAATPADVKELPGAYAFVVDMPGLGTGDIKVQVEDERVLVISGERRREEREDAKYLRMERRMGKFMRKFVLPDNADMDKISAVCRDGVLTVTVEKLPPPEPKKPKTIEVKVA

SEQ ID NO: 6144 - protein, 165 aa, Zea mays
  Clone ID: PAT_MRT4577_70877C.1.pep
MDGRMFGLETPLMVALQHLLDVPDGDAGAGGDKASGAAAGGGPTRTYVRDARAMAATPADVKELPGAYAFVVDMPGLGTGDIKVQVEDERVLVISGERRREEREDAKYLRMERRMGKFMRKFVLPDNADMDKISAVCRDGVLTVTVEKLPPPEPKKPKTIEVKVA

SEQ ID NO: 6145 - protein, 297 aa, Zea mays
  unsure (1)..(297): unsure at all Xaa locations
  Clone ID: PAT_MRT4577_70979C.1.pep
MAILSALATEVLIPVAAVIGIAFAVVQWVVVSRVKLSPAASGGSGGKAGYADSLIEEEEGLNDHNVVVKCAEIQNAISEGTGATSFLFTEYQYVGIFMAIFAVVIFLFLGSVEGFSTKSQPCTYSKDKYCKPALFTALFSTVSFLLGAITSLVSGFLGMKIATYANARTTLEARKGVGKAFITAFRSGAVMGFLLASSGLVVLYITINVFKLYYGDDWEGLFESITGYGLGGSSMALFGRXVGGGIYTKAADVGADLVGKVERNIPEDDPRNPAVIADNVGDNVGDIAGMGSDLFGS

SEQ ID NO: 6146 - protein, 71 aa, Zea mays
  Clone ID: PAT_MRT4577_71035C.1.pep
ERPALFFFFKVNQSCINFFGPRTTIIHKHMHTHTYTYDRLRSHAYSCITRAHTYVRAQNTVGAQYHSQTHA

SEQ ID NO: 6147 - protein, 351 aa, Zea mays
  Clone ID: PAT_MRT4577_71053C.1.pep
MMMLIDCSGCRTPLQLPHGAPCIRCAICGAVTHIAPAPPAEPNRGAVQPAPGWAPPPPPVHGRKRAVVCGISYRYSRHELKGCINDAKCMRHLLMTRFNFPDDSIIMLNEEQTDPYKIPTKHNIRMAMYWLVQGCQPGDSLVFHYSGHGSQQRNYSGDEVDGFDETLCPLDFETQGMILDDEINTALVRPLPHGVKLHALIDACHSGTALDLPYLCRMNRSGQYVWEDHRPRSGVWKGTSGGEAISFSGCDDDQTSADTSALSKITSTGAMTFCFIQAIERGQGTTYGSILNSMRSTIRNTGDSAGVGGGAVTSLITMLLTGGSLSAGGLRQEPQLTACEPFDVYAKPFSL

SEQ ID NO: 6148 - protein, 148 aa, Zea mays
  unsure (1)..(148): unsure at all Xaa locations
  Clone ID: PAT_MRT4577_7151C.1.pep
MALSVEKTSAERGYKVKDLSQADFGRLEIELAEVEMPGLMACRAEFGPPNPFAGARISRSLHMTIQTAVLIESLTALGGEGRXDPVYFFSTQDHAXGAIARDSAAMFDWNDHTLXQYWGRTERYLDXNERGEPDLVVXDVGDTTLLEH

SEQ ID NO: 6149 - protein, 228 aa, Zea mays
  Clone ID: PAT_MRT4577_71648C.1.pep
MSTAGKTITCKAAVAWEAGKPLSIEDIEVAPPKANEVRIQIYYTGVCHTDAYTLSGKDPEGAFPIVLGHEGAGIVESIGEGVTNVKVGDHVVALYTPECKECKFCKSGKTNLCGKIRATQGKGLMPDGTSRFKCKGKDLLHFMGTSTFSQYTVVADISVVAIEHDAPMDRTCLLGCGITTGYGAATITANVQAGDNVAIFGAGCVGLSVVQGAAARKAGKIIVVTSPF

SEQ ID NO: 6150 - protein, 79 aa, Zea mays
  Clone ID: PAT_MRT4577_7168C.1.pep
RSGYGGGNGGFRCLSRCSSRGSRLGCSGRSCSTTCMSSFVRCLGRTACMRSFCRCLCRSEGSDDDDVEEDLNYGARHFP

SEQ ID NO: 6151 - protein, 56 aa, Zea mays
  unsure (1)..(56): unsure at all Xaa locations
  Clone ID: PAT_MRT4577_71725C.1.pep
MAIKRTKAAKKIAYDKMLCSLLXDEYTNVLIALPDNVGCTQLQDIRRGLKGDSVVL

SEQ ID NO: 6152 - protein, 349 aa, Zea mays
  Clone ID: PAT_MRT4577_71847C.1.pep
MNFGGNGNATIRCKYCRASLSVIPGERAIQCAQCNCVTRIRRADRIPLARPAHVPPAFQRARGKKRAVLVGITYAGARRGCGDLRGPVNDVKCMRNLLCQRFGFPGECIIMLTDDQRDPFRLPTKENIRMAMHWLVQGCSYGDSLVFHFSGIGAQVADDDGDEADGYDEAICPLDAFQSGPILDDEINEVIVRPLVHGARLHAVVDACYSATVLDLPYQCRMSRNGFWQWEDESPPSGAWKGTSGGHAVLISGYSEGKGNFAMMPDAHASVVGAMTHSFVRTLECQPRGVTYGHLLSSMRAIMKNRGGGCDLQGAIGAPIRTVANFSGVQEPNLSSSETFDIYRKQFVL

SEQ ID NO: 6153 - protein, 381 aa, Zea mays
  unsure (1)..(381): unsure at all Xaa locations
  Clone ID: PAT_MRT4577_71852C.1.pep
MNFGGNGNATIRCKYCRASLSVIPGERAIQCAQCNCVTRIRRADRIPLARPAHVPPAFQRARGKKRAVLVGITYAGARRGCGDLRGPVNDVKCMRNLLCQRFGFPGECIIMLTDDQRDPFRLPTKENIRMAMHWLVQGCSYGDSLVFHFSGIGAQVADDDGDEADGYDEAICPLDAFQSGPILDDEINETIVRPLVHGARLHAVVDACYSATVLDLPYQCRMSRNGFWQWEDESPPSGAWKGTSGGHAVLISGYSEGKGXRHGQGHDTYIHTADRALLPCIYLYTXMHMLLLGRRAAXMPDAHASVVGAMTHSFVRTLECQPRGVTYGHLLSSMRAIMKNRGGGCDLQGAIGAPIRTVANFSGVQVSMSNLSVSVNNNILG

SEQ ID NO: 6154 - protein, 218 aa, Zea mays
  unsure (1)..(218): unsure at all Xaa locations
  Clone ID: PAT_MRT4577_71853C.1.pep
RVIFFILNALIWGEKSSGAVPFTTMFALVLLWFGISVPLVFVGSYLGFKKPAMEPPVKTNKIPRQIPEQAWYMNPXFTILIGGVLPFGAVFIELFFILTSIWLHQFYYIFGFLFLVFVILIITCAEITIVLCYFQLCSEDYMWWWRSYLTSGSSALYLFLYAGFYFFTKLQITKLVSGILYFGYMLLASYAFFVLTGTIGFCACFWFTRLIYSSVKID

SEQ ID NO: 6155 - protein, 399 aa, Zea mays
  Clone ID: PAT_MRT4577_71970C.1.pep
MASTDRSTPAEDEQQQKRPSLFSPYQMPRFRLAHRVVLAPMTRCRAPDAVPGPALAEYYAQRSTEGGLLISEGTIISPSGPGFPRVPGIYNQEQTDAWRKVVDAVHAKGAIFFCQLWHVGRASHQVYQPGAAAPISSTDKPISSRWRILMPDGSYGKYPTPRRLATSEIPEIVEQYRQAAINAIKAGFDGIEIHGAHGYLIDQFLKGGINDRTDEYGGSLSNRCRFLLEVTRAVVSAIGADRVAVRVSPAIDHLDAYDSNPLQLGLAVVERLNALQQEAGRLAYLHVTQPRYTAYGQTESGQHGSAEEESRLMRAVRGAYRGTFMCSGGYTRELGVEAIESGDADLVSYGRLFIANPDLVERFRRDAPLNKYVRKTFYTPDPVVGYTDYTFLGQPKARM

SEQ ID NO: 6156 - protein, 98 aa, Zea mays
  Clone ID: PAT_MRT4577_72073C.1.pep
MTGRGKGGKGLGKGGAKRHRKILRDNIQGITKPAIRRLARRGGVKRISAMIYEETRGVLKSFLEGVIRDAVTYTEHAKRKTVTLLDVVYALKRQGRTL

SEQ ID NO: 6157 - protein, 332 aa, Zea mays
  Clone ID: PAT_MRT4577_72153C.1.pep
MGECEDGKEYRCWEELLPDALGLIFRNLPLQEVLTVLPRVCKSWGRVVAGPYCWQEIDIEEWSQQQGKPEQIARMVELLVGRSAGSCRRISVSGLPCDPRFSFIGDNARALRTLEIPRSEISDSMVESVAPRLPNVTFLDISSCTKMGARGLEAFGKHCKSLAGLRRVMHPIDLADRACQHDEAHAIACSMPRLRHLEMGYMLVATEAVAEILGRCRELRFLDLRGCWAVDDKLLPRDRHPGLRVLGPRVDDCYENSYWEECSDDYSDDSSIYSWELMDDVDDDYDYAAGSDDDDDEAVWDDDGQGLENLEVRFYGGGFGETFAGFDWPPSP

SEQ ID NO: 6158 - protein, 339 aa, Zea mays
  Clone ID: PAT_MRT4577_72159C.1.pep
MLQGSEVMGECEDGKEYRCWEELLPDALGLIFRNLPLQEVLTVLPRVCKSWGRVVAGPYCWQEIDIEEWSQQQGKPEQIARMVELLVGRSAGSCRRISVSGLPCDPRFSFIGDNARALRTLEIPRSEISDSMVESVAPRLPNVTFLDISSCTKMGARGLEAFGKHCKSLAGLRRVMHPIDLADRACQHDEAHAIACSMPRLRHLEMGYMLVATEAVAEILGRCRELRFLDLRGCWAVDDKLLPRDRHPGLRVLGPRVDDCYENSYWEECSDDYSDDSSIYSWELMDDVDDDYDYAAGSDDDDDEAVWDDDGQGLENLEVRFYGGGFGETFAGFDWPPSP

SEQ ID NO: 6159 - protein, 106 aa, Zea mays
  unsure (1)..(106): unsure at all Xaa locations
  Clone ID: PAT_MRT4577_72196C.1.pep
FVGERIEMAAXDVEYRCFVGGLTWATDDHSLHNAFSTYGEDLEYKIMLDRETQRSRGLRYVPFSTEEAMRNAIKGMNGKELYGSNMTVNDAQSXGGRGCGSGGYGG

SEQ ID NO: 6160 - protein, 270 aa, Zea mays
  Clone ID: PAT_MRT4577_72198C.1.pep
MGRGKVQLKRIENKINRQVTFSKRRNGLLKKAHEISVLCDAEVAVIVFSPKGKLYEYASDSRMDKILERYERYSYAEKALISAESESEGNWCHEYRKLKAKIETIQRCHKHLMGEDLESLNPKELQQLEQQLESSLKHIRSRKSHLMAESISELQKKERSLQEENKALQKELSERQKAVASRQQQQQQVQWDQQTQVQVQTSSSSSSFMMRQDQQGLPPPQNICFPPLSIGERGEEVAAAAQQQLPPPGQAQPQLRIAGLPPWMLSHLNA

SEQ ID NO: 6161 - protein, 94 aa, Zea mays
  Clone ID: PAT_MRT4577_72272C.1.pep
GRVGGRVGRHRMVLRDNIQGVTKPAIRRLARRGGVKRISGLIYEETRGVLKIFLENVIRDAVTYTEHARRKTVTAMDVVYALKRQGRTLYGFGG

SEQ ID NO: 6162 - protein, 66 aa, Zea mays
  unsure (1)..(66): unsure at all Xaa locations
  Clone ID: PAT_MRT4577_72299C.1.pep
MFGRGKGSKGLGKGGAKRHRKVLRDNLXQCITKPAIPKLAPKGGVKRISGLIYEETRGVLKIFLEN

SEQ ID NO: 6163 - protein, 105 aa, Zea mays
  unsure (1)..(105): unsure at all Xaa locations
  Clone ID: PAT_MRT4577_72350C.1.pep
PPVSSVCENPIFKPYRIQQALAACFLPXSPLVLQHPSXALLQQLPLQHLLAQNFKAQHLHQLGLGNLAAYFRHQKFLPFNQLADXNSGAYWQQNLPLSQLAAAYP

SEQ ID NO: 6164 - protein, 110 aa, Zea mays
  unsure (1)..(110): unsure at all Xaa locations
  Clone ID: PAT_MRT4577_72434C.1.pep
RFQKGGFVKTHKTNAXYFKRYXQCKFKRRRAGQTHYMARIRLVNQDKNKSNTPKYRFVVRFTNKDIIGPIIYGSIAGDMVLASAYXDEVPRHGLEDGLTNYSDAYCTGLL

SEQ ID NO: 6165 - protein, 128 aa, Zea mays
  unsure (1)..(128): unsure at all Xaa locations
  Clone ID: PAT_MRT4577_72545C.1.pep
SARGVGCYTPCGSGTGSRGSPESGFVGERTETAASDCEYRCFAGGLGWATDDHCLHNAYSTYXEVLWSKIILDRETHRSRGYGFVTFSTDEAMQNAIEGMNGKELDGLNITVNEAHTRSRRRSGSSSC

SEQ ID NO: 6166 - protein, 183 aa, Zea mays
  unsure (1)..(183): unsure at all Xaa locations
  Clone ID: PAT_MRT4577_72561C.1.pep
MGLSVDNTSSGRQHXVKELSHEDFVRLEIELXQAEMPGLMACRAEFGPSNPFAGARMSVALHMTIQTAVLIKTLTAVGAEVRWCSCKIFSTQDHGVAVIARDSGAEFAWKAETLDEDCGGNHRCLDXGKEGGPYLIIDDGGKSTLLIHKDDKAKDDYENTGQRPHPENIDNAEFKTAVTIIRD

SEQ ID NO: 6167 - protein, 230 aa, Zea mays
  unsure (1)..(230): unsure at all Xaa locations
  Clone ID: PAT_MRT4577_7259C.1.pep
LSAADASTVYAITVEGYXERRLGITXSEAPVFMDPHGSGMRALSRSLIXSVLDLGRCTIVSXLSNMDFESYVLSESSSLIYPLEIVVXTCGTTKLLFTIPRILELAQXLFIPVADMKYSRVTVIFPTEQSSPQMSLSDEVAALNRYFGELKSDGDAYVIRDPPTAGQKWHVFYASEYPEIAMWNLEMRMTVLDEMTASVLFKTNADGNSICVKDMTKISGISEMILGMEI

SEQ ID NO: 6168 - protein, 100 aa, Zea mays
  unsure (1)..(100): unsure at all Xaa locations
  Clone ID: PAT_MRT4577_72622C.1.pep
SCRYVLLTRTQFIPFKHLXAALISLVYLHKQQVLPFSQLDGVSXTTFLIQPXQLFPFXQHDAPXFGTLIQLQQLLXPFNQLAFTNPAAFYQQPIIGGAFF

SEQ ID NO: 6169 - protein, 112 aa, Zea mays
  Clone ID: PAT_MRT4577_7264C.1.pep
RETGRSPGLGFVTFSSENSMFDAIEKINGKELAGRNIPVNQAQSLSGAGGAGGYGGGSGGGGYGGGPRDGGYGGGGGYPGRPKGGGAGYKNGGGYAGRPKGGGGGYGGGGGG

SEQ ID NO: 6170 - protein, 53 aa, Zea mays
  Clone ID: PAT_MRT4577_72741C.1.pep
SCGARAAKLSCSLHVMFTLVQRVYLRSCRVCMLTICVIDCKVDLCQLLVLCSS

SEQ ID NO: 6171 - protein, 275 aa, Zea mays
  unsure (1)..(275): unsure at all Xaa locations
  Clone ID: PAT_MRT4577_72742C.1.pep
KSHGPKRDDGPVILVVNACASRDLHDDVVGVCFVAQDMTVHKLVMDKFTRVEGDYMAIIHNPNPLIPPIFGADEFGWCCEWNAAMTKLTGWHREEVLDKMLLGEVFDSRNASCLLKNKDAFVSLCVVINSALAGEETEKAPFGFFDRSGKYTECLLSVNRRQNEGGLITGVFCFIHIPSHELQQALQVQQASEQKSLKRLKAFSYMRHAINNPLSGMLYSRKALKNTDLNEEQMRQIHVADNCHHQLNKILADLDHXNIMEKSXCLDLEMAEIVL

SEQ ID NO: 6172 - protein, 209 aa, Zea mays
  unsure (1)..(209): unsure at all Xaa locations
  Clone ID: PAT_MRT4577_72813C.1.pep
MAMLVDPPNGMGNQGKHYYSMWQTLFEIDTKYVPIKPIGRGASGIVCSSINRETNEKVAIKKIHNVFDNRVDALRTLRELKLLRHLRHENVISLKDIMMPVQRRSFKDVYLVYELMDTDLHQIIKSPQGLSNDHCQYFLFQLLRGLKYLHSAEILHRDLKPGNLLVNANCDLKICDFGLARTNSSKGQFMTEYVVTRWYRAPELLLXCC

SEQ ID NO: 6173 - protein, 61 aa, Zea mays
  unsure (1)..(61): unsure at all Xaa locations
  Clone ID: PAT_MRT4577_72949C.1.pep
MVPEQKVVKKAPAGLPGGAGPKKNPVSRSLKAGLNFPLGLIGRNLNQVRXSNLVGTGAPFN

SEQ ID NO: 6174 - protein, 117 aa, Zea mays
  Clone ID: PAT_MRT4577_72974C.1.pep
GGFSSPSGRVRFARFSGFGFGVSDRDGGVDVEYRCSGRLPGPRTTTPSQRLSTYGRSSSPRSSLSERRIGPRLGFSPYDGGCDAERHQGMNGRSWTAASSPATGESRAAGRRCREVR

SEQ ID NO: 6175 - protein, 111 aa, Zea mays
  Clone ID: PAT_MRT4577_73333C.1.pep
TASISSPAMSGRGKGGKGLGKGGAKRHRKVLRDNIQGITKPAIRRLARRGGVKRISGLIYEETRGVLKIFLENVIRDAVTYTEHARRKTVTAMDVVYALKRQGRTLYGFGG

SEQ ID NO: 6176 - protein, 129 aa, Zea mays
  Clone ID: PAT_MRT4577_73338C.1.pep
RARSHKSSCSSSPQPNSSHSGETLGDVWRVARAYKGLGKGGAKRHRKVLRDNIQGITNPAIRRLARRGGDKRISGLIYEETRGVLKIFLENVMRDAVTYTEHARRKTVTVMDAVYAPKRQGRTLYGFGG

SEQ ID NO: 6177 - protein, 93 aa, Zea mays
  Clone ID: PAT_MRT4577_73341C.1.pep
MGGRIKGGKGLRKAGANRHRKVLRDNIQGITKPAIRRLDRRGGVKRISVLIYDETRSVLKIFLENVIRDADTYTEHARRKTVTAMDVSYALKR

SEQ ID NO: 6178 - protein, 112 aa, Zea mays
  unsure (1)..(112): unsure at all Xaa locations
  Clone ID: PAT_MRT4577_73343C.1.pep
MYHHLSKSTSNPXILRVRATMSGRGKGGKGLGKGGAKRHRKVLRDNIQGITKPAIRRLARRGGVKRISGLIYEETRGVLKIFLENVLRDAVAYTNHDRRKSDAAMHVVFFFF

SEQ ID NO: 6179 - protein, 125 aa, Zea mays
  Clone ID: PAT_MRT4577_73345C.1.pep
EAGRDLFLIPPANPQFLRVRATMSGRGKGGKGLGKGGAKRHRKVLRDNIQGITKPAIRRLARRGGVKRISGLIYEETRGVLKIFLENVIRDAVTYTEHARRKTVTAMDVVYALKRQGRTLYGFGG

SEQ ID NO: 6180 - protein, 508 aa, Zea mays
  Clone ID: PAT_MRT4577_73424C.1.pep
MAGDGMEVSASGGGGGNKQPQISLLGLFLACMVAGGVQYGWALQLSLLTPYVQTLGIPHALTSVMWLCGPIAGLLVQPCVGLYSDKCTSKLGRRRPFIFTGCIIICISVIVIGFSSDIGYALGDTTEDCNVYTGKRLHAALFFVMGFWLLDFSNNTVQGPARALMADLAGSHGPSTANAIFVSWMAIGNILGYSSGSTDKWHTWFPFLQTRACCEACANLKAAFLVSVVFLGLSTVVTMIFAREVPLDPAAAAKQDEAGESSGPFAVFKGMKNMPPGMPQVLIVTGLTWLSWFPFILFDTDWMGREMYHGRPDGSPEEVARFQEGVRQGAFGLLLNSVVLGASSFLIEPMCRKLTAKVVWVMSSFLVCVAMALVTVLSSWSLGDIGGNVQDAAAVDKGLKTTALAIFVFLGFPFAVLCSVPFAVTAQLAAAKGGGQGLCTGVLNISIVVPQMVIAIGSGPWDELFGKGNIPAFGLAAVFAFTAAVAGIIMLPKQPKTSFRSVSMGGGH

SEQ ID NO: 6181 - protein, 106 aa, Zea mays
  unsure (1)..(106): unsure at all Xaa locations
  Clone ID: PAT_MRT4577_73505C.1.pep
MAEEKHHHHHLLHLYLDEEQDEQVAGGGYGESAEYTEGTETEVLSTGENEYHEHKKEDKQDKHKQHLXMAATSAPAAVALFEXHEAIMDPELSHRHKIYVEVAGAA

SEQ ID NO: 6182 - protein, 183 aa, Zea mays
  Clone ID: PAT_MRT4577_73523C.1.pep
MINLFKIKGQKKEEAASAAGKAPVKKQSAGELRLHKDISELNLPKTTSISFPNGKDDLMNFETTIRPDEGYYMGGTFVFTFQVSPSYPHDPPKVKCKTKVYHPNIDLEGNVCLNILREDWKPVLNINTVIYGLNLLFTQPNDEDPLNHEAAVVLRDNPKMFEANVRRAMAGGYVGQHYFQRCA

SEQ ID NO: 6183 - protein, 183 aa, Zea mays
  Clone ID: PAT_MRT4577_73526C.1.pep
MINLFKIKGQKKEEAASAAGKAPVTKQSAGELRLHKDISELNLPKTTSISFPNGKDDLMNFETTIRPDEGYYMGGTFVFTFQVSPSYPHDPPKVKCKTKVYHPNIDLEGNVCLNILREDWKPVLNINTVIYGLNLLFTQPNDEDPLNHEAAVVLRDNPKMFEANVRRAMAGGYVGQHYFQRCA

SEQ ID NO: 6184 - protein, 83 aa, Zea mays
  unsure (1)..(83): unsure at all Xaa locations
  Clone ID: PAT_MRT4577_73530C.1.pep
MAAADVEYRCLKSXLACATSNESVENAFDFYGEILDSKVITDRETGRLRGFGLITFSCENSMLDAIENMNRKEIYGRYITVNQ

SEQ ID NO: 6185 - protein, 92 aa, Zea mays
  Clone ID: PAT_MRT4577_73591C.1.pep
IGLENGNYTVTLQFAEVDFPDMQSWRSRGRRVFDIYVQGERKEQNFDIRKAAGGKSFTAVKKQYVVPVTKNFLEIHLFWAGKGTCCIPYKGY

SEQ ID NO: 6186 - protein, 96 aa, Zea mays
  Clone ID: PAT_MRT4577_73654C.1.pep
MLYAIENMNGKELDGGNITVNQAQSRDGGGADGDYADGLGGDAYGGGHRDAGFVDGVAYGGRHEGGDDGSGAGGGYDGRHKGGGDASVGGDGGWRN

SEQ ID NO: 6187 - protein, 273 aa, Zea mays
  Clone ID: PAT_MRT4577_73837C.1.pep
MYKQGGAGGGAGLDRKRINDALDKHLEKAVASPSTSRGSAGGGRDHHRLVVPSSVSSIPKGRCSEGESDSDSEASDVSGSDGEDTSWISWYCNLRGNEFFCEVDDDYIQDDFNLCGLSSQVPYYDYALDLILDIESSHGDMFTEEQNELVESAAEMLYGLIHARYILTSKGLAAMLEKYKNYDFGRCPRVYCCGQPCLPVGQSDIHRSSTVKIYCPKCEDIYYPRSKYQGNIDGAYFGTTFPHLFLMTYEHLKPQKLSQRYVPRVFGFKLHKP

SEQ ID NO: 6188 - protein, 70 aa, Zea mays
  Clone ID: PAT_MRT4577_73990C.1.pep
FESARICDGILALVDSHLVPSAGGAESKVFYLKMKGDYHRFLAEFKSGAERKDAVDSSMNVFKADQVIVL

SEQ ID NO: 6189 - protein, 79 aa, Zea mays
  unsure (1)..(79): unsure at all Xaa locations
  Clone ID: PAT_MRT4577_74051C.1.pep
PQHPRHEGQSPDDREGGGGGYGGDRGGXGYGGGGHRDGGGGYGGGDGYGGGGVYGGGGGGYGGGNRGGGYGNSDGNWRN

SEQ ID NO: 6190 - protein, 124 aa, Zea mays
  unsure (1)..(124): unsure at all Xaa locations
  Clone ID: PAT_MRT4577_74152C.1.pep
AGLDPNMPKRATNAFFEFMEECRLEFNDKNPNNKAAAAVSKAAGDRCKSLSESVKAPYVANANKLKLEYNKAISAYIKGESTAANKAAAKEDEEDDDEDSDTSXSDVNDEDDEEGIEDDADVDK

SEQ ID NO: 6191 - protein, 53 aa, Zea mays
  Clone ID: PAT_MRT4577_7455C.1.pep
MAGEEAKKVEVEVTKEPEAAAKEDVADDKAVIPSTDPPPSPPSADDSKALAIV

SEQ ID NO: 6192 - protein, 55 aa, Zea mays
  Clone ID: PAT_MRT4577_74610C.1.pep
MAAKIFCLNMLPGLSANAATASIFPQCSQTPIAFLFSPYLSPAMCLVCENTILLP

SEQ ID NO: 6193 - protein, 906 aa, Zea mays
  unsure (1)..(906): unsure at all Xaa locations
  Clone ID: PAT_MRT4577_7471C.1.pep
MPSSSPCYRHSFLFLALLSACFSTPGAADGTGGAGDGGDAAAMQALRRDLAPPGWGPGADHCAWRGVTCAARNEISGQIPIEMRGMLRLIEVNLSNNRLALARLDLSANSLSGGLSPAFGALTRLEYLDLSMNALTGAVPAALAGASALRFLNLSNNALSGAIPDDLRGLKKLQELQISGNNLTGSLPGWLARLPGLRVLSAYENALSGPIPPGLGLSSELQVLNLHSNALEGSIPSSLFELGNLQVLILTMNRLNGTIPDTIGRCRGLSNVRIGDNLLSGAIPASIGDATGLTYFEANTNDLSGGIPTQFARCANLTLLNLAYNRLAGEVPDVLGELRSLQELIVSGNGLCGEFPKSILRCRNLSKLDLSYNAFRGGLPESICNGSRMQFLLLDHNEFSGGIPAGIGGCTRLLELHLGSNNLSGEIPAEIGKVKSLQIVLNLSFNHFTGPLPHELGRLDKLVMLDXCRSRGAGQMLAVLRVAMLCTERAPAXAPDEEGGGNAAGGQGQLSGLVPLXSMMCGWLXELGTLEVEARNSELIIVGVRVWSPSGXLICVLIFSLVSLLVALFMWRERQEKEEEEAKKKAAEVAVAAAAPQVVASAVFVESLQQAIDFQSCVKATFKDENEVGNGTFSTTYKAVMPSGMVVCVKKLKSVDRAVIHQQTKMIRELERLAHINHKNLVRPVGYVIYDDVALLLHQHMLNGTLLQLLHSSGGDTDGKKQKPDWPRLLSIAIDVAEGLAFLHQVATIHLDICSGNVFLDSHYNALLGEVEISKLLDPSKGTASISTVAGSFGYIPPEYAYTMQVTVPGNVYSYGVVLLEILTSKLPVDDVFGEGVDLVKWVHTAPARGETPEQIMDPRLSTVSFAWRRQMLAVLKVAMLCTERAPAKRPRMRKVVEMLQEAKNS

SEQ ID NO: 6194 - protein, 287 aa, Zea mays
  Clone ID: PAT_MRT4577_74755C.1.pep
MRPVFCGNLDYDVRISEVERLFGKYGRVERVDLKTGFAFIYMEDERDAEDAISRLDGIDFGRKGRRIKVEWTKEDRTADRRGNSRRSPTNAKPTKTLFVINFDPINTRIRDLERHFDKYGRVANVRIKKNFAFIQFEAQEDATRALEGANGSHFMDRVISVEYALRDDDEKGERATNGYSPDRRGRERSPGARRSPSPYGRGRERGSPDYGRGKERGSPDYGRGGRSPDNGRGGRPAGGGGGGRGDHARGGGRRRSPDYYDRERREASPGYDRPPSCSPGTGRDARD

SEQ ID NO: 6195 - protein, 121 aa, Zea mays
  unsure (1)..(121): unsure at all Xaa locations
  Clone ID: PAT_MRT4577_74826C.1.pep
MAARSSSQQLVAASDLASWLLLLAAGAGTASAAASCGQVTSSLASCLGYAMGSAPSPSAACCSAVCSLNSRASSTANRHATCNXLKSMTXARLRXFTMANASNIPGKCGVSGGVPIRPTVD

SEQ ID NO: 6196 - protein, 461 aa, Zea mays
  Clone ID: PAT_MRT4577_74831C.1.pep
MQSLLMPTAASAPVAAPRARRNLPMRLSVRASATAAAAPRRETDPKKRVVITGMGLVSVFGNDVDAYYDRLLAGESGIGPIDRFDASKFPTRFAGQIRGFSSEGYIDGKNDRRLDDCLRYCIVSGKKALEAAGIAHGSKPMEKIDKTRAGVLVGTGMGGLTVFSDGVQNLIEKGYRKITPFFIPYAITNMGSALLGMDIGFMGPNYSISTACATSNYCFYAAANHIRRGEADIMIAGGTEAAIIPIGVGGFVACRALSQRNDDPKTASRPWDKDRDGFVMGEGAGVLVMESLEHAIKRDAPIIAEYLGGAVNCDAYHMTDPRSDGLGVSSCIKQSLKDAGVAPEEVNYINAHATSTLAGDLAEVNAIKQVFKDPSGIKINATKSMIGHCLGAAGGLEAIATVKAITTGWVHPSINQFNPEEAVEFDTVPNVKKQHEVNVGISNSFGFGGHNSVVVFAPFKP

SEQ ID NO: 6197 - protein, 461 aa, Zea mays
  Clone ID: PAT_MRT4577_74832C.1.pep
MQSLLLPTAAVAPVAPPCGRRNLPGRLSVRASATVVAAPRRETDPKKRVVITGMGLVSVFGNDVDAYYDRLLVGESGIGPIDRFDASKFPTRFAGQIRGFSSEGYIDGKNDRRLDDCLRYCIVSGKKALEASGIAHGSKPMEKIDKTRAGVLVGTGMGGLTVFSDGVQNLIEKGYRKITPFFIPYAITNMGSALLGMDIGFMGPNYSISTACATSNYCFYAAANHIRRGEADIMIAGGTEAAIIPIGVGGFVACRALSQRNDDPKTASRPWDKDRDGFVMGEGAGVLVMESLEHAMKRDAPIIAEYLGGAVNCDAYHMTDPRSDGLGVSSCIKQSLKDAGVAPEEVNYINAHATSTLAGDLAEVNAIKQVFKDPSGIKINATKSMIGHCLGAAGGLEAIATIKAITTGWVHPSINQFNPEEAVEFDTVPNVKKQHEVNVGISNSFGFGGHNSVVVFAPFKP

SEQ ID NO: 6198 - protein, 86 aa, Zea mays
  Clone ID: PAT_MRT4577_7483C.1.pep
PSSSCRRLPKAPVADFIEVADVMLERNMLSTGVPEVHRAGLEHVTAPPVRPSSTQDPRVSTHRSLSPAGVFQDAWSGRHYNTTHYR

SEQ ID NO: 6199 - protein, 159 aa, Zea mays
  unsure (1)..(159): unsure at all Xaa locations
  Clone ID: PAT_MRT4577_74969C.1.pep
MDSTAAGAGGKAKKGAAGRKAGGPRKKSVSRSVKAGLQFPVGRIGRYLKKGRYAQRVGTGAPVYLAAVLEYLAAEVLELAGNAARDNKKTRIIPRHVLLAIRNDEELGKLLSGVTIAHGGVLPNINPVLLPKKTAEKASXGGSKEAKSPKKAAKSPKKA

SEQ ID NO: 6200 - protein, 74 aa, Zea mays
  Clone ID: PAT_MRT4577_75055C.1.pep
KLCFRPYRELLLAGCLRRRDWDAIDSGGIVNTGGVNDYPGKLTLFMEITCIVDDTGGLIFGYDIGILSGVTCMN

SEQ ID NO: 6201 - protein, 93 aa, Zea mays
  unsure (1)..(93): unsure at all Xaa locations
  Clone ID: PAT_MRT4577_75338C.1.pep
MALYVDNTSYGREYNVQDLXQAHLARLEIDLAQVEMPELMACPAQFGPSKPFAGARISASLHMTIHTGELIETLTALDAEVRWCSCNIFFTQD

SEQ ID NO: 6202 - protein, 50 aa, Zea mays
  unsure (1)..(50): unsure at all Xaa locations
  Clone ID: PAT_MRT4577_75455C.1.pep
MAVTITWVKARHILYRRRNPTVXEDLCLNDCSYSRRARPSIASTGIYEAL

SEQ ID NO: 6203 - protein, 104 aa, Zea mays
  Clone ID: PAT_MRT4577_75495C.1.pep
SGLLISSLSLLFLRPWWMRGTPSITSAVRSSRTPIDQVDVNDMELLNSLLGRNNHDYDQHKKKLTDKLATSMDKVTVSEPDKHGHKDDEHDVIGDNNEGLIDNL

SEQ ID NO: 6204 - protein, 300 aa, Zea mays
  Clone ID: PAT_MRT4577_75511C.1.pep
MNSQTKPYNKAQQNTIKDCINGSHAISLTPIGSTTTTTTTKHWVPRGRPGRGGPLCLFLFLPPLSPSFLLLPAPLTQPPAMSVETERSSTESSGASGLDFEDTALTLTLRLPGSAPSAAAAAAASLSLSSSSSSAFPDPDRKRASSDADPGRSSPLAASSDAAPAPKARVVGWPPVRSYRKNALADAAGSSKAAKFVKVAVDGAPYLRKVDLQAYAGYDQLLRALQDKFFSHFTIRKFADDERKLVDAVNGTEYVPTYEDKDGDWMLVGDVPWKMFVETCQRLRLMKGSEAVNLAPRAAR

SEQ ID NO: 6205 - protein, 62 aa, Zea mays
  unsure (1)..(62): unsure at all Xaa locations
  Clone ID: PAT_MRT4577_75526C.1.pep
YRCFVVVLVCTTDDHSLHNAFSSDGDVLXSKIIRDRENHRSLGFVFFTCSTDYAIRNAIEVM

SEQ ID NO: 6206 - protein, 73 aa, Zea mays
  Clone ID: PAT_MRT4577_75536C.1.pep
EAQSRSGRGCFGGGYGGGREWGCYGCGGRRDGSGGYGGGGSYRGGCGYRGGGSGYCGGNRGGSYGNSHGNWRN

SEQ ID NO: 6207 - protein, 67 aa, Zea mays
  Clone ID: PAT_MRT4577_75564C.1.pep
GLYSRSIPSTSSKGSPCVHPQRSFPSAQRLLYPGLPIACFRESGNGSRFSPSLAFFMFACFNHPFVF

SEQ ID NO: 6208 - protein, 352 aa, Zea mays
  Clone ID: PAT_MRT4577_75661C.1.pep
MGDAAAAAASTSAPTTPTSILICLEDGSDLLADADDGAGTDLVVARDERLLVVDQDEEYVALLLSKESASGGGGPVEEMEDWMKAARSGCVRWIIKTTAMFRFGGKTAYVAVNYLDRFLAQRRVNREHAWGLQLLMVACMSLATKLEEHHAPRLSELPLDACEFAFDRASVLRMELLVLGTLEWRMVAVTPFPYISCFAARFRQDERRAVLVRAVECVFAAIRAMSSVEYQPSTIAVASILVARGRETPAGNLDALKAILGSSFPQLDTGHVYSCYSAMIREDDKSPTQSTSTSTGVASSGVSVAAHAGGSGSPSPPGASVSVGANNAAGTAPPATTDNRNKRRRLRSPQRQ

SEQ ID NO: 6209 - protein, 243 aa, Zea mays
  unsure (1)..(243): unsure at all Xaa locations
  Clone ID: PAT_MRT4577_75907C.1.pep
MEAGGAGAEGVMRVLLVDDSPVDRRVAQLLLSSNSCAGSFHVIAVDSAKKAMEFLGLKDGGKEQAIDMVLTDYCMPEMTGYDLLKAIKALNPLKPIPVIVMSSEDEPQRISRCLNAGAEDFIVKPLQSKDVQRLRNCSTVGRPSNXAAPRCRARRTXAKWSNNKLPPSAGAGAGASATSPSGRRANLAGVAMRQVLHSSRVEISQYLPLLLKLVVLAYAALCLGELLHRWSSGGSCSLSPWCA

SEQ ID NO: 6210 - protein, 553 aa, Zea mays
  Clone ID: PAT_MRT4577_75935C.1.pep
MDGDFEMPPAGADDMMGDDEMGDFGGDEGPVMKVGEEKEVGKEGLKKKLLKEGEGWETPEVGDEVEVHYTGTLLDGTKFDSSRDRGEPFKFKLGQGQVIKGWDQGIKTMKKGENAIFTIPPELAYGASGSPPTIPPNATLQFDVELLSWTSVKDICKDGGIFKKILKEGEKWENPKDPDEVLVKYEACLEDGTVVSKSEGVEFTVKDGYFCPALAKAVKTMKKAEKVLLTVKPQYGFGEKGRPAAGEEGAVPPNASLLIDLELISWKTVTEIGDDKKILKKVLKEGEGYERPNEGAVVEVKIIGKLLDGAVFTKKGHDEELFKFKTDEEEVIAGLDRAVLNMKKGEVALVTIPPEYAFGSPASTQDLAVVPPNSTVIYEVELISFVKDKESWDLNNEEKIEAAGKKKEEGNALFKSGKYTRASKRYEKAAKYIEYDTSFSEDEKKQSKQLKISCNLNNAACKLKLKDYKEAAKLCTKVLELDSQNVKALYRRVQAYIQLADLELAEADIKKALEIDPDNRDVKLEYKILKEKIKEYNKKDAKFYSNMFAKMTK

SEQ ID NO: 6211 - protein, 559 aa, Zea mays
  Clone ID: PAT_MRT4577_75937C.1.pep
MDEDFEMPPAGADEMMGDDEMGDFGGDEGPVMKVGEEKEVGKEGLKKKLLKEGEGWETPEVGDEVEVHYTGTLLDGTKFDSSRDRGEPFKFKLGQGQVIKGWDQGIKTMKKGENAIFTIPPELAYGASGSPPTIPPNATLQFDVELLSWTSVKDICKDGGIFKKILKEGEKWENPKDPDEVLVKYEARLEDGTVVSKSEGVEFTVKDGYFCPALAKAVKTMKKAEKVLLTVKPQCEIPFQDGFGEKGRPAAGEEGAVPPNASLLIDLELISWKTVTEIGDDKKILKKVLKEGEGYERPNEGAVVEVKIIGKLQDGAVFTKKGHDEEPFKFKTDEEEVIAGLDRAVLNMKKGEVALVTIPPEYAFGSTESKQDLAVVPPNSTVIYEVELISFVKDKESWDLNNEEKIEAAGKKKEEGNALFKSGKYARASKRYEKAAKYIEYDTSFSEDEKKQSKQLKISCNLNNAACKLKLKDYKEAAKLCTKVLELDSQNVKALYRRVQAYIQLADLELAEADIKKALEIDPDNRDVKLEYKILKEKIKEYNKKDAKFYSNMFAKMTK

SEQ ID NO: 6212 - protein, 99 aa, Zea mays
  Clone ID: PAT_MRT4577_75952C.1.pep
TNDLPHMTFVSSRDDVGKCMAFYFAQGILQHDPFKVLDQRGVADLLNFATERGLNASPNLKVAICGKHGGKPSSVAFFTKAGLNYLSCPPFRVPIARLT

SEQ ID NO: 6213 - protein, 210 aa, Zea mays
  unsure (1)..(210): unsure at all Xaa locations
  Clone ID: PAT_MRT4577_7601C.1.pep
MAVTITWVKARQIFDSRGNPTVEVDVGLSDGSYARGAVPSGASTGIYEALELRDGGSDYLGKGVLKAVSNVNNIIGPAIVGKDPTEQVEIDNFMVQQLDGTSNEWGWCKQKLGANAILAVSLAVCKAGAMVKKIPLYQHIANLAGNKTLVLPVPAFNVINGGSHAGNKLAMQEFMILPTGASSFKEXMKMGXVEVYHNLKSIIKKKYGQD

SEQ ID NO: 6214 - protein, 65 aa, Zea mays
  Clone ID: PAT_MRT4577_76050C.1.pep
RMYRDNGHGHRRTQAPGLSLLLIHPLRGQWSLRCHTGPLRAREARRWWWSRSLEAQVIRLTIENW

SEQ ID NO: 6215 - protein, 90 aa, Zea mays
  Clone ID: PAT_MRT4577_76057C.1.pep
KGTLYRMLLIFIAQISLQFRDLTVVTTGLLCNKDLVYPQYDPKCDLFCYLWKVTEKKMANPYMRYKQFVSILLEMSDFACQSFIVCPPVF

SEQ ID NO: 6216 - protein, 127 aa, Zea mays
  unsure (1)..(127): unsure at all Xaa locations
  Clone ID: PAT_MRT4577_7607C.1.pep
PYLSPAVSSVCANPILGPWRIQQASAAGILPLSPMFLQQLSSLLQQSPLVHLLAQNIMAHQLPQLVLAYLAAYYQHQQHISFNQLGSLNSGSYLQQLQLPFNQLPACLRXQSTPFNQLASFNSFAYL

SEQ ID NO: 6217 - protein, 237 aa, Zea mays
  unsure (1)..(237): unsure at all Xaa locations
  Clone ID: PAT_MRT4577_76608C.1.pep
MAAAAVAADSKIDNLRDAVAKLGEISENEKAGFISLVSRYLSGEAEQIEWSKIQTPTDEVVVPYDTLAPPPEDLDAMKALLDKLVVLKLNGGLGTTMGCTGPKSVIEVRNGFTFLDLIVIQIESLNKKYGCSVPLLLMNSFNTHDDTQKIVEKYSNSNIEIHTFNQSQYPRIVTEDFLPLPSKGQTGKDGWYPPGHGDVFPSLNNRGKLDTLLSQXGKEYVFVANSDXLGAIVDIKI

SEQ ID NO: 6218 - protein, 92 aa, Zea mays
  unsure (1)..(92): unsure at all Xaa locations
  Clone ID: PAT_MRT4577_76677C.1.pep
WRDRPRCCHMWRPYRLPPSFHVPPPVRLPPPPCHYPTQPPRAQPHPQPHPXPCQQPHPSPGQLQETCELDNTPILRKRGKVLRNQYRPTTTA

SEQ ID NO: 6219 - protein, 406 aa, Zea mays
  Clone ID: PAT_MRT4577_76736C.1.pep
MNGASAGAGGEAPLVYKAWKGNNVFLLKGRFIFGPDARSLFITMFLIVAPVSIFCAFVAKELMDKFSYGLGLPVMIAAVLFTAYDLSLLLLTSGRDPGIIPRNAHPPEPEGFDGNAEVGANQTPPVRLPRVKDVVVNGITVKTKYCDTCMLYRPPRCSHCSICNNCVERFDHHCPWVGQCIGLRNYRFFYMFVFSTTLLCLYVFGFCWVFIIKIRNAEQITIWKAMTKTPASIALIIYTFIAVWFVGGLSVFHLYLMSTNQTTYENFRYRYDQRDNPYNKGVMENIKEIFFTTIPPSKNNFCGRVEQEHGLRPRPTNGFMSPNMGRAVGDIEMGRKPVAWDEPRMAAEIGDLGAGLSNLLEDKDGRFRTTSPDLSRDALAVGGGLEEHGSSAMNPGRSSWGVEAGR

SEQ ID NO: 6220 - protein, 273 aa, Zea mays
  unsure (1)..(273): unsure at all Xaa locations
  Clone ID: PAT_MRT4577_76902C.1.pep
GPPLKXGPWTSAEDAILVDYVKKHGEGNWNAVQKNTGLFRCGKSCRLRWANHLRPNLKKGAFTPEEERLIIQLHSKMGNKWARMAAHLPGRTDNEIKNYWNTRIKRCQRAGLPIYPASVCNQSSNEDQGSSDFNCGENLSSDLLNGNGLYLPDFTCDNFIANSEALSYAPQLSAVSISSLLGQSFASKNCGFMDQVNQAGMLKQSDHLLPGLSDTINGALSSVDQFPNDSEKLKKALGFDYLHEXNSSSKTIAPFGGALTGXHXLXNGTFSTS

SEQ ID NO: 6221 - protein, 41 aa, Zea mays
  Clone ID: PAT_MRT4577_76926C.1.pep
QCPKHTKLSHLTALLRQGMCLSILLELPLPMPHFLIRMRYS

SEQ ID NO: 6222 - protein, 160 aa, Zea mays
  Clone ID: PAT_MRT4577_77005C.1.pep
MIAIKRVNCFHRDGYGAAGCNPSGSTYMVVFGLFQLLLSQLPSLLRTSSSSSPPPTLAVAPLKLVLRTIVIMFTTLVAMLVPFFNAVLGLIGALGFWPLSVYFPVSMHMARLNIRRGEIRWWMLQAMSFVCLLISVAASIGSVHDIVHNLKAAAPFNTAN

SEQ ID NO: 6223 - protein, 75 aa, Zea mays
  unsure (1)..(75): unsure at all Xaa locations
  Clone ID: PAT_MRT4577_77107C.1.pep
CKQKLVANALLAVSLAVCKALAMVKMITVXQHIGNLAGNKNMVLPVPALNAINGRSHAGNKLAMQEFMILPTGSL

SEQ ID NO: 6224 - protein, 80 aa, Zea mays
  Clone ID: PAT_MRT4577_7710C.1.pep
EEGSKLLQYVYWSNGREAENPRVGNKQCPGKNFVVLVGRLLLVELFLRYDTFPPEVGKELLGTRVIFPGVTKATSGPGSE

SEQ ID NO: 6225 - protein, 399 aa, Zea mays
  Clone ID: PAT_MRT4577_77280C.1.pep
MDALRLRPSLLPVRPGAARPRDHFLPPCCSIQRNGEGRICFSSQRTQGPTLHHHQKFFEWKSSYCRISHRSLNTSVNASGQQLQSEPETHDSTTIWRAISSSLDAFYRFSRPHTVIGTALSIVSVSLLAVQSLSDISPLFLTGLLEAVVAALFMNIYIVGLNQLFDIEIDKVNKPTLPLASGEYTLATGVAIVSVFAAMSFGLGWAVGSQPLFWALFISFVLGTAYSINLPYLRWKRFAVVAALCILAVRAVIVQLAFFLHIQTFVFRRPAVFSRPLLFATGFMTFFSVVIALFKDIPDIEGDRIFGIRSFSVRLGQKKVFWICVGLLEMAYSVAILMGATSSCLWSKTATIAGHSILAAILWSCARSVDLTSKAAITSFYMFIWKLFYAEYLLIPLVR

SEQ ID NO: 6226 - protein, 131 aa, Zea mays
  unsure (1)..(131): unsure at all Xaa locations
  Clone ID: PAT_MRT4577_77291C.1.pep
MWVGEAHHFFXHHKKDQEQPAGKYGYSETGVVTATDQGECERYMKEEKDHMHKQDLGEAVAFAAGTFLLYXKHEAKKDPEHAHRHNITDDVDAERXVCAGRYFFHEHNEKKMDHNDPDEAIGXKNHHHLFR

SEQ ID NO: 6227 - protein, 111 aa, Zea mays
  Clone ID: PAT_MRT4577_77349C.1.pep
MCGRAMAAGDVDYLYFVSGLAYVTTNESLENAFISYGEILDSKVITYRKTARSRGFRLVTFSFDNSMLDAIENMNGKELDGRNITVNQTQSLGSRGGGGGYSSGRRTGGYG

SEQ ID NO: 6228 - protein, 470 aa, Zea mays
  Clone ID: PAT_MRT4577_77402C.1.pep
MATTAVSVDEKLDKLRAEVAKLDQISENEKSGFISLVSRYLSGEAEQIEWSKIQTPTDEVVVPYDTVASPPEDLEETKKLLDKLVVLKLNGGLGTTMGCTGPKSVIEVRNGFTFLDLIVIQIESLNKKYGCNVPLLLMNSFNTHDDTQKIVEKYSNSNIEIHTFNQSQYPRIVTEDFLPLPSKGKSGKDGWYPPGHGDVFPSLNNSGKLDILLAQGNEYVFVADSDNLGAIVDIKILNHLINNQNEYCMEVTPKTLADVKGGTLISYEGRVQLLEIAQVPDEHVNEFKSIEKFKIFNTNNLWVNLKAIKRLVEAEALKMEIIPNPKEVDGVKVLQLETAAGAAIRFFDKAIGINVPRSRFLPVKATSDLLLVQSDLYTLVDGFVIRNPSRANPANPSIELGPEFKKVANFLARFKSIPSIVELDSLKVSGDVWFGSGITLKGKVTIIAKPGVKLEIPDGDVLENKDVYFY

SEQ ID NO: 6229 - protein, 544 aa, Zea mays
  Clone ID: PAT_MRT4577_77404C.1.pep
LRVRRDTALRHTHHTTPPRFHSARLTSRPVLSFRSLASPDDGHRRGVGRREARQASRRGRQARPDQASAPLLSALDLAARSLRLPFLLISECVFPRSENEKSGFISLVSRYLSGEAEQIEWSKIQTPTDEVVVPYDTVASPPEDLEETKKLLDKLVVLKLNGGLGTTMGCTGPKSVIEVRNGFTFLDLIVIQIESLNKKYGCNVPLLLMNSFNTHDDTQKIVEKYSNSNIEIHTFNQSQYPRIVTEDFLPLPSKGKSGKDGWYPPGHGDVFPSLNNSGKLDILLAQGKEYVFVANSDNLGAIVDIKILNHLINNQNEYCMEVTPKTLADVKGGTLISYEGRVQLLEIAQVPDEHVNEFKSIEKFKIFNTNNLWVNLKAIKRLVEAEALKMEIIPNPKEVDGVKVLQLETAAGAAIRFFDKAIGINVPRSRFLPVKATSDLLLVQSDLYTLVDGFVIRNPSRANPANPSIELGPEFKKVANFLARFKSIPSIVELDSLKVSGDVWFGSGITLKGKVTIIAKPGVKLEIPDGDVLENKDVNGPEDL

SEQ ID NO: 6230 - protein, 517 aa, Zea mays
  Clone ID: PAT_MRT4577_77406C.1.pep
MNSRRQEQQARRTIRALLAKNGALCTGVWRCRSGGADIASRAPTMATAAVSVDEKLDKLRAEVAKLDQISENEKSGFISLVSRYLSGEAEQIEWSKIQTPTDEVVVPYDTVASPPEDLEETKKLLDKLVVLKLNGGLGTTMGCTGPKSVIEVRNGFTFLDLIVIQIESLNKKYGCNVPLLLMNSFNTHDDTQKIVEKYSNSNIEIHTFNQSQYPRIVTEDFLPLPSKGKSGKDGWYPPGHGDVFPSLNNSGKLDILLAQGKEYVFVANSDNLGAIVDIKILNHLINNQNEYCMEVTPKTLADVKGGTLISYEGRVQLLEIAQVPDEHVNEFKSIEKFKIFNTNNLWVNLKAIKRLVEAEALKMEIIPNPKEVDGVKVLQLETAAGAAIRFFDKAIGINVPRSRFLPVKATSDLLLVQSDLYTLVDGFVIRNPSRANPANPSIELGPEFKKVANFLARFKSIPSIVELDSLKVSGDVWFGSGITLKGKVTIIAKPGVKLEIPDGDVLENKDVNGPEDL

SEQ ID NO: 6231 - protein, 473 aa, Zea mays
  Clone ID: PAT_MRT4577_77410C.1.pep
MAATAVSVDEKLDKLRAEVAKLSQISENEKAGFISLVSRYLSGEAEQIEWSKIQTPTDEVVVPYDILASPPEDLEETKKLLDKLVVLKLNGGLGTTMGCTGPKSVIEVRNGFTFLDLIVIQIESLNKKYGCNVPLLLMNSFNTHDDTQKIVEKYSNSNIEIHTFNQSQYPRIVTEDFLPLPSKGKSGKDGWYPPGHGDVFPSLNNSGKLDILLAQGKEYVFVANSDNLGAIVDIKILNHLINNQNEYCMEVTPKTLADVKGGTLISYEGRVQLLEIAQVPDEHVNEFKSIEKFKIFNTNNLWVNLKAVKRLVEAEALKMEIIPNPKEVDGVKVLQLETAAGAAIRFFDKAIGINVPRSRFLPVKATSDLLLVQSDLYTLVDGFVIRNPSRANPANPSIELGPEFKKVANFLARFKSIPSIVELDSLKVSGDVWFGSGITLKGKVTITAKSGVKLEVPDGAVFENKDVNGPEDL

SEQ ID NO: 6232 - protein, 569 aa, Zea mays
  unsure (1)..(569): unsure at all Xaa locations
  Clone ID: PAT_MRT4577_77417C.1.pep
RSPRVRPASAERPPGQRPLEAGRDKITSGGKCDFDLAATFFXCSVVYLVVGGDMQFALALDTNSGPHQIRSCEGDGIDRLEKLSIGGRKQEKALRNRCFGGRVAATTQCILTSDACPETLHSQTQSSRKNYADANRVSAIILGGGTGSQLFPLTSTRATPAVPVGGCYRLIDIPMSNCFNSGINKIFVMSQFNSTSLNRHIHRTYLEGGINFADGSVQVLAATQMPEEPAGWFQGTADSIRKFIWVLEDYYSHKSIDNIVILSGDQLYRMNYMELVQKHVEDDADITISCAPVDESRASKNGLVKIDHTGRVLQFFEKPKGADLNSMRVETNFLSYAIDDAQKYPYLASMGIYVFKKDALLDLLKSKYIQLHDFGSEILPRAVLDHSVQACIFTGYWEDVGTIKSFFDANLALTEQPSKFDFYDPKTPFFTAPRCLPPTQLDKCKMKYAFISDGCLLRECNIEHSVIGVCSRVSSGCELKDSVMMGADTYETEEEASKLLLAGKVPVGIGRNTKIRNCIIDMNARIGKNVVITNSKGIQEADHPEEGYYIRSGIVVILKNATINDGSVI

SEQ ID NO: 6233 - protein, 66 aa, Zea mays
  Clone ID: PAT_MRT4577_77476C.1.pep
FTSHVMCVCMQNMYVCHHGVRSRIRWTYVIIQSCHVYVRKICMYAIIASTNTSVARICNYKRQAHA

SEQ ID NO: 6234 - protein, 123 aa, Zea mays
  unsure (1)..(123): unsure at all Xaa locations
  Clone ID: PAT_MRT4577_77517C.1.pep
PGLCSVVSRNRLEKYKXDNLYGCRHSLPDGLMTALTYDRGTSCVVCEYGDVGXGGASAVKKVCARVSLTEIDAICDLQALXEGLQVLPLEDVVSEADIFVSTTGNKDIIMVDQMRKMKNNAIV

SEQ ID NO: 6235 - protein, 170 aa, Zea mays
  Clone ID: PAT_MRT4577_77573C.1.pep
PFFFPSSLFCCRCLCRRRRRLDCFGICRLAVKSKGAEKPAKGRKGKAGKDPNKPKRAPSAFFVFMEEFRKEFKEKNPKNKSVAAVGKAAGDRWKSLSESDKAPYVAKANKLKLEYNKAIAAYNKGESTAAKKAPAKEEEEEDEEESDKSKSEVNDEDDEEGSEEDEDDDE

SEQ ID NO: 6236 - protein, 168 aa, Zea mays
  Clone ID: PAT_MRT4577_77574C.1.pep
TLRSVSSLESAMKGAKSKGAAKADAKLAVKSKGAEKPAKGRKGKAGKDPNKPKRAPSAFFVFMEEFRKEFKEKNPKNKSVAAVGKAAGDRWKSLSESDKAPYVAKANKLKLEYNKAIAAYNKGESTAAKKAPAKEEEEEDEEESDKSKSEVNDEDDEEGSEEDEDDDE

SEQ ID NO: 6237 - protein, 184 aa, Zea mays
  Clone ID: PAT_MRT4577_77605C.1.pep
MINLFKIKGQKKDEAASATGKAPVKKQSAGELRLHKDISELNLPKTTSISFPNGKDDLMNFEITIRPDEGYYMGGAFVFTFQVSPSYPHDPPKVKCKTKVYHPNIDLEGNVCLNILREDWKPVLNINTVIYGLNLLFTQPNDEDPLNHEAAAVLRGNPKMFEANVKRAMTGGYVGQHYFQRCLA

SEQ ID NO: 6238 - protein, 184 aa, Zea mays; identical to SEQ ID NO: 6237
  Clone ID: PAT_MRT4577_77606C.1.pep

SEQ ID NO: 6239 - protein, 70 aa, Zea mays
  Clone ID: PAT_MRT4577_77693C.1.pep
SKGFIFVRLVCCCPSVFFMQGRSETVVSPVFSPAPANPCPPSMDCGSMNTVTPVRICYKLILRKKWYLLV

SEQ ID NO: 6240 - protein, 65 aa, Zea mays
  unsure (1)..(65): unsure at all Xaa locations
  Clone ID: PAT_MRT4577_77815C.1.pep
FLFSFSFFCTTRGGVFFNCGSGFKCGSSCKCGKKYPDLXETSTALQATVFLGLAPEKKAAPNFDK

SEQ ID NO: 6241 - protein, 55 aa, Zea mays
  Clone ID: PAT_MRT4577_77920C.1.pep
KRGPKASPNLKVGLCGEPGGDPPSVAFFAKAGLDYVSCPPFRVPIARLTPAQGLV

SEQ ID NO: 6242 - protein, 98 aa, Zea mays
  Clone ID: PAT_MRT4577_77952C.1.pep
FQKRPPQVNIGRLECPFHLHILFYRSSWGQKWGYSVVFLLLLVRVFLAKLELITAFQLGLLCPKRYCCPIAFFLRFLKLCIKAQRLPLLFWTRSFVSL

SEQ ID NO: 6243 - protein, 91 aa, Zea mays
  unsure (1)..(91): unsure at all Xaa locations
  Clone ID: PAT_MRT4577_7801C.1.pep
MAAKLFSLLMLLGLSACAASASIFPLCSQAPIAYVLTPYLSPAESSXVCDYPILHPYWFHLAFAAGFLPLSPLLLQQSSALLQLLPLGHFL

SEQ ID NO: 6244 - protein, 57 aa, Zea mays
  unsure (1)..(57): unsure at all Xaa locations
  Clone ID: PAT_MRT4577_78059C.1.pep
TLLPFLKKQQLLXPFXLHAXPKAGTLLKLQKLLPFNPLALKKPTVFXQQPIIGGALF

SEQ ID NO: 6245 - protein, 80 aa, Zea mays
  Clone ID: PAT_MRT4577_78070C.1.pep
VSRIKVDWDKWQDEDDEDAGFNDFGGMDFSKLDIGGADDHYIGDDEDDVVESAKKDEERRKTEQSKDEEAAPAAAKEVKP

SEQ ID NO: 6246 - protein, 257 aa, Zea mays
  unsure (1)..(257): unsure at all Xaa locations
  Clone ID: PAT_MRT4577_78087C.1.pep
MGEEAVDDYELHMVCYGGGGGGSEDERVMEWESGLPGADELTPLSQPLVPAGLAAAFRIPPEAGRTLLDVHRASAATVSRLRRAPPPSSSGSGGSSSFAPFHPAARGDEGADSSAAGGGAAATTNGNNNMSSSSKRPRLVWTPQLHKRFVDVVAHLGMKNAVPKTIMQLMNVEGLTRENVASHLQKYRLYVKRMQGLSDEGPSPSDHIFASTPVPQSLVHEVPMXHHGQRRXAYHNHNGMGGGGYQYQYHHYHHAHK

SEQ ID NO: 6247 - protein, 148 aa, Zea mays
  Clone ID: PAT_MRT4577_78147C.1.pep
VHLMAQNIRAHQLHQLVLANLAACSQQQQFVPFSQLAALTYASYLHQQQLPFSQLPVAYLQQFLPFNHLPALSSPAYLQQHQLLPFRQLAGVSPITFFTQPQLLPFYQHDAPNDGTIFQFHQLLPFNQLAFLNLAVFYHQPIIGGALF

SEQ ID NO: 6248 - protein, 138 aa, Zea mays
  Clone ID: PAT_MRT4577_78248C.1.pep
MASLFKDPSKLSVYRDRRFPGTQEEFEAALLASLTVYVGNMSFYTTEEQAYELFSRAGEIKKIIMGLDKNTKTPCGFCFVLYYSREDAEDAVKYISGTMLDDRPIRVDFDWGFEEGRQWGRGRSGGQVRDEYRTDYDP

SEQ ID NO: 6249 - protein, 90 aa, Zea mays
  Clone ID: PAT_MRT4577_782C.1.pep
SAACFIANGADANTDLRRCCISGAPSWCVCVSVCDCVAAALYIVQTYRSPSHAATATDSIDALPTRGGVRTRERSVGRVKRNSASSSSSL

SEQ ID NO: 6250 - protein, 37 aa, Zea mays
  Clone ID: PAT_MRT4577_78338C.1.pep
AHHRLAVARRRRAQQRALQLALATAAGDAHRARIYIT

SEQ ID NO: 6251 - protein, 249 aa, Zea mays
  Clone ID: PAT_MRT4577_78440C.1.pep
MTETREINVFMAKLAEQAERYDEMVEAMKNVADLGQELTVEERNLLSVAYKNVIGARRASWRIITSIEQKEESKGNTAHVERIKEYRKKVENEVSKICADVLGTLDNKLIPNAQTTESKVFYYKMKGDYHRYLAEFATSEARKEAADNSLAAYKSATDIANSELAPTHPIRLGLALNASVFYYEIMGSPKQACELARKAFDDAIAELDQLNEESYKDSTLIMQLLRDNLTLWTSDLEGDKADAEPEAAN

SEQ ID NO: 6252 - protein, 227 aa, Zea mays
  Clone ID: PAT_MRT4577_78450C.1.pep
MGRGKIEIKRIENATNRQVTYSKRRTGIMKKARELTVLCDAQVAIIMFSSTGKYHEFCSPGTDIKTIFDRYQQAIGTSLWIEQYENMQRTLSHLKDINRGLRTEIRQRMGEDLDSLDFDELRGLEQNVDAALKEVRHRKYHVISTQTDTYKKKVKHSHEAYKNLQQELGMREDPAFGYVDNTGAGVAWDGAAAALGGAPPDMYAFRVVPSQPNLHGMAYGFHDLRLG

SEQ ID NO: 6253 - protein, 210 aa, Zea mays
  unsure (1)..(210): unsure at all Xaa locations
  Clone ID: PAT_MRT4577_78571C.1.pep
MVLMAGMLPGVECARRRRVRQGGAGMGAEAAGGGTGRRSSFCLYAAGHGGAGNSGKRSGGVVHGHGWTLDSNAREAKERLDQKLRTXGRPPXEAPQHGEHKAGRAAPERRRGRARRELRAXMAGVQREVYSKKGVMRRLMRWSRPRWAAAEQAECAVCLDEFRAGDVLAHLRCGHRFHWACALPWLEGTSRCPFCRAAVDAGAAAAADGA

SEQ ID NO: 6254 - protein, 73 aa, Zea mays
  Clone ID: PAT_MRT4577_78749C.1.pep
IYHKSTLPYITHRFMHTCDKECFVSQSKAKYFFNILTTYCIMISENRSLDVSVTEGVHLVEARCKDVAPKGVM

SEQ ID NO: 6255 - protein, 247 aa, Zea mays
  Clone ID: PAT_MRT4577_78947C.1.pep
MASADLLRREEEFYSSLFDSAKGDGARSRSQLIERKIEALEDMATRVSNRRSRKWFNDRLLIELVPRLYVEEIKGLFAPPPWGEQVPLSAFYRANVGEWDSFRSIDMDAEARLMQHMKKSLEKPRNHVDEGESIALNAWHRIDRHTREAIKRNFLPDLLGIYEERVRAFIEDASDKDALVLNVQDPFQRLLLHGVCEFYNVSSTTTSSVREDGRPWKATTIKKRQGTGVPSRITLVSFLRMKKNGSQ

SEQ ID NO: 6256 - protein, 555 aa, Zea mays
  unsure (1)..(555): unsure at all Xaa locations
  Clone ID: PAT_MRT4577_79089C.1.pep
MADTPTSRMVHPFGDVPRQTPKQFLYSGNPQHLCHPYQSAPDTHVVPQRRYTVRSQSHSPNNAGSQDHETHKQYTLESSAASRLXSRHGSPSSQSVHAGSGSPVSHDDSHSGSTNGHGSPVSASCVTGEDPTDLSXKLKDLEAVMLGTSETDPEIVNSLEISAANQLSLEPEEWEHMVSMPRGNLKELLIACARAVERNNSYAIDLMIPELRKMVSVSGEPLERLGAYMVEGLVARLAASGSSIYKALKCKEPRSSDLLSYMHFLYEACPYFKFGYMSANGAIAEAIKGEDRIHIIDFHIAQGAQWVSLLQALAARPGGPPFVRVTGIDDSVSAYARGGGLELVGRRLTHIAGLYKVPFQFDAVAISGSEVEEEHLGVVPGEAVAVNFTLELHHIPDETVSTANHRDRILRLVKGLSPKVLTLVEQESNTNTAPFAQRFAETLDYYTAIFESIDLALPRGDRERINIEQHCLAREIVNLVACEGEERVERHEVFGKWKARLMMAGFRPSPLSALVNATIKTLLQSYSPDYKLAEREGVLYLGWKNRPLIVSSAWH

SEQ ID NO: 6257 - protein, 46 aa, Zea mays
  unsure (1)..(46): unsure at all Xaa locations
  Clone ID: PAT_MRT4577_79171C.1.pep
MESKGGKKSSSSRSMMYEAPLGYNIEDVRPAXCVKNFQAVAYSNFS

SEQ ID NO: 6258 - protein, 109 aa, Zea mays
  Clone ID: PAT_MRT4577_79229C.1.pep
HPQQPDKKYHAAGCLFVSSMESTELKVEMVALHEKRVRRCLSKVKGIERVEVEASLQKVVVTGCVNRSKILKALRRVGLRAEPWSPHNELLSAYAATTTLVFNNSYAFF

SEQ ID NO: 6259 - protein, 131 aa, Zea mays
  Clone ID: PAT_MRT4577_7924C.1.pep
EVYARVWVLPEDEDAEKRAQARVRDDEDADRRDGEDGGAMRPLARTPHMFCKTLTASDTSTHGGFSVPRRAAEDCFPPLDYSQQRPSQELVAKDLHGTEWKFRHIYRGQPRRHLLTTGWSAFVNRKKLISG

SEQ ID NO: 6260 - protein, 79 aa, Zea mays
  unsure (1)..(79): unsure at all Xaa locations
  Clone ID: PAT_MRT4577_79371C.1.pep
RNIPVKEAQSHRACEGGAGGSGGARGGGGYAGGGPRDAGGGFGGAGGSGGAGGYGGGGGGXGGWHRWGGXGNSHGNWRN

SEQ ID NO: 6261 - protein, 328 aa, Zea mays
  Clone ID: PAT_MRT4577_79414C.1.pep
MVGGGRRGGAAAEEVKLNTGNVFAALESLKKKKKGDKGRAAGPSSRKKHGAGAAQQQQEPPQKDVFWAPAPLTTKSWADVEDDDDDDYFATTAPPRPVWAAAAAAEPAKEEEEDVEDAVRAALQEDVESDDEDLDDEDLDDGAEHEVEDAPAELAVKTVEALAAPPKDTERQLSKKELKKRELAELDAVLAELGLSGNSTSAAQDAEKEGANQAGDAEKKEDATVPSESKTSKKKKKKDKSSKEGRKETQEAAEGSEETASAGPDEEDTTAVDVKERLKKMASMKKKRSSKETDTGAKIAAAEATARSARLAAAKKKEKSHYNQQPVR

SEQ ID NO: 6262 - protein, 566 aa, Zea mays
  Clone ID: PAT_MRT4577_79557C.1.pep
MERYSDMRPKAEVSYLGRGSRFSSRNQSSEERTNHSSDKPGSSTRFNPTKARIGGNQGRPRYVCDSFKSPSSKVSPAGSSKFPLSKFEERRRQPFVPGFDIAESSRRKADAKQLQGSKKIAAENDSSDNLRGESEGFTTEQVVKPEGSHVVGHSGVSAYTVGSLVQTASLGSRTHRQKHKEVNLGTPGASSSTLTNRSTIPGNSTMGVRPAYGHVNGGQIHGLKNLGCSSVPDAQPSGCPSESVISRRRFEFMRKRAFDQESSSRSVNLSLGHSTPTDIRRIRMNEQSLCQQIPRSSSRSHQESAGSVRTRRPSPHATRMSVPDGRADGVLSLHESSTKDVQPAQEHLSLEEVSTESSIRPFFVEFDNNIFSSSHLRRSSTRAERGRPSSLFEESPRQMFHSLMGERDRHRHITMEGITEVLAALERIEQQAELTYDQLLMLEANLFFGAFASYDRHRDMRMDIDDMSYEELLALEERIGSVSTALSEEQFTKCLKRSIYSQVALEVNKSTVDDMKCSICQEEYAEGEEVGRLPCEHRYHVCCIGQWLGQKNWCPVCKASAVPSKG

SEQ ID NO: 6263 - protein, 43 aa, Zea mays
  unsure (1)..(43): unsure at all Xaa locations
  Clone ID: PAT_MRT4577_79616C.1.pep
MLPSFVSPTAXCAASVAPPPRPFPGSYGAPVLGPLRDRLDFFW

SEQ ID NO: 6264 - protein, 207 aa, Zea mays
  unsure (1)..(207): unsure at all Xaa locations
  Clone ID: PAT_MRT4577_79625C.1.pep
MPETVGENGNAAPGRLLLLSNRLPITIKRSEDGSYSFSMSSGGLVTGLSGLSKTTSFQWYGWPGLEVPDNEVEGMKQRLKEEYGAHPVFIDDELADRHYNGFSNSILWPLFHYHPGEITFDESAWAAYQEVNRLFAKTVIKDVQDGDLIWVHDYHLMLLPQMLREEIGESKKNVKIGFFLHTPFPSSEIYRILPVREALLTGXLDCD

SEQ ID NO: 6265 - protein, 109 aa, Zea mays
  unsure (1)..(109): unsure at all Xaa locations
  Clone ID: PAT_MRT4577_79648C.1.pep
FTRTSTQNSIRVAQWMLETTGATSFMGCIGKDKFGEELKKNAQAAGVTADYYEDDTAPTGTCAECVGAGEWSLIANLLEAYCHKYEHLKRPVNXTLVVMASDIYIAGFL

SEQ ID NO: 6266 - protein, 72 aa, Zea mays
  Clone ID: PAT_MRT4577_79789C.1.pep
KNRKKTNPVHIHKMGSQIFVHTCILIVEARSCPPRAAYLLIQTDPACGTIVSSHAYRRQIFIPLACLVCFTD

SEQ ID NO: 6267 - protein, 701 aa, Zea mays
  Clone ID: PAT_MRT4577_79924C.1.pep
MRLSSSLQDLPTFTRIDALERGSSVGSDLSSGRPKPVRMLQRDGAVASFSKERTPPSSPTNRKKCMRAAGCAIALILLVFFAYGSWRYFHVFLSEGRSEYYVVLDCGSTGTRVYVYEWHINHNDANAFPIVLKPLGNAPKKKSGKLTRLYQRMETEPGLSKLVHNESGLKKAIEPLLQMAEKLIPRHAHKHTPLFLYATAGVRKLPSADSEWLLDKSWDILNNSSFLCSRDRVKIISGMDEAYYGWIALNHNMDMLGTSSSKMTYGSLDLGGSSLQVTFENDKSVQDETSIRLSIGSVEHHLSAYSLTGYGLNDAFDKSVAHLVKRLGGVASNGKVQVKHPCLQTGFKEDYICSYCHPLKQDGSPSVGEKNSGKEKQGIAVELVGAPQWNECSALAKVTVNLSEWSSASPGLDCNIHPCALASNFPRPYGQFFAISGFYVVFKFFNLTADATLGDVQKRGQEFCEKPWKVAKSSVPPQPFVEQYCFRAPYISSLLREGLQIKDSQVIIGSGSITWTHGVALLEAGQALSSRLDIQGYRILHREINPNILIVLFLISIVLVICAILCVSNSIPRSFRKSYLPIHRHNSGGSSVLGMGLPFKHLLWNPISSGDGRTKTPLSPTVAGSDPHPFAGLGGSSVELMESSRQSLGAYHSYSVGSLGQMQFSSGVRNPSRGQTTLQSRRSQSREDLSSSLADIHFPKV

SEQ ID NO: 6268 - protein, 925 aa, Zea mays
  Clone ID: PAT_MRT4577_79974C.1.pep
MRIMIKGGVWKNTEDEILKAAVMKYGKNQWARISSLLVRKSAKQCKARWYEWLDPSIKKTEWTREEDEKLLHLAKLMPTQWRTIAPIVGRTPSQCLERYEKLLDAACAKDENYEANDDPRKLRPGEIDPNPESKPARPDPVDMDEDEKEMLSEARARLANTRGKKAKRKAREKQLEEARRLASLQKRRELKAAGIDTRHRKRKRKGIDYNAEIPFEKRPPSGFYDTVGEDRPPEHVQFPTTIEGLEGKRRADIEAQLRKQDIARNKILQRQDAPAAIMQANKLNDPEAVTKRSKLMLPPPQISDHELEEIAKMGSAGDPALADELGEGSTATRTLLASYSQTPRLGMTPLRTPQRTPAGKGDAIMMEAENLARLRESQTPLLGGDNPELHPSDFSGVTPRKKEIQTPNPMATPLASPGPGITPRISMTPSREGHSFGLTPKATPLRDELNINEVEMQDNTKLELRRQAELRKSLRSGFASIPQPKNEYQIVMPPITEDEKEEAEEKIEEDMSDRLARERAEEQARHEALLRKRSKVLQRSLPRPPAVSVEIIRQSLIRSGESRSRSTFMPPTSLEQADELINEELLRLLEHDNAKYPLDEKTQKEKKKGSKRQQNGGPLVPEIDDFDEDELKEASSMVEEEIQYLRVAMGHENESFEDFVKAHDACQDDLMFFPTSNSYGLASVAGNADKISALQNEFETVKKRMDDEAKKASRLEQKIKLLTQGYQIRAGKLWSQVQDTFKQMDTAATELECFQELQKQEHLAASYRIQNLSEEVSKQKALERTLQSRYGELVSGFQRIQEQVEEHKRQLKVQEAVEAESHAQEEEAAASNHAAAEEEDERKEDDERKEEDGSKSLSSEEKPQQTSTATDEEPAGSKGTTEDQMDVDSGNGEGGVVGPVPPAPDTEGGNDEVSVQEISEAQPLP

SEQ ID NO: 6269 - protein, 506 aa, Zea mays
  unsure (1)..(506): unsure at all Xaa locations
  Clone ID: PAT_MRT4577_80047C.1.pep
GYRHAGGGQDEEWLLGTPHPDVLPGRSRGRPDGEDGRVAHRPQPQGRPPHGGERRERXKRRPPTTKLSELESQLSQLQDELKKAKEQLHSSELSRKRALQEVDDAKAQAAAASAQARDTEAQLAELSSAEESRLLELRRLSQERDRSWQSELEAMQKQHAADSTALAAAMGEVHRLRVQLAATARADRRQDVVEALATINELRAKLKASEEAEAQARAMHEECKQQLEASRATIDSLLTDGSKLMDSFSLVVKELEESRATVKALEDEIAETSSRAAGDHCSCSGSESEASELRAELEAAEARYQEEKILSTVETQCAYELMDQIKTESDLRHGKLAAALEGAKSEVIFLKASLFDKESELRSALDAIKKLQAETRADGSADALKQQLQCALHENGQLKQELHQYESEKGSATARTAEADASEAAKKGEMETELRRLRVQAEQWRKAAETAMALLTVGKGGNGKFVERSESWEGVKYAGLCEELDDDAAVRKNGNVLRRISGMWKK

SEQ ID NO: 6270 - protein, 87 aa, Zea mays
  unsure (1)..(87): unsure at all Xaa locations
  Clone ID: PAT_MRT4577_80122C.1.pep
QFLPYHQRAALNSPVYXQQQHLLPSSQLAGVSPAAFLSQPQLFPIDQHVAPHAGTLLQLQRLVPFNHLAFTHPPVFDHHPIIGGALF

SEQ ID NO: 6271 - protein, 157 aa, Zea mays
  Clone ID: PAT_MRT4577_80301C.1.pep
MDASGAGSKGKKGAAGRKAGGPRKKSVTRSVKAGLQFPVGRIGRYLKKGRYAQRVGTGAPVYLAAVLEYLAAEVLELAGNAAKDNKKTRIIPRHVLLAIRNDEELGKLLAGVTIAHGGVLPNIHSVLLPKKAAEKAASAGSKEPKSPKKGAKSPKKA

SEQ ID NO: 6272 - protein, 171 aa, Zea mays
  Clone ID: PAT_MRT4577_80303C.1.pep
MVKYSTEPTNPTKSTKAMGRDLRVHFKNTRETAFALRKLSLTKAKRYLEDVIAHKQAIPFRRYCGGVGRTAQAKSRHSNGQGRWPVKSARFILDLLKNAESNAEVKGLDVDTLYVSHIQVNQAQKQRRRTYRAHGRINPYMSSPCHIELILSEKEEPVKKEAESQIATRNA

SEQ ID NO: 6273 - protein, 177 aa, Zea mays
  Clone ID: PAT_MRT4577_80350C.1.pep
MLRGVENSFLLHSLPRLHNPPPRSRPGTSPAAMTTRFKKNRKKRGHVSAGHGRIGKHRKHPGGRGNAGGMHHHRILFDKYHPGYFGKVGMRYFHKLRNKFYCPAVNIERLWSMVPADKAAEAGGDKAPQIDVTQFGYFKVLGKGVLPPKPIVVKAKLISKVAEKKIKAAGGAVVLTA

SEQ ID NO: 6274 - protein, 447 aa, Zea mays
  Clone ID: PAT_MRT4577_80424C.1.pep
MASSLAPASWALPLQMGGAGAAAAGPSCRATLAVVTEPRWAASLRRARVLVALAPRCVALDGPGASGEEEAPKIEDERKKSGETKKPARGRPVWSRILFASKKTRSIIILNALTVIYASDIPVLKEVEALTEPAVFNMVRFVVAAIPFVPFALRSFGDRSVRYAGLELGVWVSLAYLSQAIGLLSSDAGRASFITAFTVVVVPLIDGLLGASIPRLTWFGAIMSLFGIGLLECGGSPPSVGDILNFFSAVFFGIHMLRTEQISRSTDKKKFLALLGFEVLVVAFSSVLWFMFKDGYVDTSGSSFESWTFGMLWDTTVSFPWIPALYTGVLSTVLCMWAEMVAMGDVSATETAVVYGLEPVWGAAFAWFLLGERWDDAAWTGAALVLCGSLTVQLFGSAPEKSKKVKKRSSNALETPVKRRDYLSLSPIPVDSGKIIGRQLERKNKAV

SEQ ID NO: 6275 - protein, 242 aa, Zea mays
  unsure (1)..(242): unsure at all Xaa locations
  Clone ID: PAT_MRT4577_8051C.1.pep
MAATIQSVKARQIFDSRGNPTVEVDVCCSDGTFARAAVPSGASTGVYEALELRDGGSDYLGKGVSKAVNNVNSIIAPALVGKDPTAQTELDNFMVQQLDGTKNEWGWCKQKLGANAILAVSLAVCKAGASVKKIPLYQHIANLAGNKQLVLPVPAFNVINGGSHAGNKLAMQEFMILPTGAASFKEAMKMGVEVYHNLKSVIKKKYGQDATNVGDEXGGFAPNIQENKEGLELLKTAIEKAG

SEQ ID NO: 6276 - protein, 242 aa, Zea mays
  unsure (1)..(242): unsure at all Xaa locations
  Clone ID: PAT_MRT4577_8054C.1.pep
MAATIQSVKARQIFDSRGNPTVEVDVCCSDGTFARAAVPSGASTGVYEALELRDGGSDYLGKGVSKAVNNVNSIIAPALVGKDPTAQTELDNFMVQQLDGTKNEWGWCKQKLGANAILAVSLAVCKAGASVKKIPLYQHIANLAGNKQLVLPVPAFNVINGGSHAGNKLAMQEFMILPTGATSFKEAMKMGVEVYHNLKSVIKKKYGQDATNVGDEGGFAPNIQEXNRRGLELLKTAIEKAG

SEQ ID NO: 6277 - protein, 146 aa, Zea mays
  unsure (1)..(146): unsure at all Xaa locations
  Clone ID: PAT_MRT4577_80551C.1.pep
LLAQNIRAQQLQQLGVTNPGAYXQQQQFFPFNQIGSLNFGFYLQQQQLPFSQVPGAYPQQFFPFNQLTALNFPGYLQQQQLLPFNQVSGVNPGTFFTQPQLVPFYQHGGPNAGPLLQLQPLVPFNQPGFTNPTVVYPQPIIGGALF

SEQ ID NO: 6278 - protein, 43 aa, Zea mays
  Clone ID: PAT_MRT4577_80580C.1.pep
TNYLRPDLKRGLLSTAEEQLVIDLHAMLGNRWSKIAAKLPGRT

SEQ ID NO: 6279 - protein, 56 aa, Zea mays
  Clone ID: PAT_MRT4577_80596C.1.pep
AVGTARPSYRVCNRGDCPRPQGLSPFVMCLWMPICVFDCKAALGQLVDLGSSSAST

SEQ ID NO: 6280 - protein, 201 aa, Zea mays
  unsure (1)..(201): unsure at all Xaa locations
  Clone ID: PAT_MRT4577_8071C.1.pep
ITLDPTKFRSYSRHDTTGMTTNAAAPVWNDNEALTVRPRGPILLEDYHLIEKAEHFARERIPERVVHARVASAKGFLECTHDVTXLTCADFLLAPGVRTPVIVRFWTVIHERRSPETMRDPRVIAEKFYTREVNWDLLYNNLLGFFIRDGIKFPDVIHAIKPNLRPHVQEYCRVLYFLXNLPDSLHTFMFLFDDGGVLADY

SEQ ID NO: 6281 - protein, 56 aa, Zea mays
  Clone ID: PAT_MRT4577_80753C.1.pep
EILCTSAASATLSSSDGTGTTVSCPTSTSSWTTSHCTSSASCCCCSLPMSTMTVEL

SEQ ID NO: 6282 - protein, 240 aa, Zea mays
  Clone ID: PAT_MRT4577_8094C.1.pep
MESLFGQSQRRRRAGGSGFESLKRLGHISPAVQSHLKHVYLTLCSALAFSALGAYLHILLNVGGALTTVGCVASIAFLISLPASRDQERNRLALLMSAALLQGASVGPLVDLVIDLDSRILVTAFVGTAVAFACFSGAAIIAKRREYLYLGGLLSSGLSILLWLQFATSIFGHTSATFMFELFFGLLVFLGYMVFDTQEIIERAHRGDMDYIKHALTLFTDFVAMKNAQEKSQDEKRKKR

SEQ ID NO: 6283 - protein, 141 aa, Zea mays
  unsure (1)..(141): unsure at all Xaa locations
  Clone ID: PAT_MRT4577_80953C.1.pep
MGDEIFWLLMQLXLSESAAAVTIFXPQWSQAPIGCLLAPFLSPAVSXVCENPILEPYRMQQTIRGGILPLSPLFLQQSSALLQELPLVHLLAQNIRAQQLQQLVLANLAAYSQQQQFXLPFNQTSCIGTPVXFLQQQQLPF

SEQ ID NO: 6284 - protein, 250 aa, Zea mays
  Clone ID: PAT_MRT4577_8095C.1.pep
MESLFGQSQRRRRAGGSGFESLKRLGHISPAVQSHLKHVYLTLCSALAFSALGAYLHILLNVGGALTTVGCVASIAFLISLPASRDQERNRLALLMSAALLQGASVGPLVDLVIDLDSRILVTAFVGTAVAFACFSGAAIIAKRREYLYLGGLLSSGLSILLWLQFATSIFGHTSATFMFELYFGLLVFLGYMVFDTQEIIERAHRGDMDYIKHALTLFTDFVSVLVRILVIMMKNAQEKSQDEKKRKKR

SEQ ID NO: 6285 - protein, 50 aa, Zea mays
  Clone ID: PAT_MRT4577_8096C.1.pep
WATAAASVRQVPRCSLVRPFVRSSLDPSSTSTHQTCIRARIKNNICSYRR

SEQ ID NO: 6286 - protein, 371 aa, Zea mays
  Clone ID: PAT_MRT4577_81096C.1.pep
MGSGGANTAPLLTPYKMGKFDVSHRVVLAPLTRQRSYGNVPQPHAILYYQQRATKGGLLIAEATGVSDTAQGYKDTPGIWTHEQVEAWKPIVDGVHQKGGIFFCQIWHVGRVSNSTFQPNGQAPISSTDKPLKPQVRANGIDVATFAVPRRLETDEIPLVVNDFRVAARNAIEAGFDGVEIHGAHGYLIDQFLKDGVNDRTDKYGGSLENRCRFALEVTQAVVDEIGADKVGIRLSPFASYSEAPDSDPEALGMYMANALNEFGILYCHMVEPRMVKLGEKFETPYSLRPIRDAFRGTFIVAGGYGREDGNRAISTGYADLVAFGRLFLANPDLPRRFEVDAPLNKYNRDTFYIPDPVVGYTDYPFLSSDV

SEQ ID NO: 6287 - protein, 411 aa, Zea mays
  unsure (1)..(411): unsure at all Xaa locations
  Clone ID: PAT_MRT4577_81100C.1.pep
MGSGGANTAPLLTPYKMGKFDVSHRVVLAPLTRQRSYGNVPQPHAILYYQQRATKGGLLIAEATGVSDTAQGYXSSARPXLLRLLEICVVMXISSFSSLVDVXKDVFSVCAQGTXTPGIWTHEQVEAWKPIVDGVHQKGGIFFCQIWHVGRVSNSTFQPNGQAPISSTDKPLKPQVRANGIDVATFAVPRRLETDEIPLVVNDFRVAARNAIEAGFDGVEIHGAHGYLIDQFLKDGVNDRTDKYGGSLENRCRFALEVTQAVVDEIGADKVGIRLSPFASYSEAPDSDPEALGMYMANALNEFGILYCHMVEPRMVKLGEKFETPYSLRPIRDAFRGTFIVAGGYGREDGNRAISTGYADLVAFGRVFLANPDLPRRFEVDAPLNKYNRDTFYIPDPVIGYTDYPFLSSDV

SEQ ID NO: 6288 - protein, 122 aa, Zea mays
  unsure (1)..(122): unsure at all Xaa locations
  Clone ID: PAT_MRT4577_81104C.1.pep
MAAKIFCFLMLLGLSASVATATIFPQCSQAPIAFLFSPYLLPAVSSMCENPIVXPYRIQQAIVTGILPLSPLFLQQPLALLQQIPLVHLVVQNIMAQQLQXLGLVNFAAFFQLHSFFXFNQL

SEQ ID NO: 6289 - protein, 101 aa, Zea mays
  Clone ID: PAT_MRT4577_81216C.1.pep
MAAAAQRLLAASTKIVGVGRNYVAHAKELGNPVPKEPVLFLKPTSSFLHAGVATTAVEVPEPLESLHHEVELAVVISRRARDVPEASAMDFVGGYALALDM

SEQ ID NO: 6290 - protein, 101 aa, Zea mays
  Clone ID: PAT_MRT4577_81245C.1.pep
VGFSCPFGSGSGSGGYPRFGFSNQRIEMAAYDVDYRCFFGGLAWATDNHSLHNAFSTYSEVLQCKIILDRETQRSRGFRYITFFTEEAMPNAIEGMNLKEL

SEQ ID NO: 6291 - protein, 72 aa, Zea mays
  unsure (1)..(72): unsure at all Xaa locations
  Clone ID: PAT_MRT4577_81527C.1.pep
QLSPPAIGIAVECVFAPFLGREXYQPVVDENVDKLKKVLEVYDARVGTCTYLDGDFLSLAELRRFTIMQWLM

SEQ ID NO: 6292 - protein, 391 aa, Zea mays
  Clone ID: PAT_MRT4577_81549C.1.pep
MAAFAALFDPLYCPEEHLDLYRDEPGEGADEQWPGQHGQQEPAVLDDELPALFEAHRAKEGVVLAEDGGYGGAAGREAAVGWVSRAAARLGFSALTAALAAAYLDRCFLPGGALRLGDQPWMARLAAVTCFALAAKVEETRVPPLLDLQLYAAADAADPYVFEAKTVRRMELLVLSALGWRMHPVTPFSYLQPVLADAATRLRSCEGVLLAVMADWRWPRHRPSAWAAAALLITAAAGDGGDGDGDTELLALINAPEDKTAECAKIISEVTGMSFLACDVGVSAGNKRKHAAAQLYSPPPSPSGVIGALSCFSCESSTSATAMAAAVGPWAPSASVSVSSSPEPPGRAPKRAAAASASASASAGVAPPVQVPHQLPPDEESRDAWPSTCAA

SEQ ID NO: 6293 - protein, 45 aa, Zea mays
  Clone ID: PAT_MRT4577_81550C.1.pep
KTGSPPPANFLFKKVKRDFFFFVARLWTWTNPSSVTRFKYRLPFV

SEQ ID NO: 6294 - protein, 136 aa, Zea mays
  unsure (1)..(136): unsure at all Xaa locations
  Clone ID: PAT_MRT4577_81604C.1.pep
MAAKIFWRLILLGLSAISATSTIFPKCSQAPISSLLPPYLLPAVSFVCENPILQSYTIQHSITAGILSLLPLFLHHSSILLHHLPLMHIFSHIIXSQQLQHLVLSYLAAYSHQHQFFFFNXLSAMISASYFTHHSN

SEQ ID NO: 6295 - protein, 593 aa, Zea mays
  Clone ID: PAT_MRT4577_81610C.1.pep
MDTAIGSVPAASDAARHPAPSASAPRDATLGRHLARRLAEVGARDVFTVPGDFNLTLLDELEAEPGGVRLVGCCNELNAAYAADGYARARAGGVGACAVTFTVGGLSAINGVAGAFSENLPVVCIVGGPNSNDYGSNRILHHTIGLPDFTQELRCFQNVTCYQAVVNNLEDAHEQIDTAISTAIKESKPVYISISCNLPSIPHPTFSRHPVPFFLSPRLSNQMNLEAAVEAAAAFLNKAVKPVLVGGPKMRVSKACEALAELADACGYPVAVMPSAKGLVPEHHSRFIGTYWGAVSTPFCAEIVESADAYLFAGPVFNDYSSVGYSLLLKKEKAIIVQPERVVVGHGPAFGCVLMKDFLHALATRLKKNTVAYENYRRIYVPPGEPLSSEPGEPLRVNVLFKHIQAMLSGDMAVIAETGDSWFNCQKLKLPEGCGYEFQMQYGSIGWSVGATLGYAQAAKDKRVIACIGDGSFQVTAQEVSTMLRWGHNSIIFLINNGGYTIEVEIHDGPYNVIKNWNYTGLVEAFHNGEGACYTAKVRTEEELTEALEAALGPKKDCLCFIEVIVHKDDTSKELLEWGSRVSAANSRPPNPQ

SEQ ID NO: 6296 - protein, 107 aa, Zea mays
  unsure (1)..(107): unsure at all Xaa locations
  Clone ID: PAT_MRT4577_81682C.1.pep
DPDGPDAVRLTWNTWPRSKVEASRCVVPLAATISPGRVPDPSAXSPPPLPYPPLRCKAPCSXLLNPFARVDFAAKIWICPFCFSRNHFPLHYSAISESNVPAELSPQ

SEQ ID NO: 6297 - protein, 80 aa, Zea mays
  Clone ID: PAT_MRT4577_81745C.1.pep
RFLKSGSSRQLLHIYLYVCIMNYLVCFPQKRTPFFVHVHYVVPFVFLKCRPEKRTFTFVFSCLAVWLLQFFFALQKNFKL

SEQ ID NO: 6298 - protein, 117 aa, Zea mays
  unsure (1)..(117): unsure at all Xaa locations
  Clone ID: PAT_MRT4577_8178C.1.pep
HKAGYTTYATKHNACETTEATKQKAVETTEAARQKAVDAMEAVKQNAVEAGQXYAKDTVVSGKDKFGDVIQXATDQVKSAAAGAKDAVMSTLVMGGYDKQGYANTNTNQDSLYHYQG

SEQ ID NO: 6299 - protein, 117 aa, Zea mays
  unsure (1)..(117): unsure at all Xaa locations
  Clone ID: PAT_MRT4577_8184C.1.pep
PPQETEXGXXXKTHRSXAYFKXXQXKXKRRRAGKTDYRARIRLINQDKNKSNTPNCGGVVRFTNLDITAXIISASLAGDMVLASACSHELPRCGLAVGLSCFAAXAFCAVLLLARRV

SEQ ID NO: 6300 - protein, 228 aa, Zea mays
  unsure (1)..(228): unsure at all Xaa locations
  Clone ID: PAT_MRT4577_81870C.1.pep
GFLVCSQLPLYGIYSTTGADPFYWMRVILASNRGTVMELGITPIVTSGMVMQLLVGSKIIEVDNSVREDRALLNGAQKLLGILIAIGEAVAYVLSGMYGSVSQLGTGNAILIILQLFFAGIIVICLDELLQKGYGLGSGISLFIATNICENIIWXVRALREAFYRQNLPNVTNLLATVLVFLIVIYFQGFRVVLPVRSKNARGQQGSYPIKLFYTSXMPIILHSALIT

SEQ ID NO: 6301 - protein, 174 aa, Zea mays
  unsure (1)..(174): unsure at all Xaa locations
  Clone ID: PAT_MRT4577_81872C.1.pep
MHYHIKYIQLTISLFSSPRLGVHAVASACRGEASALPGAGLGSSSARKMAGGFRVLHLVRPFLAFLPEVQSADRKIPFREKVIYTVISLFIFLVCSQLPLYGIHSTTGADPFYWMRVILASNRGTVMELXITPIVTSXMVMQLLXGSKIFEVDNSVREDRALLNGAQKVLGILI

SEQ ID NO: 6302 - protein, 141 aa, Zea mays
  unsure (1)..(141): unsure at all Xaa locations
  Clone ID: PAT_MRT4577_81875C.1.pep
MAGGFRVLHLVRPFLAFLPKVQSADRKIPFKEKVIYTVISLLIFLVCSQLPLYGIHSTTGADPFYWMRVILAXNRGTVMELGITPIVTSGMVMQLLVGSKIIEVDNSVREDRALLNGAQKLLGILIAIGEAVAYVLSEMYG

SEQ ID NO: 6303 - protein, 475 aa, Zea mays
  Clone ID: PAT_MRT4577_81878C.1.pep
MAGGFRVLHLVRPFLAFLPEVQSADRKIPFREKVIYTVISLFIFLVCSQLPLYGIHSTTGADPFYWMRVILASNRGTVMELGITPIVTSGMVMQLLVGSKIIEVDNSVREDRALLNGAQKLLGILIAIGEAVAYVLSGMYGSVSQLGTGNAILIILQLFFAGIIVICLDELLQKGYGLGSGISLFIATNICENIIWKAFSPTTINSGRGAEFEGAVIALFHLLITRTDKVRALREAFYRQNLPNVTNLLATVLVFLIVIYFQGFRVVLPVRSKNARGQQGSYPIKLFYTSNMPIILHSALITNLYFISQLLYRKYSGNFLVNLLGKWKESEYSGHSIPVGGLAYYVTAPSSLADVLANPFHALFYVVFMLSACALFSKTWIEVSGSSAKDVAKQLKEQQMVMPGHRESNLQKELNRYIPTAAAFGGVCIGALTVLADFMGAIGSGTGILLAVTIIYQYFETFEKERATELGFFGF

SEQ ID NO: 6304 - protein, 475 aa, Zea mays
  Clone ID: PAT_MRT4577_81879C.1.pep
MAGGFRVLHLVRPFLAFLPEVQSADRKIPFREKVIYTVISLFIFLVCSQLPLYGIHSTTGADPFYWMRVILASNRGTVMELGITPIVTSGMVMQLLVGSKIIEVDNSVREDRALLNGAQKLLGILIAIGEAVAYVLSGMYGSVSQLGTGNAILIILQLFFAGIIVICLDELLQKGYGLGSGISLFIATNICENIIWKAFSPTTINSGRGAEFEGAVIALFHLLITRTDKVRALREAFYRQNLPNVTNLLATVLVFLIVIYFQGFRVVLPVRSKNARGQQGSYPIKLFYTSNMPIILHSALITNLYFISQLLYRKYSGNFLVNLLGMWKESEYSGHSVPVGGLAYYVTAPSSLADVLANPFHALFYVVFMLSACALFSKTWIEVSGSSAKDVAKQLKEQQMVMPGHRESNLQKELNRYIPTAAAFGGVCIGALTVLADFMGAIGSGTGILLAVTIIYQYFETFEKERATELGFFGF

SEQ ID NO: 6305 - protein, 548 aa, Zea mays
  unsure (1)..(548): unsure at all Xaa locations
  Clone ID: PAT_MRT4577_81883C.1.pep
MAGGFRVLHLVRPFLAFLPEVQSADRKIPFREKVIYTVISLFIFLVCSQLPLYGIHSTTGADPFYWMRVILASNRGTVMELGITPIVTSGMVMQLLVGSKIIXEVDNSVXREDRALLNGAQKLLGILIAIGXEAVAYVLSGMYGSVSQLGTGNAILIILQLFFAGIIVICLDELLQKXXGLGSGXISLFIATNICENXIWKAFSPTTINSGRGAEFEGAVIALFHLLITRTDKVRALREAFYRQNLPNVTNLLATVLVFLIVIYFQGFRVVLPVRSKNARGQQGSYPIKLFYTSNMPIILHSALITNLYFISQLLYRKYSGNFLVNLLGKWKESEYSGHSIPVGGLAYYVTAPSXENLVPSVGTGEAFSPXHFCCFCYSIIRYSFDXIAHWKPHSLADVLANPFHALFYVVFMLSACALFSKTWIEVSGSSAKDVAKQLKEQQMVMPGHRESNLQKELNXHPHLLFLELLSNKXMPGHRESNLQKELNRYIPTAAAFGGVCIGALTVLADFMGAIGSGTGILLAVTIIYQYFETFEKERATELGFFGF

SEQ ID NO: 6306 - protein, 54 aa, Zea mays
  unsure (1)..(54): unsure at all Xaa locations
  Clone ID: PAT_MRT4577_81890C.1.pep
APCGRAALEAASPTSPRDPPPPYPGPLLPPRPSXRAPEEGLPAPHXEASSHNPT

SEQ ID NO: 6307 - protein, 90 aa, Zea mays
  Clone ID: PAT_MRT4577_81929C.1.pep
YPQQFFPFNQGEALNFPVYFQQQQLFPFSQLGGVSPAPFLKHPQWLPFYQHVGPNGGTLLQLQQLVPFNQLVLTNPEGFYQQPIIGGALF

SEQ ID NO: 6308 - protein, 76 aa, Zea mays
  unsure (1)..(76): unsure at all Xaa locations
  Clone ID: PAT_MRT4577_81979C.1.pep
MSCNCGSSCGCGSSCKCGKXYPDLEETSTAAQATDILGVDPEKRPCPISFRPRWYPTEDVHGCICNGNCKVDHCNY

SEQ ID NO: 6309 - protein, 88 aa, Zea mays
  unsure (1)..(88): unsure at all Xaa locations
  Clone ID: PAT_MRT4577_81984C.1.pep
MASSTMALSSTAFAGKAVNVPSSSAFGEARVTLRXTAAKAKPAAASGSPWYCPHRVLYLGPLSGVPACYLTGVFRVDYGWNSPGLTVD

SEQ ID NO: 6310 - protein, 84 aa, Zea mays
  Clone ID: PAT_MRT4577_82033C.1.pep
STTSPFLLLALLPTSATLCSHSPSPMPVLSSADASPVSPISFEDYYKRLDITFSDAPAFVDPHGRTSRALSTAHIDSLLDLAQS

SEQ ID NO: 6311 - protein, 65 aa, Zea mays
  unsure (1)..(65): unsure at all Xaa locations
  Clone ID: PAT_MRT4577_82069C.1.pep
FKTHKGRXQCRRLPALCGVWERVSLSAKPYPRNMQRLGLEHGTFRLQTVGSTAAPGPPFRFKTHS

SEQ ID NO: 6312 - protein, 58 aa, Zea mays
  unsure (1)..(58): unsure at all Xaa locations
  Clone ID: PAT_MRT4577_82076C.1.pep
VSPATFLIQPQLLPFYQRAGPNAVTXLLQLQQLLPFNQLALTNPAAFYQHPIIVGALF

SEQ ID NO: 6313 - protein, 103 aa, Zea mays
  unsure (1)..(103): unsure at all Xaa locations
  Clone ID: PAT_MRT4577_8212C.1.pep
GSPGFGFEGERIEMAASDVEYRFFIXXLTXTTDHHSLHSAFXTDRKXLXSKIILHLXTHKSHGFCFFTFFTEEAMRNAIDGMNGKELDGPNITVNEAQSRGGR

SEQ ID NO: 6314 - protein, 93 aa, Zea mays
  unsure (1)..(93): unsure at all Xaa locations
  Clone ID: PAT_MRT4577_82255C.1.pep
TKTRNAXXDXHEHHXEXKADXGAXKTNPQQXGTXRKNGFIVXKTRPSKVVEVSKNKTGKHGHAKXHFVAIDIFNGKKLEDIVPSSHXCXXPHV

SEQ ID NO: 6315 - protein, 902 aa, Zea mays
  unsure (1)..(902): unsure at all Xaa locations
  Clone ID: PAT_MRT4577_82317C.1.pep
VRYNLGTEQRCMLCFAVLMAPAPCGRSSQRVFHFGKGKSEGNKNMKELLGGKGANLAEMASIGLSVPPGFTVSTEACQQYQEAGRALPPGLWAEVLDGLRWVEEYMGAALGDPRRPLLLSVRSGAAVSMPGMMDTVLNLGLNDQVAAGLAAKSGDRFAYDSFRRFLDMFGNVVMDIPHALFEEKLEAMKKAKGLKNDTDLTATDLKELVGQYKDVYVEAKGEPFPSDPKRQLELAVLAVFDSWESPRAKKYRSINQITGLRGTAVNVQCMVFGNMGNTSGTGVLFTRNPNTGEKKLYGEFLVNAQGEDVVAGIRTPEDLDAMKDVMPQAYKELVENCRILESHYKEMQDIEFTVQESRLWMLQCRTGKRTGKSAVKIAVDMVNEGLVERRAAIKMVEPGHLDQLLHPQFENPSAYKDQVIATGLPASPGAAVGQVVFTAEDAETWHSQGKSVILVRAETSPEDVGGMHAAAGILTERGGMTSHAAVVARGWGKCCVSGCSGIRVNDAEKVVKIGGNVLREGEWLSLNGSTGEVILGKQPLSPPALSGDLGTFMSWVDDVRKLKVLANADTPEDALAARNNGAEGIGLCRTEHMFFASDERIKAVRQMIMAPTVELRQQALDRLLPYQRSDFEGIFRAMDGLSVTIRLLDPPLHEXFLPEGNVEEIVRELCSETGANQEDALARIEKLSEVNPMLGFRGCRLGISYPELTEMQARAIFEAAIAMTNQGVQVFPEIMVPLVGTPQELGHQVALIRQVANKVFTSMGKTIGYKIGTMIEIPRAALVADEIAEQAEFFSFGTNDLTQMTFGYSRDDVGKFIPIYLAQGILQHDPFEVLDQRGVGELVKLATERGRKARPNLKVGICGEHGGEPSSVAFFAKTGLDYVSCSPFRVPIARLAAAQVLV

SEQ ID NO: 6316 - protein, 44 aa, Zea mays
  Clone ID: PAT_MRT4577_82627C.1.pep
ASKDLKVKRITPRHLQLAIRGDEELDSLIKATIAGGGVIPHIHK

SEQ ID NO: 6317 - protein, 97 aa, Zea mays
  Clone ID: PAT_MRT4577_82701C.1.pep
PTRPRTRGPFFPLSTLQVLVGRRPLYTWVANLDTEVEEGSSQHMDSWISSQPSVSLDLCVGLAPFRLHHQAPVAVFFPRPKLLVEENFLLPPSKKEP

SEQ ID NO: 6318 - protein, 75 aa, Zea mays
  Clone ID: PAT_MRT4577_82704C.1.pep
MSRRRRGCAYESFTRELRDTFQGFHFGSGGRSSSSQCCSFGGSTSYETAVFSGIRVEGNETTEARGCKSDVPGLK

SEQ ID NO: 6319 - protein, 132 aa, Zea mays
  Clone ID: PAT_MRT4577_82761C.1.pep
SYLRRRRRQSRQLMDPMQSSVRGRRSSLHADAVITIGGVRPAPPPQTSTHVCQDEAMVSSGDPSWMSGYRSVEESRVNWREQWRWWSDALCGAKALHVLEHLRHPLMICPALRLPLRHHPRLHLVTFPPLFF

SEQ ID NO: 6320 - protein, 62 aa, Zea mays
  unsure (1)..(62): unsure at all Xaa locations
  Clone ID: PAT_MRT4577_82965C.1.pep
MNYIEEDLVSTDYQGDSRSSIGEGNVGSGGNGIFMKIVSWYYNXWGYSTRVVKLIRHMNSTN

SEQ ID NO: 6321 - protein, 98 aa, Zea mays
  unsure (1)..(98): unsure at all Xaa locations
  Clone ID: PAT_MRT4577_82975C.1.pep
MPVWTMISPDTIRRAIGAIGNGTALVIFLSRVTTFIHMWKKGSVEYNSPIPNEPTVQNCMMXVLYGMPAVHLHSMVVITINGTGMVIQMTYVVLFLLY

SEQ ID NO: 6322 - protein, 113 aa, Zea mays
  Clone ID: PAT_MRT4577_83132C.1.pep
MSFLVCDVGGMIAGNKRKHAAARMYSPPLSPSGVIGALSCFSCESSLSATADSRTLATTAAGVGPWAPSAPVSVSSSPEPPGRAPKRAAAAGVPHPLPPDEESRDAWPSTCAA

SEQ ID NO: 6323 - protein, 120 aa, Zea mays
  Clone ID: PAT_MRT4577_83176C.1.pep
VVVVAATAVPPVAAATATPAGSGGTDRWGPPGPVILFASVMFPLVQRGYLRSSRLVSPLRVFESKVPLCPLLVLGSSRGPAGPCLNPHGLWVDGCCSSRQGLFLVPPKEKMVLFGCAPKL

SEQ ID NO: 6324 - protein, 105 aa, Zea mays
  unsure (1)..(105): unsure at all Xaa locations
  Clone ID: PAT_MRT4577_83422C.1.pep
ATQKAQERTNKGSQRGGVMLLGHTASAATATXFPQCXQAPKRSLLPXDLLPAESSECENPILQPYRIQQAIGAVILPLSPLVLQQSSALLQQLALXHLLAQNIRA

SEQ ID NO: 6325 - protein, 344 aa, Zea mays
  Clone ID: PAT_MRT4577_83725C.1.pep
MEAEKKAPAVSDVGAWAMNVVSSVSLIMANKQLMSSSGYAFAFATTLTGFHFTVTALVGWISNATGYSVSKHVPLWELVWFSLVANTSITGMNLSLMLNSVGFYQISKLSMIPVVCLMEWVLNSKHYTTKVISAVVVVAAGVGICTVTDVEVNAKGFICACVAVFCTSLQQITIGSFQKKYNIGSFELLSKTAPIQAISLIILGPFVDYYLNGRSLLNYPFSGGATFFILLSCSLAVFCNMSQYLCIGRFSATSFQVLGHMKTVCVLILGWILFDSALTVKNILGMLLAVMGMVVYSWAMEAEKKAAAPVPRIKSEMLDGEDVPLKARVSGVPAVDLEDGEMKS

SEQ ID NO: 6326 - protein, 344 aa, Zea mays
  Clone ID: PAT_MRT4577_83726C.1.pep
MEAEKKPPAVSDVGAWAMNVVSSVSLIMANKQLMSSSGYAFAFATTLTGFHFTVTALVGWISNATGYSVSKHVPLWELVWFSLVANTSITGMNLSLMLNSVGFYQISKLSMIPVVCLMEWVLNSKHYTTKVISAVIVVAAGVGICTVTDVEVNAKGFICACVAVFCTSLQQITIGSFQKKYNIGSFELLSKTAPIQALSLIILGPFVDYYLNGRSLLNYPFSGGATFFILLSCSLAVFCNMSQYLCIGRFSATSFQVLGHMKTVCVLILGWILFDSALTVKNILGMLLAVMGMVVYSWAVEAEKKAAAPIPRNKGGMLDGEDVPLKARVSGVPAVDLEDGDVKG

SEQ ID NO: 6327 - protein, 84 aa, Zea mays
  Clone ID: PAT_MRT4577_83846C.1.pep
VFLASSLIFIITYVSNVRVRASHEGIHTYLAYIPITCLDIYICPMEALGPPMRVYIHILRTYTLNMTGESCRDFLSQPKSGTMK

SEQ ID NO: 6328 - protein, 145 aa, Zea mays
  Clone ID: PAT_MRT4577_83935C.1.pep
MAAFAALFDPLYCPEEHLDLYHEGPVEVVDEQWQDQRGQQQPAALDDELPALFEALRDKEGVVLAGDGEEDGYGGSAGREAAVGWASRAAARLGFSALTSALSAAYLDRCFLPGGALRLGDQPWMSRLAAVACVALAAKVEETRV

SEQ ID NO: 6329 - protein, 438 aa, Zea mays
  Clone ID: PAT_MRT4577_83940C.1.pep
SVGDLEASSTPQPNAARAAGPCCPGVYCSLTPRAATPGPRHHSSRPPRRRSGQQEQDVQSGRPGAVSLTTRGPRPIGRTALWCTGVSRPSSLTPSPATPSSILPDGAPGSRNKMSNRATHWCYACRRPIRLRGQDIVCPNCNDGFIQEISEMGGILNTYGLIEPDFEERRARRFGMMDAMSSLMRQRMEEMGRDGLFDIRGRQGTGTEYGRRPTAVPTLVFGGIPSPGVGSGDVNVVLRGGRRAGAAQPNFSSLVVGPSLEALFEQLLLQNNRQGPAPAPQSAIDSMPVVKINRRHLDDDPQCAVCKDKFEVGAEAREMPCKHLYHTDCIIPWLVQHNSCPVCRHPLPSQRSGSTSSARPSAYYNEAADPPGVTRADLEPAPRDGGRESQERRRSFSFLWPFGPSSSRSSSYQYEQNVDEPAVYDPNQIAYSEWHYDH

SEQ ID NO: 6330 - protein, 75 aa, Zea mays
  unsure (1)..(75): unsure at all Xaa locations
  Clone ID: PAT_MRT4577_84205C.1.pep
TXIFFFFFFFFGVVFWGGPELFHPRSTKITGLNASKDKTKLFYSRFRVHILEPILSIPSRFQKATPPSWGIGPQS

SEQ ID NO: 6331 - protein, 648 aa, Zea mays
  Clone ID: PAT_MRT4577_84221C.1.pep
TLAGSLIPVPHPSPFAKITAAGDSKNLHAHARPRSPASRPRAVADSLSDPDPMGGEVPEPRRLSRSLSFGCGGVPEEALHLVLGYVDDPRDREAASLVCRRWHRIDALSRKHVTVGFCYAVEPARLLARFRRLESLALKGRPRAAMYGLIPEDFGAYAAPWVAELAAPLDCLKALHLRRMTVTDEDIAVLVRARGHMLQVLKLDKCSGFSTDALRLVARSCRSLRTLFLEECIIADEGSEWLHELAVNNSVLVTLNFYMTELKVEPADLELLARNCKSLISLKMSDCDLSDLIGFLQTSKALQEFAGGAFFEVGEYTKYEKVKLPPRLCFLGGLTFMGKNEMPVIFPYSASLKKLDLQYTFLTTEDHCQLIAKCPNLLVLEVRNVIGDRGLEVVADTCKKLRRLRIERGDDDPGQEEQGGVSQIGLTAVAVGCRELEYIAAYVSDITNGALESIGTFCKNMYDFRLVLLDKQNKITDLPLDNGVRALLRSCTKLRRFALYLRPGGLSDAGLGYVGQYSGNIQYMLLGNVGESDNGLIRFAMGCANLRKLELRGCCFSERALAVAVLQMPSLRYVWVQGYRASQTGRDLMLMARPYWNIEFVPPRPESACRVMADGQPCVDTHAQVLAYYSLAGRRPDCPRWLVTLHPA

SEQ ID NO: 6332 - protein, 616 aa, Zea mays
  Clone ID: PAT_MRT4577_84224C.1.pep
ISDEPAPRGSRFAPRSRPMGGEVPEPRRLSRALSFGCGGVPEEALHLVFGYMDDPRDREAASLVCRLWHRIDALSRKHVTVGFCYAVEPARLLARFPRLESLALKGRPRAAMYGLIPEDFGAYAAPWVAELAAPLDCLKALHLRRMTVTDEDIAVLVRARGHMLQALKLDKCSGFSTDALRLVARSCRSLRTLFLEECIIEDEGSEWLHELAVNNSVLVTLNFYMTELKVEPADLELLAKNCKSLISLKMGDCDLSDLIGFFQTSKALQEFAGGAFFEVGEYTKYEKVIFPPRLCFLGGLTFMGKNEMPVIFPYSTMLKKLDLQFTFLTTEDHCQLIAKCPNLSVLEVRNVIGDRGLEVVAATCKKLRRLRIERGDDDPGQEEQGGVSQIGLTAVAVGCRELEYIAAYVSDITNGALESIGTFCKNLYDFRLVLLDKQKKITDLPLDNGVRALLRNCVKLRRFAFYLRPGGLSDVGLGYIGLYSGNIQYMLLGNVGESDNGLIQFATGCTNLRKLELRGCCFSERALAVAVLQMPSLRYIWVQGYRASRTGQDLMLMARPYWNIEFAPPIPESAYRVMADGQPCVDTHAQVLAYYSLAGRRPDCPQWLVTLHPASL

SEQ ID NO: 6333 - protein, 101 aa, Zea mays
  unsure (1)..(101): unsure at all Xaa locations
  Clone ID: PAT_MRT4577_84251C.1.pep
QQLPFNQLAAAYPEEFLPFNHLAALNSPAYLQQQQLLPFSQLAGVSPAAFLTQPQLXPLSQHAAPKAGPLXRIVTIAPTQXLALTNPAVLHQQPIIGGALF

SEQ ID NO: 6334 - protein, 134 aa, Zea mays
  unsure (1)..(134): unsure at all Xaa locations
  Clone ID: PAT_MRT4577_84370C.1.pep
PGPSQRVSGEATTTFFNHHNEGRGDSPAASTGYSRVPIVVNRPPARASTERYIEGXRKEHQAPSSTLRRGRLPFAXRRLRTSYEXXTRRXKGTPSTAHKAPRSRXXGRLPRRAVGRRAATYFHEHPXRRRRDPQ

SEQ ID NO: 6335 - protein, 231 aa, Zea mays
  Clone ID: PAT_MRT4577_84406C.1.pep
MGRGKVQLKRIENKINRQVTFSKRRSGLLKKAHEISVLCDAEVALIIFSTKGKLYEYSTDSCMDKILERYERYSYAEKVLISAEYETQGNWCHEYRKLKAKVETIQKCQKHLMGEDLETLNLKELQQLEQQLESSLKHIRTRKSQLMVESISALQRKLAEKQKDQRQQVQRDQTQQQTSSSSMSFMLREAAPTTNVSIFPVAAGGRVVEGAAAQPQARVGLPPWMLSHLSC

SEQ ID NO: 6336 - protein, 304 aa, Zea mays
  unsure (1)..(304): unsure at all Xaa locations
  Clone ID: PAT_MRT4577_84407C.1.pep
MGRGKVQLKRIENKINRQVTFSKRRSGLLKKAHEISVLCDAEVALIIFSTKGKLYEYSTDSCMDKILERYERYSYAEKVLISAEYETQGNWCHEYRKLKAKVETIQKCQKHLMGEDLETLNLKELQQLEQQLESSLKHIRTRKSQLMVESISALQRKXLLSLLKLAVRTSSFKNCMISLAGHXGHGLLQVLTTLVALLHPQNISALALCCDALLPQEKSLQEENKVLQKELAEKQKDQRQQVQRDQTQQQTSSSSTSFMLREAAPTTNVSIFPVAAGGRVVEGAAAQPQARVGLPPWMLSHLSC

SEQ ID NO: 6337 - protein, 245 aa, Zea mays
  Clone ID: PAT_MRT4577_84409C.1.pep
MGRGKVQLKRIENKINRQVTFSKRRSGLLKKAHEISVLCDAEVALIIFSTKGKLYEYSTDSCMDKILERYERYSYAEKVLISAEYETQGNWCHEYRKLKAKVETIQKCQKHLMGEDLETLNLKELQQLEQQLESSLKHIRTRKSQLMVESISALQRKEKSLQEENKVLQKELAEKQKDQRQQVQRDQTQQQTSSSSTSFMLREAAPTTNVSIFPVAAGGRVVEGAAAQPQARVGLPPWMLSHLSC

SEQ ID NO: 6338 - protein, 245 aa, Zea mays
  Clone ID: PAT_MRT4577_84415C.1.pep
MGRGKVQLKRIENKINRQVTFSKRRSGLLKKAHEISVLCDAEVALIIFSTKGKLYEYSTDSCMDKILDRYERYSYAEKVLISAESETQGNWCHEYRKLKAKVETIQKCQKHLMGEDLETLNLKELQQLEQQLESSLKHIRTRKNQLMLESISELQRKEKSLQEENKVLQKELAEKQKAQRKQVQWGQTQQQTSSSSSCFVIREAAPTTNISIFPVAAGGRLVEGAAAQPQARVGLPPWMLSHLSS

SEQ ID NO: 6339 - protein, 245 aa, Zea mays; identical to SEQ ID NO: 6337
  Clone ID: PAT_MRT4577_84416C.1.pep

SEQ ID NO: 6340 - protein, 245 aa, Zea mays; identical to SEQ ID NO: 6337
  Clone ID: PAT_MRT4577_84417C.1.pep

SEQ ID NO: 6341 - protein, 264 aa, Zea mays
  Clone ID: PAT_MRT4577_84576C.1.pep
MRGTHSLLGRKKHDDDQEKKKQTDELATGMEKVTVSEPEKHGHKEEEHEVVGEKKEGLLAKLHRTSSSSSSSSDEEEEAIDENGEIIKRKKKKMGLKEKLKEKLPGHKDGHHTAAPSPAPAPVETHAHHQEEAHRPHVVPTPAPPPPPHVHQHDHGVVVQDDVKTGTPPHAPEEEKKGLLDKIKEKLPGGHNKKPEAAAAAAPAPPVHAPAPAPQAENVSSPDGKEKKGGLLGKIMDKIPGYHKSSAEEADHKADAAGEHRTSS

SEQ ID NO: 6342 - protein, 291 aa, Zea mays
  Clone ID: PAT_MRT4577_84578C.1.pep
MEDERNTQQHQGGEAQQDAADQVDVKDRGLLDSLLGRKKHDDDQEKKKQTDELATGMEKVTVSEPEKHGHKEEEHEVVGEKKEGLLAKLHRTSSSSSSSSDEEEEAIDENGEIIKRKKKKMGLKEKLKEKLPGHKDGHHTAAPSPAPAPVETHAHHQEEAHHRPHVVPTPAPPPPPHVHQHDHGVVVQDDVKTGTPPHAPEEEKKGLLDKIKEKLPGGHNKKPEAAAAAAPAPPVHAPAPAPQAENVSSPDGKEKKGLLGKIMDKIPGYHKSSAEEADHKADAAGEHRTSS

SEQ ID NO: 6343 - protein, 383 aa, Zea mays
  Clone ID: PAT_MRT4577_84736C.1.pep
MGVGKLMNDVKPYLAMVLLQVGFSGMYIVSVASLKRGMNHFVLVVYRNLVATVVMAPFALLFERRVRPKMTPLIFLKIMGLAVLEPVLDQNMYYLGAKLTSATFASALVNILPAITFLLALALRMERLRLRSLRSQAKVVGTVCTVAGAVLMILYHGPVVPFPWSAGRLHHHVPAAAVESQSSASWLNGICMIIGSCLCWSGFFILQSNTLQSYPAELTLTTLICFLGSVLTGGVALVAERRDMSAWVIGFDTRLFTAVYSGIVCSGVAFYVQGIVTQARGPVFVTAFQPLCMIITTVLGSTILKEETTLGSVIGAAIIVVGLYCLIWGKSKDHLGSNGGKPGAAAVAELPLTSSAPAWSNGKQALAVVETTPPSSLPNKCVH

SEQ ID NO: 6344 - protein, 361 aa, Zea mays
  Clone ID: PAT_MRT4577_84738C.1.pep
MGVGKLMNDVKPYLAMVLLQVGFSGMYIVSVASLKRGMNHFVLVVYRNLVATVVLAPFALLFERRVRPKMTPLIFLKIMGLAVLEPVLDQNMYYLGAKLTSATFASALVNILPAITFLMALVLRMERLRLRSLRSQAKVAGTVCTVVGAVLMILYHGPVVPFPWSAGHHQASAAAAAAAAESQSSASWLNGIVMIIGSCLCWSGFFVLQSNTLQSYPAELTLATLICFLGSVLTGGVALVAERHDMSAWVIGFDTRLFTAVYSGIVCSGVAFYVQGIVTQARGPVFVTAFQPLCMIITTVLGSTILKEETTLGSVIGAAIIVVGLYCLIWGKSKDHLGNGSKPAVAELPLTSAPNGGGTNG

SEQ ID NO: 6345 - protein, 97 aa, Zea mays
  unsure (1)..(97): unsure at all Xaa locations
  Clone ID: PAT_MRT4577_84900C.1.pep
MESSTMALSSTDFAGKAANVPSTSAFSEARVTMRKTALKDXSTTASGMPWYGPXDRVLYLGPLSGNAPSYLTXEFPGDYGWDTADLSYDPETVSENQ

SEQ ID NO: 6346 - protein, 122 aa, Zea mays
  Clone ID: PAT_MRT4577_84959C.1.pep
MSAMETDINAPPPPAPAGEGSSAAGPSSSRKPNKRFEIKKWNAVALWAWDIVVDNCAICRNHIMDLCIECQANQASATSEECTVAWGVCNHAFHFHCISRWLKTRQVCPLDNSEWEFQKYGH

SEQ ID NO: 6347 - protein, 144 aa, Zea mays
  unsure (1)..(144): unsure at all Xaa locations
  Clone ID: PAT_MRT4577_84993C.1.pep
LVLAALAAYSQEQQFXLPFNSTXALFFAFYLQHQQLPFSQLHAAYPQXFLPFNELAALNFPVYLQQQQLLPFSQQDGVSPATYLXQGQRLPFYQHDAPKAGYPLXQVEQLVAFXQLALPNPPAFYQHSIIGGGSFRFPIEGECQ

SEQ ID NO: 6348 - protein, 1059 aa, Zea mays
  Clone ID: PAT_MRT4577_85039C.1.pep
MAGNDWINSYLEAILDAGGAAGDLSAAAGSGDGRDGTAVEKRDKSSLMLRERGRFSPARYFVEEVISGFDETDLYKTWVRTSAMRSPQERNTRLENMSWRIWNLARKKKQIEGEEASRLSKQRMEFEKARQYAADLSEDLSEGEKGETNNEPSIHDESMRTRMPRIGSTDAIDTWANQHKDKKLYIVLISIHGLIRGENMELGRDSDTGGQVKYVVELARALGSTPGVYRVDLLTRQISAPDVDWSYGEPTEMLSPISSENFGLELGESSGAYIVRIPFGPRDKYIPKEHLWPHIQEFVDGALVHIMQMSKVLGEQIGSGQPVWPVVIHGHYADAGDSAALLSGALNVPMVFTGHSLGRDKLDQILKQGRQTRDEINATYKIMRRIEAEELCLDTSEIIITSTRQEIEQQWGLYDGFDLTMARKLRARIRRGVSCFGRYMPRMIAIPPGMEFSHIAPHDVDLDSEEGNGDGSGSPDPPIWADIMRFFSNPRKPMILALARPDPKKNITTLVKAFGEHRELRNLANLTLIMGNRDVIDEMSSTNAAVLTSALKLIDKYDLYGQVAYPKHHKQSEVPDIYRLAARTKGVFINCALIEPFGLTLIEAAAYGLPMVATRNGGPVDIHRVLDNGILVDPHNQNEIAEALYKLVSDKHLWSQCRQNGLKNIHKFSWPEHCQNYLARVVTLKPRHPRWQKNDVAAEISEADSPEDSLRDIHDISLNLKLSLDSEKSGSKEGNSNALRRHFEDAAQKLSGVNDIKKDVPGENAKWSSLRRRKHIIVIAVDSVQDADFVQVIKNIFEASRNERSSGAVGFVLSTARAISELHTLLISGGIEASDFDAFICNSGSDLCYPSSSSEDMLNPAELPFMIDLDYHSQIEYRWGGEGLRKTLIRWAAEKNKESGQKIFIEDEECSSTYCISFKVSNTAAAPPVKEIRRTMRIQALRCHVLYSHDGSKLNVIPVLASRSQALRYLYIRWGVELSNITVIVGECGDTDYEGLLGGVHKTIILKGSFNTAPNQVHANRSYSSQDVVSFDKQGIASIEGYGPDNLKSALRQFGILKD

SEQ ID NO: 6349 - protein, 152 aa, Zea mays
  unsure (1)..(152): unsure at all Xaa locations
  Clone ID: PAT_MRT4577_85042C.1.pep
FSLSASAATATGFPQCXQGAIACLVPPYLXPAGSSGCENPILEPYRIQQAIGTSILPLSPLCLQQPXGLLQHLPLLHSVAQNMKAQQLQQLVLGNLAAYSQEQQFVPFNQLAALNSAAYVRQQLPFSQLADAYPQQFLPLNQLAAVNSAAYL

SEQ ID NO: 6350 - protein, 77 aa, Zea mays
  Clone ID: PAT_MRT4577_85072C.1.pep
MSARGKEGKALGKAGPKRHRRVLRNTIQGLTNPAIRRLPPRAGLNPISGLIYKETRGVLKIFLENVIRNAVTYTEHA

SEQ ID NO: 6351 - protein, 275 aa, Zea mays
  Clone ID: PAT_MRT4577_85143C.1.pep
MAPAAPYGGAESQRQADLLKQEGNAFFRKERLSAAIDAYTGAITLCPNVAVYWTNRALCYRKRNEWTRVEEDCRTAIQLDSQSVKAHYMLGLSLVNSQRLSEGIKSLEKSLELGRGAHPASYMVEEIWQELSKAKYIEWESLSRDRTCQLQKLKVACKEALTSYNSLDNPAAGAPVEQLNELEEVFKKAAKTDTPAEVPDHLCCKITLDIFRDPVITPSGITYERAVLLDHLQTVGRFDPVTREALEPHQLVPNLAIKEAVHAFLSEHGWAYKIR

SEQ ID NO: 6352 - protein, 74 aa, Zea mays
  unsure (1)..(74): unsure at all Xaa locations
  Clone ID: PAT_MRT4577_85159C.1.pep
MAAADVEYRCFSCGLAWATSNESLENAFAFYGEILDSNVITDRETGXSVSYGFFTFSFENSMLVAIVIIICNGV

SEQ ID NO: 6353 - protein, 30 aa, Zea mays
  Clone ID: PAT_MRT4577_85189C.1.pep
KGGFLPSRLIWVRQGFSSPDVVKPRPVNLI

SEQ ID NO: 6354 - protein, 210 aa, Zea mays
  unsure (1)..(210): unsure at all Xaa locations
  Clone ID: PAT_MRT4577_85206C.1.pep
MAEVEAPAAAVAAATPEVATVTEGGAATEAKGPHKLHRQWTFWYDIQSKPKPGAAWGTSLXXAYTFDTVEEFWGLYDHVFRPSKLPGTADFHLFKAGVEPKWEDPECANGGKWTVPCNRKPTFETMWLETLMALVGEQFDETDDICGIVASVRPRGDKLALWTRTASNEAVQVNIGKKWKDVIDYNDKITYTFHDDSRRDKPSRGGRYTV

SEQ ID NO: 6355 - protein, 216 aa, Zea mays
  Clone ID: PAT_MRT4577_85208C.1.pep
MAEVEAPATAVEAPAAAVATTTPEVAAPEAGAATEAKGPHKLHRQWTFWYDIQTKTKSGAAWGTSLKKAYTFDTVEEFWSMYDQIFRPSKLSGNADFHLFKAGVEPKWEDPECANGGKWTVPCNRKATFETMWLETLMALIGEQFDETEDICGIVASVRARGDKLALWTRTASNEAVQVNIGKKWKDVIDYNDKITYTFHDDSKRDKPSRGGRYTV

SEQ ID NO: 6356 - protein, 210 aa, Zea mays
  Clone ID: PAT_MRT4577_85212C.1.pep
MAEVEAPAAAVAAATPEVATVTEGGAATEAKGPHKLHRQWTFWYDIQSKPKPGAAWGTSLKKAYTFDTVEEFWGLYDHVFRPSKLPGTADFHLFKAGVEPKWEDPECANGGKWTVPCNRKPTFETMWLETLMALVGEQFDETDDICGIVASVRPRGDKLALWTRTASNEAVQVNIGKKWKDVIDYNDKIIYTFHDDSRRDKPSRGGRYTV

SEQ ID NO: 6357 - protein, 112 aa, Zea mays
  Clone ID: PAT_MRT4577_85296C.1.pep
SLLSVFLTHYPEPCCHESEPQRVRGEAAQIRLRPVQLRPIDIKINRQVTFCKRLNGLLNKAHQISLLCDAEVALIVFFTKGKLYEYSSHSNMEGILERYQRYSFEERATLNP

SEQ ID NO: 6358 - protein, 41 aa, Zea mays
  Clone ID: PAT_MRT4577_85406C.1.pep
MSSIGQSFYAGDAEAEGEYHVEHAVECVNDTAGAADDISQV

SEQ ID NO: 6359 - protein, 105 aa, Zea mays
  unsure (1)..(105): unsure at all Xaa locations
  Clone ID: PAT_MRT4577_8543C.1.pep
MGRGLVELKRVENKINRQVTFAXRLNGLLKKAYDLSVLCDAHIXLIFFSNRGKLYKFCIVPSITRTLERYXKNNYAGPHTAVQNTXNDLTHNTPNEYLKLKAKVD

SEQ ID NO: 6360 - protein, 277 aa, Zea mays
  Clone ID: PAT_MRT4577_85444C.1.pep
MRTPIGNPPKIPFSQSPLPVPDLVHSHSRNPAAPRLMASCGAGDAASAQPRASISHVIFDMDGLLLDTEGFYTEVQEKILARYDKVFDWSLKAKMMGKKAAESARIFVDECGLNGLLTPEQFLEERESMLQALFPSCTRLPGVLRLVHHLHANGVPMAVATGSHKRHFALKTQNHQEMFSLMHHVVMGDDPEVKAGKPSPDIFLAAMRRFEGGVEPSKCLVFEDAPSGVAAAKNAGMSVVMVPDPRLDVSYHKGADQVLSSLLDFKPAEWGLPAFKE

SEQ ID NO: 6361 - protein, 359 aa, Zea mays
  Clone ID: PAT_MRT4577_85466C.1.pep
MEEITQHFGVGASSHGHGHGQHHHHHHHHHPWASSLSAVVAPLPPQPPSAGLPLTLNTVAATGNSGGSGNPVLQLANGGGLLDACVKAKEPSSSSPYAGDVEAIKAKIISHPHYYSLLTAYLECNKVGAPPEVSARLTEIAQEVEARQRTALGGLAAATEPELDQFMEAYHEMLVKFREELTRPLQEAMEFMRRVESQLNSLSISGRSLRNILSSGSSEEDQEGSGGETELPEVDAHGVDQELKHHLLKKYSGYLSSLKQELSKKKKKGKLPKEARQQLLSWWDQHYKWPYPSETQKVALAESTGLDLKQINNWFINQRKRHWKPSEEMHHLMMDGYHTTNAFYMDGHFINDGGLYRLG

SEQ ID NO: 6362 - protein, 117 aa, Zea mays
  unsure (1)..(117): unsure at all Xaa locations
  Clone ID: PAT_MRT4577_85513C.1.pep
MHIIVPTMAAKLFXLLMLLGLSASAASGTMFPQCSQATIAFLLPAYLLPAASLRCENHXFQPYGIQQAIGAGIXPLSPLLLQHXYTLLQQCPSVHXLAQNIKAQQLQQLVLANLADY

SEQ ID NO: 6363 - protein, 306 aa, Zea mays
  Clone ID: PAT_MRT4577_85555C.1.pep
MEGNAAAGKRSRTETANGAAGGGKRSKDMESFQTGLSSKSKPCNKFFSTIGCPFGEGCRFLHFVPGGYPAVAKMLNLGSPAVSAPSRTHVDHAALTGASHSASSGKTRMCTKYNTTEGCRFGDKCHFAHSERELGKPAYMPYGEPPMGGRFGGRPEPVQPAAMGPPAGNFGASATAKISVDASLAGGIIGKGGVNTKQISRVTGVKLCIRDHESSPNLKNIELEGNFDQIKQAGEMVRDLIATISTSMLAKNSSAAVAPSGGRGGGLGGKSNYKTKLCENFVKGACTFGERCHFAHGENEQRRGAV

SEQ ID NO: 6364 - protein, 68 aa, Zea mays
  Clone ID: PAT_MRT4577_85632C.1.pep
PAREEHKTGGILDRSGGSSSSSPEDDGLGGRRKTGLKENIKEKLPGGHKDHQHATATTGGAYRQHGHT

SEQ ID NO: 6365 - protein, 55 aa, Zea mays
  Clone ID: PAT_MRT4577_85749C.1.pep
MNSRRSLLSSPLFASSSPNLRSSASVYSSPSPSRTTVPMIHDTSSRRAFTACHYW

SEQ ID NO: 6366 - protein, 162 aa, Zea mays
  unsure (1)..(162): unsure at all Xaa locations
  Clone ID: PAT_MRT4577_85964C.1.pep
LSPMVCSVCENPILXPYTIQQAIAAVILPLSPLFLQHSSDLLQKIPLGHLXSXNIRAQQLQQLVLSNLVVYSQKQKILSFNQLYALNSAFYLRQQQLPFRQLYVVYTQQFFLFYQLTALNSPAYLQQQQLLSFSHLSVVRPAIFLTQTHMLSLYQNAVPIAV

SEQ ID NO: 6367 - protein, 88 aa, Zea mays
  unsure (1)..(88): unsure at all Xaa locations
  Clone ID: PAT_MRT4577_85988C.1.pep
LFPIRRVHTSASLRSRWRAAGEKKMITLKSSDGEEFEVXEEAVAMDSQTIRHMIEDDCADNGIPLSNVNFKILSKVIEFCNKHVHCLV

SEQ ID NO: 6368 - protein, 62 aa, Zea mays
  unsure (1)..(62): unsure at all Xaa locations
  Clone ID: PAT_MRT4577_86049C.1.pep
RKKLKASSRRGGRACGRXRRRRGRYCRGRRSRPRGTRGPWCARGGRXGRXRGRARGGCWWWA

SEQ ID NO: 6369 - protein, 348 aa, Zea mays
  Clone ID: PAT_MRT4577_8623C.1.pep
MVTPYLPSSHNHRRRLPILLKIGFLLMMGENKLMGKRWEDMDTDVLVKIFKELNLVELSPVSQVCRLWRLACSDPLIWGTLDFGLLKSNFIQTRASPYIWVDDRSDRRLARILRVAMAISCGNVNCMIFHYNLFMKDEHLHFISERSPHLKRLVMPAWNRITKVGICNAIQRWQALESLTMPTIGHPPYIMEEIARSCKNFTELKIMGSFDQQFASAILQFLPKLKVLSLRCSKVSMDALQCLLNSMEYLEVLNISHCLLLVVAANGRKQVVHELDSQILERASRLREFHYCQSRLCVACQRMVVDEGIMRWYRYEDWFWRRDEVRSLDLQDYGKLFDVGCERLTSVD

SEQ ID NO: 6370 - protein, 191 aa, Zea mays
  unsure (1)..(191): unsure at all Xaa locations
  Clone ID: PAT_MRT4577_86264C.1.pep
MSLLRRLLLDPAEPVIIMCGLARSTTFKSKGDAAACMRXPQNAGTARNNGFIVIKNRPXKGVEVSTSXTGKNGHAKCHFVGIDIFNGQELEDIDPSSHNXDIPHAHRTEYQLXIDISHDGLDILLTSNGNTKEDLRLPTDDTLGCQIDERFASVHDPGENVQTAMEEEHICALNDEVPDQLPCLGILYLLT

SEQ ID NO: 6371 - protein, 86 aa, Zea mays
  unsure (1)..(86): unsure at all Xaa locations
  Clone ID: PAT_MRT4577_86377C.1.pep
PISTHAYGEHTKHISVLTFSAKIFCFRMVLDLSASAATATILPQCSQAPIASFLSPYLSPSVSSVCANPILXPYSIQQAFXARILP

SEQ ID NO: 6372 - protein, 253 aa, Zea mays
  unsure (1)..(253): unsure at all Xaa locations
  Clone ID: PAT_MRT4577_86526C.1.pep
WLVEVSDEYKLVADTLYLTVYLIDQFLSQNCIQTHKLQLLGITSMLIASKYEEYSAPSAEEFCNITAGTYAKAEVLEMEQQVLNDLGFHLSVPTTNTFLRRFLRAAQASRTVRSVPKPHCNESFQSICIVLNTKLAXHFQAHLTTLNYLASYLAELTLISYDFMKFLPSEVAASSIFLAKWTLDQSDHPWNPTLEHYTSYKSFDIRTCVRALQELQHNTSNCPLNAIREKYGQQKFECVANLRSPELLRSLFS

SEQ ID NO: 6373 - protein, 649 aa, Zea mays
  unsure (1)..(649): unsure at all Xaa locations
  Clone ID: PAT_MRT4577_86577C.1.pep
MSRDLDCPVQTQMAVAVLDRSFSSEYPGGSRIEGRQLSWKRVFVQTDNGSVLGIELERGENVQTVKKKLQIALNVPTDESSLTFGDLVLNNDLSSIRNDSPLFLKRNQIHRSNSTPCLSPTGKNVLQRDRSGPIEILGCSSPSSRMKQLAKDVIKAIMNDVDPVAVNSGMGGAYYFKNIWGERVAIVKPTDEEPFAPNNPKGFVGKALGQPGLKRSVRVGETGFREVAAYLLDYGHFANVPPTMLVKITHTIFNVNDCVGCKSKVFCNKSEAVSKIASLQEFIPHDFDASDHGTSSFPVSAVHRIGILDIRIFNTDRHAGNLLVKKLGPGADNFGEQTELIPIDHGLCLPECLEDPYFEWIHWPQASVPFSEEELEYIARLDPVKDAEMLRMELPMIRDACLRVLVLSTVFLKEAAASGLCLSEIGDMMSRQFTAKEEEPSQLELLCMEARKWVEERESFLPNEAGVEDDDDDFTQFLIDDEDDYPDALEPSAFCKFGSMKASSRNPLSKLDERDEEDGDGTEEDDDDDILTGALPQRISSISKLSSSMKGLXSLGNPSPTARAFGRVKRQAELSXGKASEHQSGSRSANELLPPSASFVKLSDMSPKQWSAFLDKFQELLPGALSARKHAAGVVGQRSMPRLGTSCQF

SEQ ID NO: 6374 - protein, 588 aa, Zea mays
  Clone ID: PAT_MRT4577_86650C.1.pep
MQAPEQQQQHQQRQRKGSSEMDFFSEYGDANRYKIQEVIGKGSYGVVCSAVDQHTGDKVAIKKIHNIFEHLSDAARILREIKLLRLLRHPDIVEIKHIMLPPSRRDFKDIYVVFELMDTDLHQVIKANDDLTREHHQFFLYQMLRALKYIHTANVYHRDLKPKNILANANCKLKICDFGLARVAFNDTPTTVFWTDYVATRWYRAPELCGSFFSKYSPAIDIWSIGCIFAEILTGKPLFPGKNVVHQLDLMTDLLGTPSLDTVSRIRNEKARRYLSSMRKKQPVPFTEKFPKADPAALKLLQRLLAFDPKDRPTAEEALADPYFKGLAKVEREPSCQPITKMEFEFERKKATKEDVKELIFREILEYHPQLLKDYMNGTEKTNFLYPSAVDNFRRQFANLEENGGKSGAHAASSDRKHVSLPRTTTVHSNPIPPNGTSQVPQKIPTGRPGRVVGPVIPFENAAAVDPYSQRRVSRNPVLPPTTSNMSAYAYHRKSDNSDRELQQELEKDRMQYQPAQRFMDAKVVSQMSPDLRSSYYIPKGVPKADPADRTALHSSMIHGIAPFSGIAAVGGGYNKVNAVQYGVSRMY

SEQ ID NO: 6375 - protein, 70 aa, Zea mays
  Clone ID: PAT_MRT4577_8668C.1.pep
KAPGDSLRVQRPIKIQFGDLPETRGGFIGYYVPQFRVQLLRKKKRSLCLEILGNPNHARIFFQSPPHTLF

SEQ ID NO: 6376 - protein, 121 aa, Zea mays
  unsure (1)..(121): unsure at all Xaa locations
  Clone ID: PAT_MRT4577_86803C.1.pep
MSDSEEHYFESKTDAGEFKTYPXQADTVRKNDFIVIKTRPCKAVQVSTSKTGKHGHDKCHFVAIYIFDGKKLEDSVPSSHNXEVPHANRTEHTVIDISEDGLLSLLTSDVHTKDDLTLASD

SEQ ID NO: 6377 - protein, 107 aa, Zea mays
  unsure (1)..(107): unsure at all Xaa locations
  Clone ID: PAT_MRT4577_86949C.1.pep
QPTRPRTRPLLPPIFASDESTSCSQWNTAMEKRTRWTRQEVVGNFRIGDVFGNCCRLNGLHALTXFTVVTHNAIDRHDSEKFPFSIFDKNGKXVHALSTATTLSNTD

SEQ ID NO: 6378 - protein, 364 aa, Zea mays
  Clone ID: PAT_MRT4577_87182C.1.pep
MASMESLIGMMNRIQRACTALGDHGGGSDLPTLWESLPTIAVVGGQSSGKSSVLESIVGTDFLPRGSGIVTRRPLVLQLQQTEDGSQEYAEFLHMPKRRFSDFALVRQEIADETDRLTGKTKQISPVPIHLSIYSPKVVNLTMIDLPGLTKVAVEGQSESIVQDIENMVRSYVDKPNCIILAISPANQDIATSDAIKLSKEVDPTGERTFGVLTKLDLMDKGTNALDVLEGRAYRLQNPWVGIVNRSQADINRKVDMISAREKEREYFETSPDYAHLSSRMGSGYLAKLLSQHLESVIKAHIPSITATINKTIDELESELDIIRRAVAADPGAQLDTILDLCRAFDRVFKEHLDGGRSGGDRIY

SEQ ID NO: 6379 - protein, 130 aa, Zea mays
  unsure (1)..(130): unsure at all Xaa locations
  Clone ID: PAT_MRT4577_87375C.1.pep
DLLCRHALTLHVGMQMLVYHIVGGTLMARQLWTSGVGXDVXRSNAWVLALCICLYFAWLAWSWRPLGWLIPSEVLVLXVRSAGQSMRLCVNRLLTFMIGHALLSMLGSLKFRLFYVLPGWMFIMTTFNRH

SEQ ID NO: 6380 - protein, 146 aa, Zea mays
  unsure (1)..(146): unsure at all Xaa locations
  Clone ID: PAT_MRT4577_87463C.1.pep
LVAQYIRALRLQHRVLANLAAYSQXQHQFLPLVQLAALTCAAYLQQPVPFSQVPAAYPQQFLPFNPLAAFSSAAYXHHHQLLPFSQLTDVNPPAFLTQRQLFPFYHLAMPNAGPLIQLHQLLPFNQLALANPPVFCQRPIIGGALF

SEQ ID NO: 6381 - protein, 298 aa, Zea mays
  Clone ID: PAT_MRT4577_87571C.1.pep
MPRSGGGGNGGGISSSSRVMPNLPAGFRFHPTDEELMVHYLMRQAASMPCPVPIIAEVNIYQCNPWDLPAKALFGDKEWFFFSPRDRKYPNGARPNRAAGSGYWKATGTDKAILSSSTPTSHGGANIVVGVKKALVFYGGRPPKGTKTDWIMHEYRLSGAADDDCKGSTRRRVSSSSSSSMRLDDWVLCRIHKKSNDFQLSSSSEHEHEQEEPAAGGSATTVEELDALVVVDNSSSSDTTTTTITTNDNNSTETAATHHDPQTMMMLSKSCSLTDLLDSIDYAALLADAPPRRAPPPR

SEQ ID NO: 6382 - protein, 208 aa, Zea mays
  unsure (1)..(208): unsure at all Xaa locations
  Clone ID: PAT_MRT4577_87573C.1.pep
MPSGGNGGGSGSSRSRVMPNLPAGFRFHPTDEELMVHYLMRHAASMPCPVPIIAEVNIYQCNPWDLPAKALFGDKEWFFFSPRDRKYPNGARPNRAAGSGYWKATGTDKAILXRRRRPRPRATAAPNVVVGVKKALVFYGGRPPKGTKTDWIMHEYRLSGAADDDCKGSTRRRAPSLLVVLHEAGTNWVAVQDPQEEHGFPCRSSEHE

SEQ ID NO: 6383 - protein, 510 aa, Zea mays
  Clone ID: PAT_MRT4577_87628C.1.pep
MAQLAVRSLLLSLLLVSPVVASPGIVKLNSSSTLFGIEFPPFNTAVAATGCDSKLVAADEAGDEQKQPASSSPSLQLRMKHRSAEGGRTRKESFLDKAEKDAVRIETMHRRAARSGVARMPASSSPRRALSERMVATVESGVAVGSGEYLIDVYVGTPPRRFRMIMDTGSDLNWLQCAPCLDCFEQRGPVFDPAASSSYRNVTCGDQRCGLVAPPEAPRACRRPAEDSCPYYYWYGDQSNTTGDLALESFTVNLTAPGASRRVDGVVFGCGHRNRGLFHGAAGLLGLGRGPLSFASQLRAVYGHTFSYCLVEHGSDAGSKVVFGEDYLVLAHPQLKYTAFAPTSSPADTFYYVKLKGVLVGGDLLNISSDTWDVGKDGSGGTIIDSGTTLSYFVEPAYQVIRQAFVDLMSRLYPLIPDFPVLNPCYNVSGVERPEVPELSLLFADGAVWDFPAENYFVRLDPDGIMCLAVRGTPRTGMSIIGNFQQQNFHVVYDLQNNRLGFAPRRCAEV

SEQ ID NO: 6384 - protein, 134 aa, Zea mays
  unsure (1)..(134): unsure at all Xaa locations
  Clone ID: PAT_MRT4577_87657C.1.pep
AIAAGMLPLSPLLLQQSSVLLQQLPGAHXLAQNIMAQQLQQLELANLAGYSXKQQTIPFNQLGSWNSACYVQQQQLPFSQIPAGYRQQFXLPSNQIAGLNFPAYIQQQQLLPFSQLAGVSHDAFLTQPQVVPCY

SEQ ID NO: 6385 - protein, 285 aa, Zea mays
  unsure (1)..(285): unsure at all Xaa locations
  Clone ID: PAT_MRT4577_87713C.1.pep
AFAPVSAHSDASLLESQEALDVSSTLSNEEDERATHGTVSIECDGDEAETVSKRRKLELDALEATLTATTSTTSTIDMGPAASRAVREPRVVVQTTSEVDILDDGYRWRKYGQKVVKGNPNPXVRKHVERASHDLKSVITTYEGKHNHEVPAARNSGQGSSSAPSASQAGGSHRRQEPAQASFAHFGTASFSSFGLPPXWSVGTNNWQFRLRDGSPRHDDPSXSLGSLAPVKMVGNSSAMQGYPGLMVPGEPKVEPVSQPLIQMANASPPAYQQILSRPPFGHQM

SEQ ID NO: 6386 - protein, 222 aa, Zea mays
  Clone ID: PAT_MRT4577_87716C.1.pep
SVPASSRAVREPRVVVQTTSEVDILDDGYRWRKYGQKVVKGNPNPRSYYKCTHPGCSVRKHVERASHDLKSVITTYEGKHNHEVPAARSSGQGSSGSGSGPSAPQAGGSHRRQEPAQASFAHFGTSPFSSFGLAPSGQLGPTTGNFRFGMVPPGATIPMPSLGSLAPTKMIGNPSAMQGYPGLMMPGEPKVEPFSRPHFPTSIAPPPAYQQILSRPPFGHQM

SEQ ID NO: 6387 - protein, 250 aa, Zea mays
  unsure (1)..(250): unsure at all Xaa locations
  Clone ID: PAT_MRT4577_87719C.1.pep
MGPASSRAVREPRVVVQTTSEVDILDDGYRWRKYGQKVVKGNPNPRSXSLPFLTLNDXCIPPSPEASNIDSLACRSYYKCTHPGCSVRKHVERASHDLKSVITTYEGKHNHEVPAARSSGQGSSGSGSGPSAPXLVVLTVGKNLHKPASLTLVHLLSXFGLAPSGQLGPTTGNFRFGMVPPGATIPMPSLGSLAPTKMIGNPSAMQGYPGLMMPGEPKVEPFSRPHFPTSIAPPPAYQQILSRPPFGHQM

SEQ ID NO: 6388 - protein, 567 aa, Zea mays
  unsure (1)..(567): unsure at all Xaa locations
  Clone ID: PAT_MRT4577_87724C.1.pep
MSGASNYGSLIDEWLPPPTPSPRTLMSSFLNEEFSSAPFSGPHDQSEKSREVLNSSDEVPSHAVKGLFQNGFSNLFSAKSNSNGGLAERRAARAGFSVPKIDTSRVGSSTVIRSPVSIPPGLSPTTLLESPVFLYNKMAQPSPTTGTLPFLMATNDKSTISPAAKITEDSTFDNDVFSFQPHLGSEQTGFSTAEKKKRKSPKKQSLSNIHQQESSLQSSFTAVKDNTSATIVKAKPSSSSMFSDSHYSADQQQADETNIKVQGKGVEARSAAFAPVSAHSDASLLESQEALDVSSTLSNEEDERATHGTVSIECDGDEAETVSKRRKLELDALEATLTATTSTTSTIDMGPAASRAVREPRVVVQTTSEVDILDDGYRWRKYGQKVVKGNPNPRSYYKCTNPGCSVRKHVERASHDLKSVITTYEGKHNHEVPAARNSGQGSSSAPSASQAGGSHRRQEPAQASFAHFGTASFSSFGLPPXWSVGTNNWQFRLRDGSPRHDDPSXSLGSLAPVKMVGNSSAMQGYPGLMVPGEPKVEPVSQPLIQMANASPPAYQQILSRPPFGHQM

SEQ ID NO: 6389 - protein, 67 aa, Zea mays
  Clone ID: PAT_MRT4577_87804C.1.pep
LHILLRFGARMVLELWEQATHGCHRDGTGRRRGSKAGPGRDTHWKFQCELLSLYYVIGEECCWLIVS

SEQ ID NO: 6390 - protein, 232 aa, Zea mays
  unsure (1)..(232): unsure at all Xaa locations
  Clone ID: PAT_MRT4577_87810C.1.pep
EPAGLLPGGYXAVSEMTNLGGATIAPPGGMMMDGPPTPIVKTRLCNKYNTAEGCKWGDRCHFAHGERELGKSMMDNYMPPPIGPPPTGYFAPPPMAPPPMAPPPMAPPPMAPPPMAPPPMAPPPMAPPPMAPLPMAPPPMAPPPMAPPPMAPPPMAPLPMAPPPMAPPPMAPPPMAPPPMAPPPMAPPPMANPGLATPASFGAYATAKISVDASLAGGIIGKGGANIKQISS

SEQ ID NO: 6391 - protein, 358 aa, Zea mays
  Clone ID: PAT_MRT4577_87811C.1.pep
MDGSRKRVDAEDVKGDSTGGKRLRASESFQSGVGSKVKLCTNFFSTYGCPFGEGCHFVHYFPGDYRAVSEMTNLGGATIAPPGGMMMDGPPTPIVKTRLCNKYNTAEGCKWGDRCHFAHGESELGKSMMDNYMPPPIGPPPTGYFAPPPMAPPPMAPPPMAPPPMAPLPMAPPPMAPPPMAPPPMAPPPMAPLPMAPPPMAPPPMAPPPMAPPPMAPLPMAPPPMAPPPMANPGLATPASFGAYATAKISVDASLAGGIIGKGGANIKQISSVTGAKVVIQEDRHESDTSLKNIEFEGTFDQIRNASAMVIELIVSISGIGSNFKTKMCENFAKGSCSYGGKCHFAHGESELRKPAAA

SEQ ID NO: 6392 - protein, 65 aa, Zea mays
  Clone ID: PAT_MRT4577_88005C.1.pep
MALFVEKTLSGPEYKVKDLLQADFGRLEIELAEVEMPGLMACRAQFGPFKPFAGARILGAFYMTH

SEQ ID NO: 6393 - protein, 158 aa, Zea mays
  unsure (1)..(158): unsure at all Xaa locations
  Clone ID: PAT_MRT4577_88118C.1.pep
GLSASADTAAIFAQCSQASIAFFVAPYLXPAVFSVCENPILQPYRIQQAVASGILPXQPXLLQERSDLLQELPLVHTWAHNIKAQQLQQLVLGNLADYSQKQQFLAFNQLAALNSAAYLQQQLPFSQVAAAYPQQFLPFNQLAALNYAAYIQQQQLPP

SEQ ID NO: 6394 - protein, 58 aa, Zea mays
  Clone ID: PAT_MRT4577_88143C.1.pep
SCLLTYSDRSSGGHPGKFTCLRTTNFHNNSWGGVLHRKPKRHPRNCDDLKSHPSEAPW

SEQ ID NO: 6395 - protein, 148 aa, Zea mays
  unsure (1)..(148): unsure at all Xaa locations
  Clone ID: PAT_MRT4577_8821C.1.pep
LPEVPLVHLYGAKMRAQQLQQLVLANLGAYFXQQEFLPFNQLGSLNSGSYLQQQQLPFSQVPGGYPQQFLPFNQLAALDSPAYLQEQPLLPFSQLAGVSPGSFLTQPQLVAVYQDGGPKACPLLQLXQLLALKQHGLAKPEGGTDDSS

SEQ ID NO: 6396 - protein, 116 aa, Zea mays
  Clone ID: PAT_MRT4577_8822C.1.pep
RRSSLLLTPTARRIHADVACGVLILVVQDFFSDTQILTNHSGLLLPDDRPAYPFLLIALLPPSTALGSDPPAPMAALTAADASPGSDIDGEGYENRLEITFCDAPVFADPHGRGLR

SEQ ID NO: 6397 - protein, 527 aa, Zea mays
  Clone ID: PAT_MRT4577_88255C.1.pep
MHSTNLLLEEPIRMASILEPSKPSYFPAMTKIVGTLGPKSRSVDTISACLKAGMSVARFDFSWGDAAYHQETLENLKLSIKSTKKLCAVMLDTVGPELQVVNKSETPISLEENGTVVLTPHRGQDASSSLLPINFSGLAKAVTPGATIFVGQYLFTGSETTSVWLEVSEVKGDDVVCIIKNTATLAGSLFTLHCSQIHIDLPTLSDEDKDVIRKWGTPNKIDFLSLSYTRHAEDVRQAREFLSKLGDLSQTLIFAKIENVEGLNQFDEILAEADGIILSRGNLGIDLPPEKVFLFQKSALHKCNMAGKPAVVTRVVDSMTDNLRPTRAEATDVANAVLDGSDAILLGAETLRGLYPVETISTVGRICAEAEKVFNQDLYFKQTVKYVGEPMTHLESIASSAVRAAIKVKASVIICFTSSGRAARLIAKYRPTMPVLSVVIPRLKTNQLRWSFTGAFEARQSLIVRGLFPMLADPRHPAESTSNTNESVLKVALDHGKACGVIKSHDRVVVCQKVGDSSVVKIIELDD

SEQ ID NO: 6398 - protein, 528 aa, Zea mays
  unsure (1)..(528): unsure at all Xaa locations
  Clone ID: PAT_MRT4577_88257C.1.pep
MHSTNLLLEEPIRMASILEPSKTSFFPAMTKIVGTLGPKSRSVDTISSCLKAGMSVARFDFSWGDAAYHQETLENLKLAIKSTKKLCAVMLDTVGPELQVVNKSETPISLEENGTVVLTPHQGQEASSTLLPINFDGLAKALTPGATIFVGQYLFTGSETTSVWLEVSEVKGDDVVCIIKNTATLAGSLFTLHCSQIHIDLPTLSDEDKDVIKKWGAPNKIDFLSLSYTRHAEDVRQAREFLSKLGDLSQTQIFAKIENVEGLNHFDEILAEADGIILSRGNLGIDLPPEKVFLFQKSALHKCNMAGKPAVVTRVVDSMTDNLRPTRAEATDVANAVLDGSDAILLGAETLRGLYPVETISTVGRICAEAEKVFNQDLYYKRTVKYVGEPMTHLESIASSAVRAAIKVKASVIICFTSSGRAARLIAKXYRPTMPVLSVVIPRLKTNQLRWSFTGAFEARQSLIVRGLFPMLADPRHPAESTSNTNESVLKVALDHGKACGVIKSHDRVVVCQKVGDSSVVKIIELDD

SEQ ID NO: 6399 - protein, 73 aa, Zea mays
  unsure (1)..(73): unsure at all Xaa locations
  Clone ID: PAT_MRT4577_88302C.1.pep
MAGRGKAIGAGAAKKATSRSSKAGLQFPVXRIARFLKAGKYAERVGVGAPVXLXAVLEYHAXEVLXLAGNAAR

SEQ ID NO: 6400 - protein, 132 aa, Zea mays
  unsure (1)..(132): unsure at all Xaa locations
  Clone ID: PAT_MRT4577_88348C.1.pep
SFLGLGMTTYTGWYLTIAAAVHGQVPGVTHSGPSKLVPYFTGATNILYTFGGHAITVEIMHAMWKPRKFKYIYLLATLYVFTLTLPSAAAMYWAFGDQLLTHSNAFSLLPRTPWRDAXVVLMLVHQFITFGF

SEQ ID NO: 6401 - protein, 63 aa, Zea mays
  unsure (1)..(63): unsure at all Xaa locations
  Clone ID: PAT_MRT4577_88697C.1.pep
MSCSCGSSCNCGSSCKCGKKYPDLEEKSTAAQATVGGGGAPEKTAAAEFEAGAESXAETSHGC

SEQ ID NO: 6402 - protein, 119 aa, Zea mays
  Clone ID: PAT_MRT4577_88720C.1.pep
QLAGGGSGESPEFSEATVSEVVSTGQTECGEYKKEGQQHKHKQHLGEAGAIAAGAFALYEKPGAKKDPERAPRLKIEQEVAEAAAVGSGGFAFREHHPQNKGRKDAQEAVGAKKLHFLG

SEQ ID NO: 6403 - protein, 450 aa, Zea mays
  unsure (1)..(450): unsure at all Xaa locations
  Clone ID: PAT_MRT4577_88792C.1.pep
VNGQALQFVYGSKQVFTQGGILAATXTTNLYRSQRFKEAMKDVMTQCCSPDEVIFGPDFHQSLYCHLLCGLIYSDEIQFVFSPFAHSLVHAFHSLEEVWEDLCADIRDASLSERARRSSTTTSASAAXVPNPELASSIYIKCQSLSNWYGVIPTLWPNVKYIYGIMTGSMEPYLKKLRHYAGHLPLLSADYGASEGWVGSNVNPTLPPEEVTYAVLPNIAYFEFIPLEKPXGGNGXCSSVHYIESEPVGLTEVEVGKIYEVVITNFAGLYRYRLGDIVKIAGFRNATPELQFICRRSLVLSVNIDKNTEKDLQLAVEAAEKLLAAEKLEVVDFTSLVDRSSEPGHYVVFWELSSDDGASEDVLSGCASCMDLAFADAGYVGSRKTQTIGALELRVLRKGAFAQVMNHYLSLGGAVSQFKTPRFVSQSNSKVLQILSRNVTRSYFSTAYGL

SEQ ID NO: 6404 - protein, 97 aa, Zea mays
  unsure (1)..(97): unsure at all Xaa locations
  Clone ID: PAT_MRT4577_88848C.1.pep
MAAADVEYRCSDGGLAWATSNESLENAFVYYGEILDSKVITDRQTERSRRLXLVTFSCENSMLDAIENMNGKELYGLNITVNHAHTSDGSGRSCCRG

SEQ ID NO: 6405 - protein, 87 aa, Zea mays
  unsure (1)..(87): unsure at all Xaa locations
  Clone ID: PAT_MRT4577_88850C.1.pep
MSGRGGGGMGLGEGGANRHRKVLHDNIQGITKPAIRRLARQGGVKRISELMYKETRDVLKIFLXNFMLDVVSYTEHARRKTVTAMYV

SEQ ID NO: 6406 - protein, 131 aa, Zea mays
  unsure (1)..(131): unsure at all Xaa locations
  Clone ID: PAT_MRT4577_88950C.1.pep
MSEEKYHHFFDHHQXDEEQPAGEYGYSETEVVTVTVEGXYKRYKKEEKEYEHXQHLGEGGAIXAAGAFALYEKHEAKKDLEYACRYKIREEVAGAVVVVVGEYVFHEHHEKKKDHKDAEEASGEKKHRHLF

SEQ ID NO: 6407 - protein, 663 aa, Zea mays
  Clone ID: PAT_MRT4577_88994C.1.pep
MQGQRNSMEHFADVFGFDVASSSGNPVMDQQSYWNNVLGSVESHNLQGYQMAHSDAAMPYGNEPQQDGTFLGFWESGEASSSASALNYGSSNNVKTEHLNIGGGGGLRIGESRLVADNGISLDVDINLNANVNDLCGQSSNVNCASQGPEQYCGSDRNAINSQPTDLGLHPFRTFLLDAQQAESFTLNPSENPLGDFSSMQESIEQRPGGSLDGRRLACKRKNIEGANGQSSAGASTSFPHRNDNAFHNIASSSYNPAPIRNSSSPKCLPVPSSIEDQLPRYGTNVGLSAGTYDLHGGVNNAVNSQRSFRARTTTSQQVAPCSVWPSSNAIRLSNSWNHQPPHFQSAFDDPQEVIPVVSSLNLQYQHPMNVPGVPQAANRFTDHGASSSRAGSLENRIIGSEEAPRRYAAPTNYSDLVPPPAVDPRRLLPEPSNWSSDVRGTAISGSIPPVSRANNSATVNPPAGFSHQNLTRRHPRNLSEEIGRLSGALRGHQPPRLRPGFLLERQGDGVWGVPLSTRGREGRRLMEIRNALEMIHRGENVRLESIFYGGVDIHDRHRDMRLDIDNMSYEELLALEERIGNVGTGLSEEAVIRLLKQRKFSSWTLKASLDPEPCCICQEEYADGDDLGRLDCGHDFHAGCIKQWLVVKNVCPICKSTALKKT

SEQ ID NO: 6408 - protein, 94 aa, Zea mays
  Clone ID: PAT_MRT4577_88998C.1.pep
YEELLALEERIGNVGTGLSEEAVIRLLKQRKFSSWTLKASLDPEPCCICQEEYADGDDLGRLDCGHDFHAGCIKQWLVVKNVCPICKSTALKKT

SEQ ID NO: 6409 - protein, 176 aa, Zea mays
  Clone ID: PAT_MRT4577_89080C.1.pep
MGGCCCCSSRTSEADRAPIDIYRQQNLEEHEPLSSAFDGSSPPSSIVAVDTNLDTSTPDTYRAPPAPLPYDVVLAVPTTPGLEKLDNKSKTDDQQESINDQESLKVDESCKKNVTEDKAEEEDVCPICLEEYDEENPRSVTKCEHHFHLCCILEWMERKDTCPVCDQTILVDEMSE

SEQ ID NO: 6410 - protein, 199 aa, Zea mays
  Clone ID: PAT_MRT4577_89293C.1.pep
MAATAMDHDGGDDVVTPGELLGNSLTLAAGRGAYADGRSVRASVTGRRRIVPPAPASDDQRSTVEVVGHKAHGAVPQPGSVVIARVTKVMARMASADIMCVDSKAIREKFTGMIRQQDVRATEIDKVDMYQSYRPGDIVKAMVLSLGDARAYYLSTAKNELGVVSAQSIAGGTLVPISWTEMQCDLTGQIEQRKVAKVE

SEQ ID NO: 6411 - protein, 129 aa, Zea mays
  Clone ID: PAT_MRT4577_89333C.1.pep
GRVGSPSLVAEEQLHGSKDTLTLKGEKALLELLLGMALDQHVDGRKLITQQEAEDSDFESYLREATSRVLYQPTFIEEDDDDDSVSESSSASLAKPAGTLDLGKLTEEPQPHRSVDPNHSYDQVFIRST

SEQ ID NO: 6412 - protein, 42 aa, Zea mays
  Clone ID: PAT_MRT4577_89355C.1.pep
KKKKKKKKKKKKKKKKKKKKKKIKKIKKKKKKKYKKKRGGPF

SEQ ID NO: 6413 - protein, 83 aa, Zea mays
  Clone ID: PAT_MRT4577_89477C.1.pep
YAEAGARTRDLPIIDGRLYRCTRPALPLQHSTNESAFFIISLNCTFPRFPPCIRRFPLDEERGRGPAARGGEAKRPHASADAG

SEQ ID NO: 6414 - protein, 61 aa, Zea mays
  Clone ID: PAT_MRT4577_89488C.1.pep
SAAGGSVGALEGAGYGGGGPPYGGGGYGGGGGSGGGGGYGGGGGGFGGGNRGGGFGNSPGN

SEQ ID NO: 6415 - protein, 150 aa, Zea mays
  Clone ID: PAT_MRT4577_89553C.1.pep
IRHEGEENRGLSFMYDGVPLLAMLDEYVMLRQEREEEKKRMREQKRYIEQQLNTDHEGPFGSRVSPNRPASSKKAVGVKVNGSVSNGTPPNRRLSISGQQNGGGHGVRSGGKDSKKDTAKTASPGNNAVAAAPVDAVSQISVTDPVPSTP

SEQ ID NO: 6416 - protein, 90 aa, Zea mays
  unsure (1)..(90): unsure at all Xaa locations
  Clone ID: PAT_MRT4577_89796C.1.pep
FAWGPNEYSTGMGYFSTATGLATFTMMLLGRVILRKFGWGVADTITPVVLLLTGVGFSSLTLFGEPXTPLMTXLGRHPLLAAVXYVGSNA

SEQ ID NO: 6417 - protein, 197 aa, Zea mays
  unsure (1)..(197): unsure at all Xaa locations
  Clone ID: PAT_MRT4577_89874C.1.pep
VGIVILLFINSTISFIEENNAGNAAAALMASLAPQTKVLRDGKWSEQEAAILVPGDIISIKLGDIIPADARLLEGDPLKIDQSALTGESLPVNKMPGDSIYSGSTCKQGEIEAVVIATGVHTFFGKAAHLVDSTNNVGHFQKVLTAIGNFCICSIAVGMLVEIIVMYPIQHRQYREGIDNLLVLLIGGIPIXMPTVL

SEQ ID NO: 6418 - protein, 94 aa, Zea mays
  Clone ID: PAT_MRT4577_8991C.1.pep
GGTANSYGNWRNLTVGPARPSYPVCPRDVFPSPKGLSSFVPFGVAPLCFLLQGPSVSVVNAGFIPGSSRPMHQPARVSGRWMLLPPSGFFFSFF

SEQ ID NO: 6419 - protein, 141 aa, Zea mays
  Clone ID: PAT_MRT4577_89934C.1.pep
MAAADVEYRCFVGGLAWATSNESLENAFASYGEILDSKVITDRETGRSRGFGFVTFSSENSMLDAIENMNGKELDGRNITVNQAQSRGGGGGGGGYGGGRGGYGGRREGGGGGYGGGGGYGGRREGGGGGYGGGGGGGWRD

SEQ ID NO: 6420 - protein, 137 aa, Zea mays
  Clone ID: PAT_MRT4577_8997C.1.pep
MAGKGGKGLLAAKTTAAKTAEKDKGKKAPISRSSRAGLQFPVGRIHRQLKQRTQANGRVGATAAVYSAAILEYLTAEVLELAGNASKDLKVKRITPRHLQLAIRGDEELDTLIKGTIAGGGVIPHIHKSLINKSSKE

SEQ ID NO: 6421 - protein, 118 aa, Zea mays
  Clone ID: PAT_MRT4577_90005C.1.pep
FPFNPLSAINSGSYLQQQQLPFRQLFVAYPQQFFPFNQMTALNFPAFLQQPQQLPFNQLVGVSPATFFTQPQLFPFYQHGAPNAGTLFQLQQLGPFNQLALTNPTAFYQQPIIGGALF

SEQ ID NO: 6422 - protein, 97 aa, Zea mays
  unsure (1)..(97): unsure at all Xaa locations
  Clone ID: PAT_MRT4577_90066C.1.pep
MGGAHESLYLGGTMRGHNREVTGIATPIDSLPCIVLCSRDKSLLEWDLTNPVHSTPEXGATGHYRVPLRRLTGHCHLVQDVFLSSDRQIALSGSWDG

SEQ ID NO: 6423 - protein, 50 aa, Zea mays
  Clone ID: PAT_MRT4577_90173C.1.pep
NVWAHPGFARVILSIYRIVLPFVFSPPDSARSPFGLGVGTPVVPFVCSPL

SEQ ID NO: 6424 - protein, 34 aa, Zea mays
  Clone ID: PAT_MRT4577_90388C.1.pep
TVATFTNCATDINLHSWQLCIYSMQILKSCTRST

SEQ ID NO: 6425 - protein, 55 aa, Zea mays
  Clone ID: PAT_MRT4577_90405C.1.pep
NRGPSRTCPPHQLKHHAFIRVHLALYLVHSRLAALAALVRAGVPVRQAQLYAHRA

SEQ ID NO: 6426 - protein, 506 aa, Zea mays
  Clone ID: PAT_MRT4577_90458C.1.pep
MLPSFVSPTASAAASVTPPPRPIPGSYGPPVLGPLRDRLDYFWFQSQDEFFRKRAAAHRSTVFRTNIPPTFPFFVGVDPRVVAIVDAAAFTALFDPDLVDKRDILIGPYNPGAGFTGGTRVGVYLDTQEEEHARVKTFAMDLLHRSARTWSADFRASVGAMLDAVDAEFGKDDGSDKKPSASYLVPLQQCIFRFLCKAFVGADPSADWLVDNFGFTILDIWLALQILPTQKIGLVQPLEELLIHSFPLPSFLIWPGYYVLYRFIEKHGAEAVAYAEAQHGIGKKDAINNILFVLGFNAFGGFSVFLPFLVAKVGGAPALRERLRDEVRRAMVGKDGDGDGEFGFATVREGMPLVRSTVYEMLRMQPPVPLQFGRARRDFVLRSHGGAAYQVTAGEVLCGYQPLAMRDPEVFERPEEFVPERFLGDEGARLLQHLFWSNGPETAQPGPGNKQCAAKEVVVDTACMLLAELFRRYDDFEVEGTSFTKLVKRQASPSVAQAAAAAGAQQ

SEQ ID NO: 6427 - protein, 37 aa, Zea mays
  Clone ID: PAT_MRT4577_90583C.1.pep
GWLLLPLLSSPPRVRAPYGFVDGRCRRLMCSTVGSSA

SEQ ID NO: 6428 - protein, 163 aa, Zea mays
  Clone ID: PAT_MRT4577_90667C.1.pep
LIEVKHTRPIAITGRRERRTVCCVGLSCHRRLFLSSLATTAAFLACQASPIVVGAAPAEAASYAAKSLMPMPMPMPSCMPLAACKLQTLHANQFALLSGITQTGRVDEPPAAGCRRQDGSIRMNTTAATLLFPGKRIAAAVLLLWSFPVLIGWRHSFHTSMGC

SEQ ID NO: 6429 - protein, 62 aa, Zea mays
  unsure (1)..(62): unsure at all Xaa locations
  Clone ID: PAT_MRT4577_90691C.1.pep
FPPRRRRRRPPSCAPTTSRIQIEVLLLPRXXLNSKSANPLSHRSQXGSXYAXRDGVEXSRIC

SEQ ID NO: 6430 - protein, 228 aa, Zea mays
  Clone ID: PAT_MRT4577_90705C.1.pep
SEFISYPISLWTEKTTEKEISDDEDEDEKKDTEEGKVEEIDEEKEEKEKKKKKIKEVSHEWNLINKQKPIWMRKPEEITKEEYAAFYKSLTNDWEEHLAVKHFSVEGQLEFKAVLFVPKRAPFDLFDTRKKLNNIKLYVRRAFIMDNCEELIPEWLSFVKGIVDSEDLPLNISRETLQQNKILKVIRKNLVKKCIELFFEIAENKEDYNKFYEAFSKNLKLGVHEDST

SEQ ID NO: 6431 - protein, 160 aa, Zea mays
  Clone ID: PAT_MRT4577_90817C.1.pep
MDARMFGLENPLVAALHHLLDVPDGDAGAGGDKAGGGATRTYVRDARAMAATPADVKELAGAYAFVVDMPGLSTGDIRVQVEDERVLMISGERRREEREDAKYLRMERRMGKFMRKFVLPDNADVDKVAAVCRDGVLTATVEKLPPPEPKKPKTIEIKVA

SEQ ID NO: 6432 - protein, 154 aa, Zea mays
  Clone ID: PAT_MRT4577_90818C.1.pep
MDARMFGLETPRVAALHHLLDVPDGDKAGGGATRTYVRDARAMAATPADVKELAGAYAFVVDMPGLSTGDIRVQVEDERVLVISGERRREEREDAKYLRMERRMGKFMRKFVLPDNADVDKVAAVCRDGVLTVTVEKLPPPEPKKPKTIEIKVA

SEQ ID NO: 6433 - protein, 123 aa, Zea mays
  unsure (1)..(123): unsure at all Xaa locations
  Clone ID: PAT_MRT4577_90897C.1.pep
GFRFFRKAVGKKGPGARAPPQVQEEVCGAGARRLRGFRLPRAPRKKEGPQGARGARRPKKAPLFRLIDPPVLSSLPXATRACXRXIERPPCCARVRMYALVSCPNKGGPVILSYVNVCVCMGL

SEQ ID NO: 6434 - protein, 170 aa, Zea mays
  unsure (1)..(170): unsure at all Xaa locations
  Clone ID: PAT_MRT4577_90917C.1.pep
MAAKXFCFLMLLGLSASVATATIFPQCSQAPIASLLPPYLSPAVSSMCETPIVQPYRIQQAIAXASLPLSPLFLQQPAHLLQQLPXVHFVAHNITAQQLQQLVLAXNLALYFQKHPVLPFNQLSALNYTAYLQQQLPSIQLGAAYPPHFLAFNXQLACLNSAAYVQHSQL

SEQ ID NO: 6435 - protein, 64 aa, Zea mays
  unsure (1)..(64): unsure at all Xaa locations
  Clone ID: PAT_MRT4577_9092C.1.pep
MASYTMALSFMAFSGTAVNVLSSSAFGDARVTMRKTAVXAKPAAVIVSPLYGSDRVLYLWPLSV

SEQ ID NO: 6436 - protein, 87 aa, Zea mays
  unsure (1)..(87): unsure at all Xaa locations
  Clone ID: PAT_MRT4577_90935C.1.pep
GSPGFRFVGERIDMGASDVEYRCFVGRLDWATDDHSLHKGLRTYREVLKFKIMLERETHRSHXLSFVTFSTEEEMPNALQGMNGKEL

SEQ ID NO: 6437 - protein, 110 aa, Zea mays
  unsure (1)..(110): unsure at all Xaa locations
  Clone ID: PAT_MRT4577_91008C.1.pep
QLLEVDPEKELECGICLQVSPKVVLPDCGHKLCIRCFXDWNPKLKSCPFFWACLEKVKPGSLWIYTHGNHVVDMDTFSRENIRRLFMYINKMPLVVLQVVDLDVFKYRLK

SEQ ID NO: 6438 - protein, 77 aa, Zea mays
  Clone ID: PAT_MRT4577_91098C.1.pep
MGGPGMARAGTPAFRWPLSNVQTWCSPALTDEDTCLEGLLSRAVDAGTRPPIRGKVVEVAQVTSNALALVNKVGPGY

SEQ ID NO: 6439 - protein, 216 aa, Zea mays
  Clone ID: PAT_MRT4577_91099C.1.pep
MARPRSVAAAAAAPLLLLAAAAAAAAGLVSAASPAASDFVRKSCRTTQYPSVCEQSLASYGGSPPPRSPRELARAALSVSADRARAASAYVGRLCGASNGKGAKKGSGSGSGSASAGPVRDCLDNLADSVGHLRDAAQEMGGAGMGRAGTPAFRWHLSNVQTWCSAALTDEDTCLDGLSSRAVDAGTRAAIRGKVVEVAQVTSNALALVNKVGPGY

SEQ ID NO: 6440 - protein, 219 aa, Zea mays
  Clone ID: PAT_MRT4577_91100C.1.pep
MARPRSVAAAAAAPLLLLLLLAAAAAAAAGLVSAASPAASDFVRKSCRTTQYPSVCEQSLASYGGSPPPRSPRELARAALSVSADRARAASAYVGRLCGASNGKGAKKGSGSASASASAGPVRDCLDNLADSVGHLRDAAQEMGGAGMGRAGTPAFRWHLSNVQTWCSAALTDEDTCLDGLSSRAVDAGTRAAIRGKVVEVAQVTSNALALVNKVGPGY

SEQ ID NO: 6441 - protein, 48 aa, Zea mays
  Clone ID: PAT_MRT4577_91134C.1.pep
TISALKEVVSSGERDKICTDIISNGSERASEGIDYAVMATVIRLTIES

SEQ ID NO: 6442 - protein, 974 aa, Zea mays
  Clone ID: PAT_MRT4577_91136C.1.pep
MVSGHIFHCRKNSWPAEEYVGRTALQLLDFDGGAPPEQAWRRRLNSHANILKEFSVTFMEAMRMMSLGLRLWSYVREEASHGRKAPIDPFTKERCKPSASQGVPLGGMGSGSISRGFRGEFKNWHIIPGLCESSPVMENQFSIFVSRDGGNKKYSSVLAPGHHEGLKKNSDSGISSWDWNLSGQHSTYHALFPRAWTVYDGEPDPDLKISCRQISPFIPHDYKDSSLPTSVFVYTLVNTGRDRAKVSLLMTWANSIGGFSHNSGGHYNEPFIAEDGVSGVLLHHKTAKDNPPVTFAVAACETQNVNVTVLPVFGLSGENHVSAKEMWNTMLQNGHFDRENFSAGPSMPSSPGQKLCAAVSASTWVEPHGRCTVVFALAWSSPKVKFQKGCTYNRRYTQFYGTSEKSAVNLVHDALTKYKLWEEEIEKWQNPILKDERLPEWYKFTLFNELYFLVAGGTVWTDGQPPAIDEKKSPGFNHQKSSKRGTKDTNQGSVKDRHVNLAVEQVPHGGYMANGDDHSVSKFAAVHGSELQEQTNGLKSEEPIPYLISKDGPEHVGKFLYLEGVEYIMWNTYDVHFYASFALLDLFPKIELSIQRDFANAVLYEDRRKVKFLADGTSGIRKAKGAVPHDLGTHDPWHEMNAYNIHDTSKWKDLNPKFVLQIYRDFAATGDMQFGRDVWPAVCAAMDYMDQFDRDGDGLIENDGFPDQTYDAWTVHGISAYCGCLWLAALQAAATMAHRLGDRHFAEKYKLKFIKAKAVYEAKLWNGSYFNYDSGTSSNSRSIQADQLAGQWYAASSGLPPLFDEHKIRTALQKIFEFNVMKVKGGRMGAVNGMTPKGKVDETCMQSREIWTGVTYAVAANMLLHGMEHQGFTTAEGIFTAGWSEEGYGYWFQTPEGWTTDGHYRSLVYMRPLAIWAIQYAVSPPKAILEAPKVNLMDRIHISPHMVRAISEISIRKVAPDNRCLPSSAFHCEC

SEQ ID NO: 6443 - protein, 378 aa, Zea mays
  Clone ID: PAT_MRT4577_91254C.1.pep
MLHLLSSMMSCILLLLTWESMHISLFNHSALLTPFVSVQAGRIWRMTEAAVTRYWCHGCVRVVEEAMGEEIKCPFCGGGFIEEMIGEEFDGLASQQSERDSSQWGASNNPFEQPRAEADSEDEEDDDDYDDDIGRAFESFIRRHGRPSALRRAFDSIQDDLRADRDSDFSILINAFNQALALQRSVLDADEARDDQGGSSNDDGLMEEYVLGAGLTLLLQYLTENDPSQYGTPPANKEAVDALPTVQIAEAVSCSVCLDDLELGSQAKQMPCEHKFHSPCILPWLELHSSCPVCRFELPSEETEDLDEPSNVDRTENTHEEVRADGPEDDSESSNRAWALVPWFSGLFSTPEPQTVRGAFTDQQTRSTSGTNMNAGES

SEQ ID NO: 6444 - protein, 73 aa, Zea mays
  Clone ID: PAT_MRT4577_91282C.1.pep
TPAGKNEARTGLQEHPFFDVAPRPPPFFPQSHTFTHQKQAATKGRRGTHYWEPSNYTPLQYKIKQGCGCVPPN

SEQ ID NO: 6445 - protein, 160 aa, Zea mays
  unsure (1)..(160): unsure at all Xaa locations
  Clone ID: PAT_MRT4577_91378C.1.pep
ITAGILPLSPWFXQQSSALLHQLPLVXFIAQXIRXQQLQQLVLANXLAAYILKQQQSFFPFNQXXAALNSASYLQQQQPPFXSQLFLAYPQQFXPFNQLTALNSPAYLQQKQLLPFSQLAGVXSPATHLXTKPQLVPIYQXHAAHNAGTXLQLKQLLPDQ

SEQ ID NO: 6446 - protein, 82 aa, Zea mays
  Clone ID: PAT_MRT4577_91459C.1.pep
QHTKHNSVPTMLAKIFCLLMLDGLSASAATYYHLTVMLISSYSFSFYPIPLTNFVFSMLKPNSLTLHDPTCNLIIAFLPLSS

SEQ ID NO: 6447 - protein, 447 aa, Zea mays
  Clone ID: PAT_MRT4577_91500C.1.pep
MDEEYDVIVLGTGLKECIISGLLSVDGLKVLHMDRNDYYGGESSSLNLTKLWNRFKGNDSPPEHLGVSKEYNVDMVPKFMMANGALVRVLIRTSVTKYLNFKAVDGSFVYNNGKIHKVPATDVEALKSNLMGLFEKRRARKFFIYVQDYEEDDPKSHEGLDLNKVTTREVISKYGLEDDTVDFIGHALALHRDDSYLDEPAIDTVKRMKLYAESLARFQGGSPYIYPLYGLGELPQAFARLSAVYGGTYMLNKPECKVEFDESGKAYGVTSEGETAKCKKIVCDPSYLPDKVKKVGRVARAICIMKHPIPDTKDSHSVQIILPKKQLKRKSDMYVFCCSYAHNVAPKGKFIAFVSTEAETDKPEIELKPGIDLLGPVEETFFDIYDRYEPVNNPDDDCCFLTNSYDSTTHFETTVKDVLALYNKITGKELDLSVDLNAASATEQEAA

SEQ ID NO: 6448 - protein, 502 aa, Zea mays
  Clone ID: PAT_MRT4577_91548C.1.pep
MRKLLFISFVLSLSAAAVHGEDGAYIGVNIGTAMSSVPAPTQITTLLRSQNIRHVRLYDADPAMLAALSNTGIRVIVSVPNEQLLAIGNSNATAANWVARNVAAHFPAVNITAIAVGSEVLSAQPNAAPLLMPAMRYLQNALVAAALDRYIKVSTPHSSSIILDSFPPSQAFFNRSLDGVLVPMLRFLQSTGSPLMLNVYPYYDYMRSNGVIPLDYALFRPLPPNKEAVDANTLLHYTNVFDAVVDAAYFAMAYLNVTNVPVMVTETGWPHKGDSSSEPDATSDNADTYNSNLIRHVMNSTGTPKHPGVAVPTYVYELYDEDTRPGSTSEKYWGLFDMNGVPAYTLHLTGSGVLLANDTTNQTYCVAREGADPKMLQAALDWACGPGKVDCSVLMQGQPCYDPDTVDAHATYAFNAYYHGMGMGSGTCYFSGVAVVTTTDPSHGSCVYAGKNGTSLMNGTSLAPSSNSTEGGSGAHRAFGDVSSLVRIVSTALLFSVVLLLL

SEQ ID NO: 6449 - protein, 172 aa, Zea mays
  unsure (1)..(172): unsure at all Xaa locations
  Clone ID: PAT_MRT4577_91549C.1.pep
MRKLLFISFVLSLSAAAVHGEDGAYIGVNIGTAMSSVPAPTQITTLLRSQNIRHVRLYDADPAMLAALSNTGIRVIVSVPNEQLLAIGNSNATAANWVARNVAAHFPAVNITAIAVGSEVLSAQPSAAPLLMPAMRYLQNALVAAALDRYIKXVSTPHSASIILDSFPPSQP

SEQ ID NO: 6450 - protein, 218 aa, Zea mays
  Clone ID: PAT_MRT4577_91553C.1.pep
MRKLFFVYFVLLLAAAVVHGEDGAYIGVNIGTAMSSVPAPTQITTLLRSQNIRHVRLYDADPAMLAALSNTGIRVIVSVPNEQLLAIGNSNATAANWVARNVAAHFPAVNITAIAVGSEVLSAQPNAAPLLMPAMRYLQNALVAAALDRYIKISTPHSSSIILDSFPPSQAFFNRSLDSVLVPMLKFLQSTGSPLMLTVYPYYDYMRSNGVIPLDYAL

SEQ ID NO: 6451 - protein, 221 aa, Zea mays
  Clone ID: PAT_MRT4577_91585C.1.pep
MGPYSTAVAVSASPVLQASSLLTRARGSWRPTVAALRLSASVKCRRRALTVTCALPEKERPAAFNIPPTALLCPVPPPDGKERWDIKEEDDRVTLWLQVPGLSASDIEVTTSEDVLEIKRRVVAPQQPAPVDAHGVGAFHIRLLLTKEYDGSNVTADLKAGMLEVTVHKNPQRPGERAVMMGATKPPPEPRQNEESSTNQRSSTARKETGTPMGRQNPNGV

SEQ ID NO: 6452 - protein, 92 aa, Zea mays
  unsure (1)..(92): unsure at all Xaa locations
  Clone ID: PAT_MRT4577_91680C.1.pep
QYLSPEVYTLCENPLLQPYKIQQAMTAGIVPLSPLILQQSSDLLHQIPLVHXLLTQNIVAHQLQQLVLANLGVYSEQQQLLSFNQLAALNSA

SEQ ID NO: 6453 - protein, 472 aa, Zea mays
  Clone ID: PAT_MRT4577_91692C.1.pep
MGRSGGGDGDGDGDRLLLGKPLESSSSCSSSDESLVKRTGTVWTAMAHIITAVIGSGVLSLAWSVAQLGWVGGPAAMVFFAGVTAVQSTLIADCYICHHPERGVVRNRSYVDAVRIYLGDKSHLFCGFFLNLSLFGTGVVYTLTSATSMRAIRKANCYHREGHDAPCSVGGDGYYMLLFGLAQVLLSQIPNFHEMAGLSIFAAVMSCFYAFVGVGLGVAKVIANGVIMGGIGGIPLVSTTQKVWRVSQALGDILFAYPFSLVLLEIEDTLRSPPPESETMKKATRASIAITTLFYLCCGCFGYASFGDGTPGNLLTGFGFYEPYWLIDLANLAIVLHLLGGYQVYTQPVFAFADRKFGGGATVVEAPLLPVPGARRVNANVFRLCFRTAYVAATTALAVWFPYFNQIIGLLGSFTFWPLAVYFPVEMYLTRNKVAPWTNQWLAIHAFSLVCLLISAFASVGSAVGVFGSETS

SEQ ID NO: 6454 - protein, 116 aa, Zea mays
  unsure (1)..(116): unsure at all Xaa locations
  Clone ID: PAT_MRT4577_91694C.1.pep
LCLSKDTLRGGPPVSETMKKXXRASIAITTLFYLCCGCFGYASFGDGTPGNLLTGFGFYEPYWLIDLANLAIVLHLLGGYQVYTQPVFAFADRKFGGGATIVEAPLLPVPGARRVN

SEQ ID NO: 6455 - protein, 762 aa, Zea mays
  Clone ID: PAT_MRT4577_91710C.1.pep
MAILSALATEVLIPVAAVIGIAFAVVQWVVVSRVKLSPAASGGSGGKAGYADSLIEEEEGLNDHNVVVKCAEIQNAISEGATSFLFTEYQYVGIFMAIFAVVIFLFLGSVEGFSTKSQPCTYSKDKYCKPALFTALFSTVSFLLGAITSLVSGFLGMKIATYANARTTLEARKGVGKAFITAFRSGAVMGFLLASSGLVVLYITINVFKLYYGDDWEGLFESITGYGLGGSSMALFGRVGGGIYTKAADVGADLVGKVERNIPEDDPRNPAVIADNVGDNVGDIAGMGSDLFGSYAESSCAALVVASISSFGIDHDFTGMCYPLLVSSVGIIVCLITTLFATDFFEVKAVKEIEPALKKQLIISTVLMTFGIALISWLALPAKFTIYNFGTQKEVSNWGLFFCVSIGLWAGLIIGFVTEYYTSNAYSPVQDVADSCRTGAATNVIFGLALGYKSVIIPIFAIAVSIYVSFSIAAMYGIAVAALGMLSTIATGLAIDAYGPISDNAGGIAEMAGMSHRIRERTDALDAAGNTTAAIGKGFAIGSAALVSLALFGAFVSRAGVKVVDVLSPKVFIGLIVGAMLPYWFSAMTMKSVGSAALKMVEEVRRQFNTIPGLMEGTAKPDYATCVKISTDASIKEMIPPGALVMLTPLIVGTLFGVETLSGVLAGALVSGVQIAISASNTGGAWDNAKKYIEAGASEHARTLGPKGSDCHKAAVIGDTIGDPLRDTSGPSLNILIKLMAVESLVFAPFFATQGGLLFKYL

SEQ ID NO: 6456 - protein, 762 aa, Zea mays
  Clone ID: PAT_MRT4577_91711C.1.pep
MAILSALATEVFIPVAAVIGIAFAVVQWVLVSRVKLSPAAAASGGSKNGYGDYLIEEEEGLNDHNVVVKCAEIQTAISEGATSFLFTEYQYVGIFMSIFAVVIFLFLGSVEGFSTKSQPCTYSKDKYCKPALFTALFSTVSFLLGAITSLVSGFLGMKIATYANARTTLEARKGVGKAFITAFRSGAVMGFLLASSGLVVLYITINVFKLYYGDDWEGLFESITGYGLGGSSMALFGRVGGGIYTKAADVGADLVGKVERNIPEDDPRNPAVIADNVGDNVGDIAGMGSDLFGSYAESSCAALVVASISSFGINHDFTGMCYPLLVSSVGIIVCLITTLFATDFFEVKAVKEIEPALKKQLIISTVLMTVGIAVISWLALPAKFTIFNFGTQKDVSNWGLFFCVAIGLWAGLIIGFVTEYYTSNAYSPVQDVADSCRTGAATNVIFGLALGYKSVIIPIFAIAVSIYVSFSIAAMYGIAVAALGMLSTIATGLAIDAYGPISDNAGGIAEMAGMSHRIRERTDALDAAGNTTAAIGKGFAIGSAALVSLALFGAFVSRAGVKVVDVLSPKVFIGLIVGAMLPYWFSAMTMKSVGSAALKMVEEVRRQFNTIPGLMEGTAKPDYATCVKISTDASIKEMIPPGALVMLTPLIVGTLFGVETLSGVLAGALVSGVQIAISASNTGGAWDNAKKYIEAGASEHARTLGPKGSDCHKAAVIGDTIGDPLKDTSGPSLNILIKLMAVESLVFAPFFATHGGLLFKYL

SEQ ID NO: 6457 - protein, 87 aa, Zea mays
  unsure (1)..(87): unsure at all Xaa locations
  Clone ID: PAT_MRT4577_91728C.1.pep
KRAKPPPGRTXGGASQPTTHQRSPKGTPPKNXRTTKGRPVSLKGSTNSTPRAAQMXPMRMPSKVWSHRRSAILCGDQYLCYGIYRPR

SEQ ID NO: 6458 - protein, 366 aa, Zea mays
  Clone ID: PAT_MRT4577_91807C.1.pep
MGKEKNGDSLPPFPFTIVETLAPPRRRHAGSVGAMSKARVYADVNVLRPKEYWDYEALTVQWGEQDDYEVVRKVGRGKYSEVFEGINVNNNEKCIIKILKPVKKKKIKREIKILQNLCGGPNIVKLLDIVRDQHSKTPSLIFEYVNNTDFKVLYPTLTDYDIRYYIYELLKALDYCHSQGIMHRDVKPHNVMIDHELRKLRLIDWGLAEFYHPGKEYNVRVASRYFKGPELLVDLQDYDYSLDMWSLGCMFAGMIFRKEPFFYGHDNHDQLVKIAKVLGTDGLNAYLNKYRIELDPQLEALVGRHSRKPWLKFMNADNQHLVSPEAIDFLDKLLRYDHQERLTALEAMTHPYFQQVRAAENSRTRA

SEQ ID NO: 6459 - protein, 127 aa, Zea mays
  Clone ID: PAT_MRT4577_91808C.1.pep
MAEGRGSARAIGAMAFAVACCYCCVAIADAATTYYVGDSNGWSFSSPSWPNGKHFRAGDTLVFRYIPWIHNVVAVDEDGYNGCTTPPGSRTYTSGADSVTLARGDNFFICTRFGHCNLGMKLVVYAA

SEQ ID NO: 6460 - protein, 332 aa, Zea mays
  Clone ID: PAT_MRT4577_91809C.1.pep
MSKARVYADVNVLRPKEYWDYEALTVQWGEQDDYEVVRKVGRGKYSEVFEGINVNNNEKCIIKILKPVKKKKIKREIKILQNLCGGPNIVKLLDIVRDQHSKTPSLIFEYVNNTDFKVLYPTLTDYDIRYYIYELLKALDYCHSQGIMHRDVKPHNVMIDHELRKLRLIDWGLAEFYHPGKEYNVRVASRYFKGPELLVDLQDYDYSLDMWSLGCMFAGMIFRKEPFFYGHDNHDQLVKIAKVLGTDGLNVYLNKYRIELDPQLEALVGRHSRKPWLKFMNADNQHLVSPEAIDFLDKLLRYDHQERLTALEAMTHPYFQQVRAAENSRTRA

SEQ ID NO: 6461 - protein, 99 aa, Zea mays
  unsure (1)..(99): unsure at all Xaa locations
  Clone ID: PAT_MRT4577_91841C.1.pep
WVGFSSPSGSFSGSRGSPDFGFGGQRIEISASDAEYRYFISGLYXATDYHFLHNAFITYSDVLXSKIILDRYTHRSRGFCFITFYTDDAMRNAIKGMNC

SEQ ID NO: 6462 - protein, 335 aa, Zea mays
  Clone ID: PAT_MRT4577_91890C.1.pep
MRKAGVTSASSGGGEGWPCGGGLNLGVKLNVLLLLSVVATNRAVPCHHSSPSCVLHSVPIGSLEAGRGNTNCHFAPSRTTARVIVAFPSLHTPNANSRAVTSRSPAMAARRLGSPASRWLRPSALLLLVASALLSAPSPARALRFDLESGHTKCISDEIKVNAMAVGKYHIVSPDPNFPDAQLPESHRISLRVTSPYGNSMHYAENVQSGHFAFTAAEAGDYLACFWAPDHKPPVTIGFEFDWRSGVSAKDYPSVAKKGKVDMMELELKKLEETIKNIHEEMFYLREREEEMQDLNRRTNSRMAWLGFLSLGVCLSVAGLQLWHLKTFFERKKLL

SEQ ID NO: 6463 - protein, 229 aa, Zea mays
  Clone ID: PAT_MRT4577_91891C.1.pep
MVARRLGSPACRWLRPSALLLLVASALLSAPSPARALRFDLESGHTKCISDEIKVNAMAVGKYHIVSPDPNFPDAQLPESHRISLRVTSPYGNSMHYAENVQSGHFAFTAAEAGDYLACFWAPDHKPPVTIGFEFDWRSGVSAKDYPSVAKKGKVDMMELELKKLEETIKNIHEEMFYLREREEEMQDLNRRTNSRMAWLGFLSLGVCLSVAGLQLWHLKTFFERKKLL

SEQ ID NO: 6464 - protein, 229 aa, Zea mays
  Clone ID: PAT_MRT4577_91892C.1.pep
MAARRLGSPASRWLRPSALLLLVASALLSAPSPARALRFDLESGHTKCVSDEIKVNAMAVGKYHIVGPDPNSPDAQLPESHRISLRVTSPYGNSMHYAENVQSGHFAFTAAEAGDYLACFWAPDHKPPVTIGFEFDWRSGVSAKDYPSVAKKGKVDMMELELKKLEETIKNIHEEMLYLREREEEMQDVNRRTNSRMAWLGFLSLGVCLSVAGLQLWHLKTFFERKKLL

SEQ ID NO: 6465 - protein, 117 aa, Zea mays
  Clone ID: PAT_MRT4577_91971C.1.pep
PRVRGRVGSAESTMVAYKAAQDIALAELAPTHPIRLGLALNFSVFYYEILNSPDKACNLAKQAFDEAISELDTLGEESYKDSTLIMQLLRDNLTLWTSDITEEGIEEGKEASKGDAE

SEQ ID NO: 6466 - protein, 63 aa, Zea mays
  Clone ID: PAT_MRT4577_92095C.1.pep
SDKQSEQAKTVSGNAHRLTPADYPIFLKQKRTGASLPLSLRDNHKETWYATGYMIMHMHAKDN

SEQ ID NO: 6467 - protein, 92 aa, Zea mays
  Clone ID: PAT_MRT4577_9211C.1.pep
PPVALGNYPSTVLVTMVPPIPPRHGRIGWIPENPNPGPPDYFFWLLPVVSPPNFLAYLVIPSWYKYKKTPHYSPGPQGEPGPNPLWAKNGGN

SEQ ID NO: 6468 - protein, 548 aa, Zea mays
  unsure (1)..(548): unsure at all Xaa locations
  Clone ID: PAT_MRT4577_92205C.1.pep
MVGGGEGDRVGGGVGVGGGQQFVDRSKVRILLCDGDASSSREVLRLLCNCSYHVTCAKSPRQVINILNYEGGEIDIILAEVDLPVSKCFKMLKYIARNKDLRHIPIISRQPSYSEPCAVVPITVMXSVTVLPVLWNCAVMSNRDEVSVVVKCLRLGAAEYLVKPLRTNELLNLWTHVWRRRRMLGLPEKNFFNDNFELVLSEPSDANTNSATLLSDETDDRPKENTNQETGTSNQLEYESNPSVAERDQRDKIGAPGSALDASQSSTPGRMFSRPIKTNLKVAESSAFLAYVKSSTPATSSFDSGLQRGDSRLDSLDNHGNCSSATDRSDTGTDVNIRNKEAFEMPVQYPMVCFSSSSMHMERSNEGHNDTSGTPPAYHFPFYYPGMVEHNMALSSVQNFQANINSAQAHTPPAMLHQYNVFSQCHSLPMISSFQFNTSGMSMHSSHLPTQNVWSSASSTPTPDETCNRSERRAAALAKFRQKRKERCFDKKVRYVNRKKLAETRPRVRGQFVRHASNMDIISTGDDISEDEDDDPTSREVDMISSPE

SEQ ID NO: 6469 - protein, 425 aa, Zea mays
  unsure (1)..(425): unsure at all Xaa locations
  Clone ID: PAT_MRT4577_92370C.1.pep
AGLEAGRRHLIFLFTPTHSPAAAIPSLPSPGTASSNPLXSSAAAAAMDSTPAHEAAPGASSSATAAAEDLAGGVAAMTLDERFALLRGIGEECIQEDELRRLLENKPVPICYDGFEPSGRMHIAQGIVKTINVNKMVRAGCKVKIWIADWFAQLNNKMGGDLKKIQTVGRYMIEIWKAAGMNLDGVEFLWSSEEINRRAHEYWPIVMDIARKNNVKRIMRCCQIMGRSDQDDLTAAQIFYPCMQCADIFFLKADICQLGMDQRKVNVLAREYCDDIKRKNKPIILSHHMLPGFKEGQEKMSKSDPSSAIFMEDDEAQVNVKIKQAFCPPKIVEGNPCLEYIKYIVFPWFGRFEVARKESNGGNKTFTSMDELISDYETGALHPADVKPALAKAINEILQPVRDHFNNNNEAKVLLNTVKKYRVTS

SEQ ID NO: 6470 - protein, 44 aa, Zea mays
  Clone ID: PAT_MRT4577_92522C.1.pep
STCGCGSSCKCGKKYPDLVETSTAAQPTSFLGVVPVNNADPLLL

SEQ ID NO: 6471 - protein, 156 aa, Zea mays
  Clone ID: PAT_MRT4577_9275C.1.pep
MDASAAGAGGKAKKGAAGRKAGGPRKKSVTRSVKAGLQFPVGRIGRYLKKGRYAQRVGTGAPVYLAAVLEYLAAEVLELAGNAAKDNKKTRIIPRHVLLAIRNDEELGKLLSGVTIAHGGVLPNINPVLLPKKTAEKAAAKEAKSPKKAAKSPKKA

SEQ ID NO: 6472 - protein, 231 aa, Zea mays
  Clone ID: PAT_MRT4577_92814C.1.pep
MASRQQHPTSYHAGETKARAEEKTGQVMGATQEKGREAKHKASDASDRAMGMGHDAMEATREKARAAADRTMGMGHDAGEAAKDRAYRAKDAASGAAGRARDTASDAAGAAGDRARDGAQQTGSYVAQTAEAARQKAAGAALYAKDTVVAGKDKTGALLQQAGEKVMSTAVGAKDTVVSTAVGAKDTVVSTAVGAKDAMMNSLGMAGEDKDGTTTTDAGKDTSTRKPGRDY

SEQ ID NO: 6473 - protein, 905 aa, Zea mays
  Clone ID: PAT_MRT4577_92835C.1.pep
MMNLNLKQPLVLPAHHSNVVGSRLSSSSPSAAAASRRTGGGVSSRSGSRRHVRLPRISCSATEEVSGAVSSVTVERMLTVTASVEASPAIGQMYFQRAVDDIGDLLGKTLLLELVSSELDAKSGVEKTRVTAYAHKTLREGHYEAEFKVPASFGPVGAVLVENEHHKEVFIKEIKLVTGGDSSTAVTFDCNSWVHSKFDNPEKRIFFTLKSYLPSDTPKGLEDLRKKDLQALRGDGHGERKVFERVYDYDVYNDLGDPDKNPAHQRPVLGGNKQYPYPRRCRTGRPRTKKDPETEMREGHNYVPRDEQFSEVKQLTFGATTLRSGLHALLPALRPLLINKKDLRFPHFPAIDELYSDGIPLPPQTGFDAIRTVVPRMVKLVEDTTDHVLRFEVPEMIERDRFSWFKDEEFARQTIAGLNPLCIQLLTEFPIKSKLDPEVYGPAESAITKEILEKQMNGALTVEQALAAKRLFILDYHDVFLPYVHKVRELQDATLYASRTIFFLTDLGTLMPLAIELTRPKSPTRPQWKRAFTHGPDATDAWLWKLAKAHVLTHDTGYHQLVSHWLRTHCCVEPYIIAANRQLSRLHPVYRLLHPHFRYTMEINALAREALINADGIIEESFWPGKYAVELSSVAYGATWQFDTEALPNDLIKRGLAVRGEDGELELTIKDYPYAHDGLLVWDSIKQWASEYVNVYYKSDEAVAADPELRAFWDEVRNVGHGDKKDEPWWPVLDTRDSLVETLTTIMWVTSGHHSAVNFGQYHFAGYFPNRPTTIRKNMPVEEGGPGEEMEKFLKQPETTLLDMLPTQMQAIKVMTTLDILSSHSPDEEYMGEFAEPSWLAEPMVKAAFEKFGGRMKEIEGFIDECNNNLDLKNRCGAGIVPYELLKPFSKPGVTGRGIPSSISI

SEQ ID NO: 6474 - protein, 317 aa, Zea mays
  unsure (1)..(317): unsure at all Xaa locations
  Clone ID: PAT_MRT4577_92931C.1.pep
MWDQKVEAYIIHVQVEVAMFCPMICQEIVKNGTGSSKNHAIALPERVNPASLSLILDYCRFHQVTGRSNKERKSFDEKFVRIETERLCELTSAADSLQLKPLVDLTSRALARIIEGKTPEEIRDIFHLPDDLTEEEKLEPLKNVNDDPRIRLLNRLYAKKRKELQERQKLKDVQVQKEEKDERSLDELLCFINGDGGSGGGESSTKSKKKNKRRKDHAKNPAKADSESVNVEGAACVVPCKVDSSNVSRLPXKVGTMQDDAEYPFEDADLDDGLDPAMKEELDREVEDFARRLNSVWSESHIGGNGSVQRFPGFNHR

SEQ ID NO: 6475 - protein, 139 aa, Zea mays
  Clone ID: PAT_MRT4577_93131C.1.pep
MAGKGGKGLLAAKTTAAKGAADKDKDKKKAPVSRSSRAGIQFPVGRIHRQLKQRVSANGRVGATAAVYSAAILEYLTAEVLELAGNASKDLKVKRITPRHLQLAIRGDEELDTLIKGTIAGGGVIPHIHKSLINKTSKE

SEQ ID NO: 6476 - protein, 305 aa, Zea mays
  Clone ID: PAT_MRT4577_93177C.1.pep
MPQRHSKNNNDLAFFTYEEKRKLGYGTQRERLGKDSIKPFDACCLCLKPLIDPLCCPKGHTFCKECILECLLAQKKDIKRKLAAHEAQKKQEKEEEEEKLILQKAKELDAFDQQNHGAVPQYHDRSGSQGKNGFHGANSVKVTSFEEEALRNMKAFWLPSATPEATVKVDAPSADTVCPEGQEKLKLKSLFPISFMEETADPKRKKAMEKSYMCPSCKSTLTNTMSLVAVSACGHVFCKKCSDKFLVKDKVCLECSKSFKERNLVPLEKGGTGFAAHDERLEARDFKHLGSGSGLGLVKPAPKAY

SEQ ID NO: 6477 - protein, 177 aa, Zea mays
  unsure (1)..(177): unsure at all Xaa locations
  Clone ID: PAT_MRT4577_93262C.1.pep
HSTAMPAGMLPLXPLVLQQSSGLFXQLPLVHLLAQNMRAQQLQQLVLANLAAYSDHQQWLPFNPLSALNSGWYWQQQQLPFTQLPAAYPQQFLPFNQLAALNSCAYLQXRHLLPFIQLAGVSPATFXTQPQLLPCYQHVAPNAGTLLQLSQLLPFNQLALSNPVSFYQQPIIGGALF

SEQ ID NO: 6478 - protein, 65 aa, Zea mays
  unsure (1)..(65): unsure at all Xaa locations
  Clone ID: PAT_MRT4577_93337C.1.pep
MAASEGALLGMGTPLLDIFAVDDDAFLGERDIQLSSALLAEDNHLPMYDELASICPVXYIGRGAT

SEQ ID NO: 6479 - protein, 66 aa, Zea mays
  unsure (1)..(66): unsure at all Xaa locations
  Clone ID: PAT_MRT4577_93415C.1.pep
MAAKILCCLMLLGLSASVATETIFPQSXQPPIPSFLPPYLXPPVSSMLETPFVQPYRIQQPFAPGI

SEQ ID NO: 6480 - protein, 189 aa, Zea mays
  unsure (1)..(189): unsure at all Xaa locations
  Clone ID: PAT_MRT4577_93511C.1.pep
VCDNPILRPYRIXQAITAGILLLSPLFLQQSSAYSXQLPLVHLLAHNIRAQLLXQQLVLANLSAYSQHQQFLPFNQLVALSSASYLQQQQLPFSQLFAAYPQQFLPFRXLTALISPAYIQQHQLLPFSQLAGVRRATFLTQPQLLPFYQHAALIAGTLFHLXQLLPFNQLALXSCSAFYHRAIFGGALF

SEQ ID NO: 6481 - protein, 61 aa, Zea mays
  Clone ID: PAT_MRT4577_93522C.1.pep
GGYVGAREDGGYGGGGPRNDGGGYGGGGGYGGGDEYGGGGGGYGGGNRGGGYGNSHGNWRN

SEQ ID NO: 6482 - protein, 178 aa, Zea mays
  unsure (1)..(178): unsure at all Xaa locations
  Clone ID: PAT_MRT4577_93624C.1.pep
MLLVLSESAGTGTILPQCXRAPIAFLHAANLSPTVLSEWEHPSLRPYRIQQATRYVIVPLSPLLLQQSSAVLRQLPLERILSQNIRAQQLHQRELANLAAYSQHQEFLPFNQLAGWNSASYLRQHQLPCSQLSAVYPQQFLAFNQLTALNSPAYLQQRQLLPFSQLASVSPATFLTHH

SEQ ID NO: 6483 - protein, 82 aa, Zea mays
  unsure (1)..(82): unsure at all Xaa locations
  Clone ID: PAT_MRT4577_9367C.1.pep
DGIRQIVSVYGDKTIKLWNTLCECKYTIGCDLSGREGHNGWVFXARFSPNTLQTTIACGCXDRTVKVWYLTNCKLSCTLDGH

SEQ ID NO: 6484 - protein, 101 aa, Zea mays
  Clone ID: PAT_MRT4577_93858C.1.pep
MFLRGSDSTGERIEMAASDVDYRCFDGGLTWATDDHSLHNAFSTYGEVLECRIILYRETHRHRGIGYATFSTEEAMRNAIDGMNGTELDGRNITVNEAQSL

SEQ ID NO: 6485 - protein, 254 aa, Zea mays
  Clone ID: PAT_MRT4577_9400C.1.pep
MAKRRRHELAPVVEELISPMNSLDDGCLMHIFSFLSPIPDRYNTALVCHRWRFLACHPRLWLRVERPIRDAMEPGVYPDLEAAVSAARPGDTILIAAGGSHVACNIQIKKPICIIGGGDLPDDTVLTCSRGFDNALEFLSTCKIANLTIRAELGCCLLHRGGRLTIQECLLQCEQNPLDHLSFPIISTAIEYDPFSSLKEQGHGVTVVRTRIEGGARAVRTNGTLALRHVRAIYSRSSVFFWFEVGEKVEAPVH

SEQ ID NO: 6486 - protein, 306 aa, Zea mays
  Clone ID: PAT_MRT4577_94022C.1.pep
MPQRHSKNNNDLAFFTYEEKRKLGYGTQRERLGKDSIKPFDACCLCLKPLIGPLCCPKGHTFCKECILECLLSQKKDIKRKLAAHEAQKKQEKEEEEEKLILQKAKELDAFDQQNHGAVPQYHDRSGSQYKNGFHGANSVKVTSFEEEALRNMKAFWLPSATPEATVKVDLPSTDTVCPEGQEKLKLKSLFPISFTEETADQKSSKAGNSCSYMCPSCKSTLTNTMSLVAVSTCGHVFCKKCSDKFLVKDKACLECSKPFRERNLVPLEKGGTGFAAHDERLEARDFKYLGSGSGLGLVKPAPKTY

SEQ ID NO: 6487 - protein, 342 aa, Zea mays
  Clone ID: PAT_MRT4577_94028C.1.pep
CGTAFTCWVSRSVSTVRPFYILRRCRCYRATTLTSWHLLVTFCSLHVALWMKFFEHKPFDSRTVMGFGVLNGISIGLLNLSLGFNSVGFYQMTKLAIIPCTVILETLFFRKKFSRSIQMSLSVLLLGVGVATVTDLQLNAVGSILSLLAIITTCIAQIMTNTIQKKFKVSSTQLLYQSCPYQSLTLFLIGPFLDGFLTNQNVFAFNYTSQVVFFIVLSCLISVSVNFSTFLVIGKTSPVTYQVLGHLKTCLVLTFGYVLLHDPFSWRNILGILIAVVGMVLYSYFCTVETQHKNTEVSPQQVKESEAAPLISDSLSKVENGGGVVDDEPLKVPMWSSKYSRE

SEQ ID NO: 6488 - protein, 293 aa, Zea mays
  unsure (1)..(293): unsure at all Xaa locations
  Clone ID: PAT_MRT4577_94125C.1.pep
MSFVFRGSRTDIEAGGFPGFAPERRAMRIHAGSRPVNSNSLAFLLTVLVLFMVLNSHQISPNLLLWLVLGVFLMATSLRMYATCQQLAHAAAANSFLGHTELRVHVPPSITLATRGRLQSLRLQLALLDREFDDLDYDTLRALDADNSPHAPSMSEEEINSLPVFKYKVQAQQRHPPARKSDGPSQLSVSSTGSGNEEKQDGLKADGTSKTSEDELTCSVCLEPLRVGDLLSSLPXLTXFHVRWNGQKLRHQGTCTICKHQVSDGWQSTGKAGQDASYMVRATDYESATVNYQ

SEQ ID NO: 6489 - protein, 280 aa, Zea mays
  Clone ID: PAT_MRT4577_94132C.1.pep
MSFVFRGSRTDIEAGGFPGFAPERRAMRIHAGSRPVNSNSLAFLLTVLVLFMVLNSHQISPNLLLWLVLGVFLMATSLRMYATCQQLAHAAAANSFLGHTELRVHVPPSITLATRGRLQSLRLQLALLDREFDDLDYDTLRALDADNSPHAPSMSEEEINSLPVFKYKVQAQQRHPPARKSDGPSQLSVSSTGSGNEEKQDGLKADGTSKPSEDELTCSVCLEQVTVGDLLRSLPCLHQFHVNCIDPWLRQQGTCPICKHQVSDGWHATGNGEEDASYMV

SEQ ID NO: 6490 - protein, 99 aa, Zea mays
  unsure (1)..(99): unsure at all Xaa locations
  Clone ID: PAT_MRT4577_94320C.1.pep
NRHIHQLILCCLYRVXKVSQLELSFKEILNNGKKEAQCRPKVFLNIYIGSTNHNXVLISHHVDIITFYNEVFVPAAKPLLEPLISSDTRPKDKKNASGQ

SEQ ID NO: 6491 - protein, 289 aa, Zea mays
  Clone ID: PAT_MRT4577_94673C.1.pep
MKKCASELELEAFIRESGEDARAAAGGSSPGCGGSSDPGGSGVFSPGFGFADSDLLAPEQDTMDGGSWWYGNVRTPNPVMSQAASISASPGLTTSANHALESESDSDSESLYEVEGVPYERGNRSIETKRIRRMVSNRESARRSRRRKQAQLSDLESQVERLKGENATLFQQLSDANQQFSTAVTDNRILKSDVEALRIKVKMAEDMVARSAVSCGLGDLGLAPYVNSRKMCQALNVLTGLDLLGSDAFRGPTAGTRVQNSPVQSTASLESLDNRKSNEVTSCAADIWP

SEQ ID NO: 6492 - protein, 480 aa, Zea mays
  Clone ID: PAT_MRT4577_94704C.1.pep
MAVSHNVGSKHGVAPLEVSVEAGNGGAAEWLDDDGRPRRTGTFWTASAHIVTAVIGSGVLSLAWAIAQLGWVAGPAAMLLFAFVTYYTATLLAECYRTGDPDTGKRNYTYMDAVRSNLGGAKVAFCGAIQYANLVGVAIGYTIASSISMQAVSRAGCFHKRGHAVPCKSSSNPYMILFGAVQILFSQIPDFDQIWWLSIVAAVMSFTYSAIGLSLGIAQTVANGGFKGSLTGISIGADVTSTQKVWHSLQAFGDIAFAYSFSNILIEIQDTIKAPPPSESKVMQKATRLSVATTTIFYMLCGCMGYAAFGDKAPDNLLTGFGFFEPFWLIDVANVAIVVHLVGAYQVFCQPIFAFVERRAAAAWPDSAFVSRELRVGPLALSVFRLTWRSAFVCVTTVVAMLLPFFGNVVGFLGAVSFWPLTVYFPVEMYIKQRRVPRGSTKWVCLQTLSVACLVVSIAAAAGSIADVIEALKVYHPFSS

SEQ ID NO: 6493 - protein, 482 aa, Zea mays
  Clone ID: PAT_MRT4577_94705C.1.pep
MAPAPHNGVNNNHPVVPMEVSVEAGNAGAAEWLDDDGRPRRSGTFWTASAHIITAVIGSGVLSLAWAIAQLGWVAGPAAMLLFAFVTYYTAALLAECYRTGHPETGKRNYTYMDAVRSNLGGVKVVFCGVIQYANLVGVAIGYTIASSISMQAVSRAGCFHKRGHAVPCKSSSNPYMILFGAVQILFSQIPDFDQIWWLSIVAAVMSFTYSAIGLSLGIAQTVANGGFKGSLTGISIGADVTSTQKVWHSLQAFGDIAFAYSFSNILIEIQDTIKAPPPSESKVMQKATRLSVATTTIFYMLCGCMGYAAFGDKAPDNLLTGFGFFEPFWLIDVANVAIVVHLVGAYQVFCQPIFAFVERRAAAAWPDSAFVARELRVGPLALSVFRLTWRSAFVCATTVVAMLLPFFGNVVGFLGAVSFWPLTVYFPVEMYIKQRRVPRGSTKWVCLQTLSVACLVVSIAAAAGSIADVIEALKVYHPFSS

SEQ ID NO: 6494 - protein, 54 aa, Zea mays
  Clone ID: PAT_MRT4577_94884C.1.pep
AGAQKDLGNQEGQDHEKAAEGVEAEHEQDDVDGVFLADAVMRLSVGHGLGPRVR

SEQ ID NO: 6495 - protein, 53 aa, Zea mays
  Clone ID: PAT_MRT4577_94991C.1.pep
PQAGSNISRKPLGQRGQLIYTSASPQLTAAEHMWHQYLPAPACSAIAAEHLAL

SEQ ID NO: 6496 - protein, 43 aa, Zea mays
  unsure (1)..(43): unsure at all Xaa locations
  Clone ID: PAT_MRT4577_95056C.1.pep
MSASDVEYRCFVGXLAFSTSNDSLENAFSSYCDILDSNVITYR

SEQ ID NO: 6497 - protein, 117 aa, Zea mays
  unsure (1)..(117): unsure at all Xaa locations
  Clone ID: PAT_MRT4577_95065C.1.pep
MHIRVPTMAPKIFRFLMLLGLSASXVATVTIFPQCSQAPIAVLITPYLSPTVSSMCENPIVQPYXIQHAIATGILPLXPLFLQQPCALLQXLPLVHLVAIQYIRAQQLQQLVLANIA

SEQ ID NO: 6498 - protein, 80 aa, Zea mays
  Clone ID: PAT_MRT4577_95066C.1.pep
MGGFVGTHKTKAEFKRFQVKFNRRLSVKTDYRASIRLINQDKNKYNTPKYIFVSRFTNKDITSQIIFASIAFDMDLASVY

SEQ ID NO: 6499 - protein, 54 aa, Zea mays
  Clone ID: PAT_MRT4577_95234C.1.pep
LATHKKAERFMTQIGARQDTPRCAEIEHQEHRHNRAPFRQGDGARPYIVSPKSR

SEQ ID NO: 6500 - protein, 399 aa, Zea mays
  Clone ID: PAT_MRT4577_95273C.1.pep
MMNLSAAANGRDEFPPYVVPSNAAAPPPSLLPTMEQQQESSIHREHHQLLGYNLEANSLALLPPSNAAAAHHHTTFAGGHSPHDILHFYTPPPSAASHYLAAAAGNPYSHLVSAPGTTFHQTSSSYYPPAAAAQAAPEYYFPTLVSSAEENMASFAATQLGLNLGYRTYFPPRGGYTYGHHPPRCQAEGCKADLSSAKRYHRRHKVCEHHSKAPVVVTAGGLHQRFCQQCSRFHLLDEFDDAKKSCRKRLADHNRRRRKSKPSDADAGDKTRAHANKAAAAKDKAESSSKNMDIGDGLGAQILGSALLSKEQDQAMDLGEVVKEAVDPKGKASMQQHYGFPFHSSSAGSCFPQTQAVSSDTTSNIGQVQEPSLGFHHQHHQHSNILQLGQAMFDLDFDH

SEQ ID NO: 6501 - protein, 73 aa, Zea mays
  Clone ID: PAT_MRT4577_95443C.1.pep
LPRKHPLYIECFNGRLVHPCMLIVVNACDHLQLAAYRLPQPVATFEHLFVDDILITNTLTWLLTNRQPRYLID

SEQ ID NO: 6502 - protein, 286 aa, Zea mays
  Clone ID: PAT_MRT4577_95672C.1.pep
MGITINSFPKPQPPTNLRLPSPSDPPRPQQSAMSSSPTPAPDAGAAAMAVDDSSETDQLDSMSTEDIVRATRLLDNEVRVLKDELQRNNLELENVKDKIKENQEKIKLNKQLPYLVGNIVEILEMNPEDEAEEDGANIDLDSQRKGKCVVLKTSTRQTIFLPVIGLVDPDNLKPGDLVGVNKDSYLILDTLPSEYDSRVKAMEVDEKPTEDYNDIGGLEKEIQELVEAIVLPMTHKEQFQKLGIRPPKGVLLYGPPGTGKTLMARACAAQTNATFLKLAGPQLVQM

SEQ ID NO: 6503 - protein, 75 aa, Zea mays
  Clone ID: PAT_MRT4577_9575C.1.pep
RPSLAPQAGGSAPGLVCLCVVTLPSHQRGRLVPKLPFPLWSSPANIVIKSVWVMVCYQNIGSCMNGPVHGLGFLA

SEQ ID NO: 6504 - protein, 587 aa, Zea mays
  unsure (1)..(587): unsure at all Xaa locations
  Clone ID: PAT_MRT4577_95838C.1.pep
MGSYAYKYCMCFTRKFRSPDAQPPPDVRAAHLSFASDAHALRRFVAGVQGESPADVDRILAMLSGGHSHGIARLVTRSPAASTPTLEDFFAFLFSPDLNPPIAHQVHQDMSAPFSHYFVFTGHNSYLTGNQLNSDSSDVPIVKALQRGVRVIELDMWPNPSKDNVDILHGGTLTAPVEMIKCLKSIKEYAFCASNYPLVITLEDHLTSDLQAKVATMLTETFGDLLFVPNPDPMKEFPSPASLMKRIIISTKPPQEYKEFLKAENNRSGSGNIAELPDQGSLRRIDSNADESDGKDELDEQDEEDSDEDDPKFQQDTACEYRKLITIQAGKPKGHLRDALKVDPDKVRRLSLSETQLAKATISHGAEVIRFTQKNILRVYPKGTRVNSSNYDPMNAWTHGAQMVAFNMQGHDKALRLMQGFFRANGGCGYVKKPDFLLRTGPNGEVFDPKASLPVKKPLXKVKVYMGDGWRMDFSKTHFDAFSPPDFYTRVGIAGVKAHSVMKKTRVIEAQWVPMWDEEFTFLLTVPELALLRVEVQEYDMSEKPDFGGQTVLPVWELKQGIRAVPLHDRKGVRYKSVRLLMRFDFV

SEQ ID NO: 6505 - protein, 77 aa, Zea mays
  Clone ID: PAT_MRT4577_95881C.1.pep
EEFHSLAAVDYRLPHRFRGRGTGRALSRESVFIVSAQALLPLVVMKGTNSRHLFRIKRSNSIITDFTHSFDNLNMMY

SEQ ID NO: 6506 - protein, 100 aa, Zea mays
  Clone ID: PAT_MRT4577_96002C.1.pep
MAAEGEKKMITLKSSDGEEFEVEEAVAMDSQTIRHMIEDDCADNGIRLPNGHSNILCKVIECCNKHVHADADAGDASKAGYHNVGDAFDNSNDNSGEDRQ

SEQ ID NO: 6507 - protein, 506 aa, Zea mays
  Clone ID: PAT_MRT4577_96005C.1.pep
MAPPQTIPRRGLFIGGAWREPCLGRRLPVVNPATEATIGDIPAGTAEDVEIAVAAARDAFSRDGGRHWSRAPGAVRANFLRAIAAKIKDRKSELALLETLDSGKPLDEASGDMDDVAACFEYYADLAEALDGKQQSPISLPMENFKSYVLKEPIGVVGLITPWNYPLLMATWKVAPALAAGCTTILKPSELASVSCLELGAICMEIGLPPGVLNIITGLGPEAGAPLSSHSHVDKVAFTGSTETGKRIMISAAQMVKPVSLELGGKSPLIVFDDIGDIDKAVEWTMFGIFANAGQVCSATSRLLLHEKIAKKFLDRLVAWAKNIKVSDPLEEGCRLGSVISEGQYEKIKKFISTARSEGATILYGGGRPQHLRRGFFLEPTIITDVSTSMQIWQEEVFGPVICVKEFRTESEAVELANDTHYGLAGAVISNDQERCERISKALHSGIIWINCSQPCFVQAPWGGNKRSGFGRELGEWGLDNYLTVKQVTKYCSDEPWGWYQPPSKL

SEQ ID NO: 6508 - protein, 289 aa, Zea mays
  Clone ID: PAT_MRT4577_96019C.1.pep
MEGKEEDVRLGANKFSERQPIGTAAQGAADDKDYKEPPPAPLFEPGELKSWSFYRAGIAEFVATFLFLYITILTVMGVSKSTSKCATVGIQGIAWSFGGMIFALVYCTAGISGGHINPAVTFGLFLARKLSLTRAIFYIIMQCLGAICGAGVVKGFQQGLYMGNGGGANVVAPGYTKGDGLGAEIVGTFILVYTVFSATDAKRNARDSHVPILAPLPIGFAVFLVHLATIPITGTGINPARSLGAAIIYNRDHAWSDHWIFWVGPFIGAALAAIYHQVIIRAIPFKSRS

SEQ ID NO: 6509 - protein, 585 aa, Zea mays
  Clone ID: PAT_MRT4577_96073C.1.pep
MAEAGDPTLEQGLLANPEESNQLTYSGDGSVDFSGNPVVKEKTGRWKACPFILGNECCERLAYYGISTNLVTYLTKKLHDGNSSAARNVTTWQGTCYLTPLIGAILADAYWGRYWTIATFSTIYFIGMSVLTLSASVPMLMPPSCEGAFCPEASPLQYTVFFLGLYLIALGTGGIKPCVSSFGADQFDDTDPAERIQKGSFFNWFYFSINIGALISSSFLVWVQDNVGWGLGFGIPTVFMGLAIISFFSGTSLYRFQKPGGSPITRVCQVIVASLRKWNVPVPEDSSLLYELPNGVSTIEGSRQIEHTDELRCLDKAATVTEVDVKTADFNNPWRICTVTQVEELKILVRMFPVWATTIVFSAVYAQMSTMFVEQGMVLDPSLGSFKIPPASLSTFDTLSVIICVPMYDYIVVPIARRFTGNERGFTELQRMGIGLVISIIAMSVAAVLEIKRLAVAREAHLVDQNVPVPLSIFWQIPQYFLIGLAEIFTFIGALEFFYDQSPDAMRSLCSALNLLTTAFGNYLSTFILTMVAYFTTRGGNPGWIPDNLNEGHLDYFFLLIAGISFLNLIVYVLCAGKYKSKKAA

SEQ ID NO: 6510 - protein, 89 aa, Zea mays
  unsure (1)..(89): unsure at all Xaa locations
  Clone ID: PAT_MRT4577_96215C.1.pep
HDPFEVLDQRGVGELVKFATERVRKARSNLKVGICGEHGGEPSSVXFFAKXGLDYVSCSPFRVPIARLAAAQVLVLSCLLIGNRISAAG

SEQ ID NO: 6511 - protein, 96 aa, Zea mays
  unsure (1)..(96): unsure at all Xaa locations
  Clone ID: PAT_MRT4577_96289C.1.pep
MALSVVKTSYGLEYKVKDLSQADFGRLETELTPVRMPGLIACRTKLSPCKPFIRARISGSMHMTIQTAVLMETITALGSEVRXCCCNIFCTHDHAD

SEQ ID NO: 6512 - protein, 493 aa, Zea mays
  Clone ID: PAT_MRT4577_96538C.1.pep
MAGAAAVETAAAAAAANGKACCHAAKGPGYATPLEAMEKGPREKLVYVTCVYNGTGINKPDYLATVDLDPSSPTYSQVIHRLPVTHIGDELHHSGWNSCSSCHGDPSAKRRFLILPSLLSGRVYVVDTATDPRAPSLHKVVESEDIAENTGLGFPHTSHCLASGDIMISCLGDKEGNAAGNGFLLLDSEFNVKGRWEKPGHSPLFGYDFWYQPRHKTMISSSWGAPAAFRTGFDLQHVQDGLYGRHLHVYDWPGGELKQTLDLGDTGLLPLEVRFLHDPSKDTGYVGCALTSNMVRFFKTADGSWSHEVAISVKPLKVRNWILPEMPGLITDFVISLDDRYLYFVNWLHGDIRQYNIEDPAKPFLAGQVWVGGLLQKGSDVVYVTDDGQEQQYNVPQVKGHRLRGGPQMIQLSLDGKRIYVTNSLFSRWDEQFFGDDLVKKGSHMLQIDVDTEKGGLAVNPNFFVDFGTEPDGPALAHEMRYPGGDCTSDIWI

SEQ ID NO: 6513 - protein, 75 aa, Zea mays
  Clone ID: PAT_MRT4577_96581C.1.pep
MASAKRSREENVYMAKLAQQAERYKEMVEFMDKVAKTVDSDELTVEERSLLSVTYKNVIGARRASWRIISSIEQK

SEQ ID NO: 6514 - protein, 179 aa, Zea mays
  unsure (1)..(179): unsure at all Xaa locations
  Clone ID: PAT_MRT4577_96713C.1.pep
ALGVVACARVLVHFIGHQNIRXAQQLQXXCAXANLAXXLXQQQQXFFHFNXQLGSXXNSXXSYLQQTTELPFKPXLXXAAYXPAXXLPFSXXXAALNXSCXYLQQQXQLLXHSAXAXGGEGPATXXLTQPXXLLPFXQHVXPNAGTXXLQLQQLLPFNQLALTNPAVFYQQPIIGGALF

SEQ ID NO: 6515 - protein, 72 aa, Zea mays
  unsure (1)..(72): unsure at all Xaa locations
  Clone ID: PAT_MRT4577_9673C.1.pep
MAVTITLGKARQIFRSRGNPTVQVDVGPKDGSYAKGGVPNGASTGIYEGLELKDXDLDNLAKVVLKPATTVT

SEQ ID NO: 6516 - protein, 580 aa, Zea mays
  Clone ID: PAT_MRT4577_96895C.1.pep
MGEVEDMYTQDGTVDMKGNPAVKKGTGNWRACPYILANECCERLAYYGMSTNLVNYMKTRLGQVNSVASNNVTNWQGTCYITPLIGAFFADAYMGRFWTIAIFMIIYIFGLALLTMASSVKGLVPTSCGDKDVCHPTDAQAAVVFVALYLIALGTGGIKPCVSSFGADQFDENDEREKKSKSSFFNWFYFSINIGALVASTVLVYVQTHVGWGWGFGIPAVVMAIAVGSFFVGTPLYRHQKPGGSPLTRIAQVLVACARKWNVAVPADKSRLHETVDGESGIEGSRKLEHSEQLACLDRAAVVTAEDGAEASPWRLCSVTQVEELKSVIRLLPIWASGIVFAAVYSQMSTMFVLQGNTLDQSMGPRFKIPSATLSMVDTISVIVWVPVYDRAIVPLVRSYTGRPRGFTQLQRMGIGLVVSIFSMVAAGVLDIVRLRAIARHGLYGEDDIVPISIFWQIPQYFIIGCAEVFTFVGQLEFFYDQAPDAMRSMCSALSLTTVALGNYLSTVLVTIVTHITTRHGRIGWIPENLNRGHLDYFFWLLAVLSLLNFLAYLVIASWYKYKKTADDYPGAKGEHGTEH

SEQ ID NO: 6517 - protein, 228 aa, Zea mays
  unsure (1)..(228): unsure at all Xaa locations
  Clone ID: PAT_MRT4577_96897C.1.pep
MGEVEDMYTQDGTVDMKGNPAVKKGTGNWRACPYILANECCERLAYYGMSTNLVNYMKTRLGQVNSVASNNVTNWQGTCYITPLIGAFFADAYMGRFWTIAIFMIIYIFGLALLTMASSVKGLVPTSCGDKDVCHPTDAQAAVVFVALYLIALGTGGIKPCVSSFGADQFDENDEREKKSKSSFFNWFYFSINIGALVASTVLVYVQTHVGXWGWGFGIPAVVMAIAV

SEQ ID NO: 6518 - protein, 580 aa, Zea mays
  unsure (1)..(580): unsure at all Xaa locations
  Clone ID: PAT_MRT4577_96902C.1.pep
MGEVEDMYTQDGTVDMKGNPAVKKGTGNWRACPYILANECCERLAYYGMSTNLVNYMKTRLGQVNSVASNNVTNWQGTCYITPLIGAFFADAYMGRFWTIAIFMIIYIFGLALLTMASSVKGLVPTSCGDKDVCHPTDAQAAVVFVALYLIALGTGGIKPCVSSFGADQFDENDEREKKSKSSFFNWFYFSINIGALVASTVLVYVQTHVGWGWGFGIPAVVMAIAVGSFFVGTPLYRHQKPGGSPLTRIAQVLVACARKWNVAVPADKSRLHETVDGESGIEGSRKLEHSEQLACLDRAAVVTAEDGAEASPWRLCSVTQVEELKSVIRLLPIWASGIVFAAVYSQMSTMFVLQGNTLDQSMGPRFKIPSATLSMVDTISVIVWVPVYDRXIVPLVPSYTGRPRGFTQLQRMGIGLVVSIFSMVAAGVLDIVRLRAIARHGLYGENDIVPISIFWQIPQYFIIGCAEVFTFVGQLEFFYDQAPDAMRSMCSALSLTTVALGNYLSTVLVTIVTHITTRHGRIGWIPENLNRGHLDYFFWLLAVLSLLNFLAYLVIASWYKYKKTADDYPGAKGEHGTEH

SEQ ID NO: 6519 - protein, 81 aa, Zea mays
  unsure (1)..(81): unsure at all Xaa locations
  Clone ID: PAT_MRT4577_9696C.1.pep
MADEAKAXGYAAFSAGRFEEAVXYFTDAIGLVRDNQVVYSNRSVALALLHRYSDALSDAQNXTCDLMPDWAKGYSRLGAAH

SEQ ID NO: 6520 - protein, 422 aa, Zea mays
  Clone ID: PAT_MRT4577_97035C.1.pep
MDALPPLQRATSPPPQPRPQPPVPSRRYGVHFSASSFIQAPLTTLLEYSGILRPDPGGGTQQDGAGAGPGEVSIRIVAPGEAGTSSERPEEVIVEEEEEDGHATRTRPEDPSPAAGGGEGGRESSSSYQRYDIQQVARWVEQILPFSLLLLVVFIRQHLQGFFVTIWIAAVMFKSNDILRKQTALKRERKIPVLVGITILFVVHVSGFYWCYKNGDLIRPLMMLPPKEIPPFWHAIFIILVNDTMVRQTAMVVKCLLLMYYKNSRGRSYRRQGQMLTIVEYFLLLYRALLPTPVWYRFFLNKEYGSLFSSLTTGLYLTFKLTSVVEKVQSFLTALRALSHKDFHCGSYATSEQVAAAGDLCAICQEKMHVPILLRCKHVFCEDCVSEWFERERTCPLCRALVKPADLRSFGDGSTSLFFQLF

SEQ ID NO: 6521 - protein, 256 aa, Zea mays
  Clone ID: PAT_MRT4577_97181C.1.pep
MSREENVYMAKLAEQAERYEEMVEYMEKVAKTVDVEELTVEERNLLSVAYKNVIGARRASWRIVSSIEQKEESRKNEEHVNLIKEYRGKIEAELGNICDGILKLLDSHLVPSSTAAESKVFYLKMKGDYHRYLAEFKTGPERKESAESTMMAYKAAQDIALAELAPTHPIRLGLALNFSVFYYEILNSPDKACNLAKQAFDEAISQLDTLGEESYKDSTLIMQLLRDNLTLWTSDLTEDGADEGKEAPKGEAGDGQ

SEQ ID NO: 6522 - protein, 263 aa, Zea mays
  Clone ID: PAT_MRT4577_97182C.1.pep
MSREENVYMAKLAEQAERYEEMVEYMEKVAKTVDVEELTVEERNLLSVAYKNVIGARRASWRIVSSIEQKEESRKNEEHVNLIKEYRGKIEAELSNSGSRENTICDGILKLLDSHLVPSSTAAESKVFYLKMKGDYHRYLAEFKTGAERKESAESTMVAYKAAQDIALAELAPTHPIRLGLALNFSVFYYEILNSPDKACNLAKQAFDEAISELDSLGEESYKDSTLIMQLLRDNLTLWTSDLTEDGADEGKDAPKGDAGEGQ

SEQ ID NO: 6523 - protein, 256 aa, Zea mays
  Clone ID: PAT_MRT4577_97187C.1.pep
MAREENVYMAKLAEQAERYEEMVEYMEKVAKTVDVEELTVEERNLLSVAYKNVIGARRASWRIVSSIEQKEESRKNEEHVNLIKEYRAKIEAELSNICDGILKLLDSHLVPSSTAAESKVFYLKMKGDYHRYLAEFKTGPERKESAESTMMAYKAAQDIALAELAPTHPIRLGLALNFSVFYYEILNSPDKACNLAKQAFDEAISQLDTLGEESYKDSTLIMQLLRDNLTLWTSDLTEDGADEGKEAPKGEAGDGQ

SEQ ID NO: 6524 - protein, 280 aa, Zea mays
  Clone ID: PAT_MRT4577_97190C.1.pep
MAREENVYMAKLAEQAERYEEMVEYMEKVAKTVDVEELTVEERNLLSVAYKNVIGARRASWRIVSSIEQKEESRKNEEHVNLIKEYRAKIEAELSNICDGILKLLDSHLVPSSTAAESKVFYLKMKGDYHRYLAEFKTGPERKESAESTMMAYKAAQDIALAELAPTHPIRLGLALNFSVFYYEILNSPDKACNLAKQAFDEAISQLDTLGEESYKDSTLIMQLLRDNLTLWTSDLTEDGADEGKEAPKGEAGDVQKGTVILGERILFEPIVLDALCCRS

SEQ ID NO: 6525 - protein, 55 aa, Zea mays
  Clone ID: PAT_MRT4577_97200C.1.pep
YRCFIRGLSWATDDHSLHNAFNTYGEVLESNIILDQETHTSLDFSFDTFYTEDSM

SEQ ID NO: 6526 - protein, 83 aa, Zea mays
  Clone ID: PAT_MRT4577_97404C.1.pep
KARLSRGLPRSKVQGPSGALLKKEKDGDVFLWSNTSSLLPFVTMFVRSQKMYGGVCPKPTQVFLWWEPQNQKRTVFFFPPSKF

SEQ ID NO: 6527 - protein, 370 aa, Zea mays
  Clone ID: PAT_MRT4577_97516C.1.pep
MAAGAGGGELEALEGVRSIVLKPSESLDESRFTRIAGADFNDPAVGLEGLLASLASTGFQASNLGDAIDVVNQMLDWRLSHEKPSEDCDEAELDPKYRASVKCKIFLGFTSNLVSSGIRDIIRFLAQHHMVDVIVTSAGGIEEDLIKCLAPTYRGDFSLPGALLRSKGLNRIGNLLVPNDNYCKFENWIMPLFDQMLQEQSTENVWTPSKVIARLGKEINDESSYLYWAYKNNIPVYCPALTDGSLGDMLFCHAVRNPGLIIDIVQDIRLMNGEAIHATPRKTGIIVLGGGLPKHHICNANMFRNGADYAVYINTAQEFDGSDSGAHPDEAVSWGKIKGSAKPVKVHCDASIAFPLLVAATFARKVHNSK

SEQ ID NO: 6528 - protein, 87 aa, Zea mays
  Clone ID: PAT_MRT4577_97632C.1.pep
AGGAGSGAAGDGYGVGGAGYDGGNRAGGYASSCGFCRNWAVGPARPSYPVRGRVVYPSPECFLRSVSCLLLPPCVFALKRRLLCSGC

SEQ ID NO: 6529 - protein, 72 aa, Zea mays
  unsure (1)..(72): unsure at all Xaa locations
  Clone ID: PAT_MRT4577_97676C.1.pep
YYSRQHILPFSQXVGVSPVAFLTQHSLLPFYLHGGLNVGTFLQLHQLLPFNQLVLTNPAGFYQQPIIGGALF

SEQ ID NO: 6530 - protein, 153 aa, Zea mays
  unsure (1)..(153): unsure at all Xaa locations
  Clone ID: PAT_MRT4577_97760C.1.pep
QHRKHNTVPTVAAKNFXLLMLLGLSASAATATIFPQCSQAPIASLIPPYLSPTVXSSVCXENPILQPYRIQQAIPAGILPLSPLXSNKSSAXLLQQVPLVPLLAQNINAQQLQQPVLETLVATLXQQEVFSYNQLTGFNSASYLEEQQLPFSQ

SEQ ID NO: 6531 - protein, 272 aa, Zea mays
  Clone ID: PAT_MRT4577_97786C.1.pep
MDPSAVSFDSGGARRGGGAQMLLFGGGGSANSNGFFRGVPMAVLGMDDATRVGKRPFFTTHEELLEEEYYDEQAPEKKRRLTAEQVQLLERSFEEENKLEPERKTELARRLGMAPRQVAVWFQNRRARWKTKQLETDYDRLKAAYDALAADHQGLLADNDNLRAQVISLTEKLQGKETSPSATTAAQEVDQPDEHTAVSGTEELLAQQLKDNLHSSGDCTGHGTLSSEEDDGGVVSDEGCSFALPDAMFAAGFTHHGAEEVQLANWTSMFWN

SEQ ID NO: 6532 - protein, 271 aa, Zea mays
  unsure (1)..(271): unsure at all Xaa locations
  Clone ID: PAT_MRT4577_97787C.1.pep
MHPSAVSFDSGDGRAAXGGAQMLLFGGGGSANSNGFFRGVPMAVLAMDDATRVGKRPFFTTHDELLEEEYYDEQAPEKKRRLTAEQVQLLERSFEEENKLEPERKTELARRLGMAPRQVAVWFQNRRARWKTKQLETDYDRLKAAYNALAADHQGLLADNDSLRAQVICLTEKLQGKETSLSATIAAQEVDQPNEHTTGTEKLLAQQLKDDLHSSCGCTGHGALSSEEEDGGVVSDEGCNFDLPDAMFAVGVTNHGAEEAQLANWTSWFWN

SEQ ID NO: 6533 - protein, 107 aa, Zea mays
  unsure (1)..(107): unsure at all Xaa locations
  Clone ID: PAT_MRT4577_97851C.1.pep
GSPAFGFMGEQIEMAASDVEYRCFIRGLSWATDDHSLHNAFSTYGEVLXSKIILDRETQRSRGFSFRTLFTEEAMPNAIEGMNGKELDGRNITCNKAQSRGCRRSCG

SEQ ID NO: 6534 - protein, 87 aa, Zea mays
  unsure (1)..(87): unsure at all Xaa locations
  Clone ID: PAT_MRT4577_9787C.1.pep
KNCLKEAGIGTMLNELSSPVVFXRPKDXKFFPRWQLAXKGXIAPVVVMPSVNIAKVDYFLNELVXKRAPWFQDGINQPPCISKKVGV

SEQ ID NO: 6535 - protein, 53 aa, Zea mays
  Clone ID: PAT_MRT4577_97913C.1.pep
IVSRIKQSGVGLRRVRREYKAKKMSEEDYVSAIMEAVNRVVKLQQERGIEVLV

SEQ ID NO: 6536 - protein, 243 aa, Zea mays
  unsure (1)..(243): unsure at all Xaa locations
  Clone ID: PAT_MRT4577_97919C.1.pep
MDSASRVAPPPVSAGVRVRAPLVESVSCYCRLDTGLKTVVDARKLLXGAKMCMQPDVKQTKRKSRGSRKERCRAQAPLLPGLPDDLAIACLIRVPRVEHPNLRTVCKRWNRLLSGNYYYSLRKKLSMAEEWVYVFKRDREGKISWHAFDPLNQLWKSLPPVPPEYSEALGFGCAVLSGCYLYLFGGKDPLRGSMRRVVFYNARTNKWHRAPDMLRKRHFFGSCVIKKWLYVAGGECGSIQRTP

SEQ ID NO: 6537 - protein, 73 aa, Zea mays
  Clone ID: PAT_MRT4577_97947C.1.pep
ALQIGSLMSAPSASSCVEKQLSMSAQKTRYREEVFQHPHPGGFNQAKHSTARLVGLPHAAPGVGRGICRASAR

SEQ ID NO: 6538 - protein, 140 aa, Zea mays
  Clone ID: PAT_MRT4577_97997C.1.pep
VVCPTLYSESYYANAHAWHLVAATITLLLSQLAGRLFAFTLPLPLTANLLHSSHPPLSIHRPTLPTRHGGPRIRQLSTGGGTPYQRSERCPPRSYFRGGLGRPLPGHPPRGGRDLLHYLRAVQGHQAHRGYNGVVGQHLT

SEQ ID NO: 6539 - protein, 90 aa, Zea mays
  Clone ID: PAT_MRT4577_98095C.1.pep
PAPRPPPFIPQSHSPQATAATKVRRGTHYWEPSNYTRMQYRIKQVCGLCAPELALARSRAGRYYGQPKRWWCFFSPLASLAYLGSFFFSG

SEQ ID NO: 6540 - protein, 134 aa, Zea mays
  Clone ID: PAT_MRT4577_98097C.1.pep
MSEEKHHHFFHHHKKDGEEQPTGEYGYSETVAAEVVTTGEDEYEKYKKEEKEHKHKQHLGEAGAIAAGAFALYEKHEAKKDPEHAHRHKITEEVAAAAAVGAGGYAFHEHHEKKKDHKDADEASGEKKHHHLFG

SEQ ID NO: 6541 - protein, 131 aa, Zea mays; identical to SEQ ID NO: 5738
  Clone ID: PAT_MRT4577_98100C.1.pep

SEQ ID NO: 6542 - protein, 101 aa, Zea mays
  Clone ID: PAT_MRT4577_98174C.1.pep
PKDPRVFGDPPGDFVPARFLGEEGSKLLQYVYWSTAPETENPRVANKQCPGKNFLVLVGRVLLVELFLRYDPFPPKVGKELFGPRVFFPGVPKAPSGPGSE

SEQ ID NO: 6543 - protein, 104 aa, Zea mays; identical to SEQ ID NO: 5724
  Clone ID: PAT_MRT4577_98231C.1.pep

SEQ ID NO: 6544 - protein, 80 aa, Zea mays
  unsure (1)..(80): unsure at all Xaa locations
  Clone ID: PAT_MRT4577_98283C.1.pep
SGFFEVTHDVCHLTCADWLRAPGVQTPVIVRFSTVVHERGSPWTLRDPRGFAVKFYTRVWYFDLRGNNMPXFFITXGIKF

SEQ ID NO: 6545 - protein, 425 aa, Zea mays
  Clone ID: PAT_MRT4577_98362C.1.pep
MEAAGRLLLLIVSSLLLLFSPERPAEAAPPRIQPLATAALSRLYDTSNYGRLQLNNGLALTPQMGWNSWNFFACNINETVIRETADALVSTGLAALGYNFVNIDDCWSYVKRGKQDQLLPDPKTFPSGVKALADYVHGKGLKLGIYSDAGKFTCQVRPGSLGHENDDAAIFASWGIDYLKYDNCYNLGIKPQKRYPPMRDALNSTGRQIFYSLCEWGQYDPALWAGKVGNSWRTTDDITDTWKSMTDIADKNNKWASYAGPGGWNDPDMLEVGNGGMTLAEYRSHFSIWALMKAPLLIGCDVRNMTSETMEILSNKEVIQVNQDPLGVQGRKILGQGKYGCREVWAGPLSGNRLVVALWNRCSDTANVTMKLPAVGLDGYAAYSVRDLWKHETLSENVVGTFGAQVDVHDTKMYIFSPATIVASV

SEQ ID NO: 6546 - protein, 333 aa, Zea mays
  Clone ID: PAT_MRT4577_98428C.1.pep
MATSMGCLVLLCLVSSLLPSAVLGHPWGGLFPQFYDHSCPKAKEIVQSIVAQAVAKETRMAASLVRLHFHDCFVKGCDASVLLDNSSSIVSEKGSNPNRNSLRGFEVIDQIKAALEAACPGTVSCADIVALAARDSTALVGGPYWDVPLGRRDSLGASIQGSNNDIPAPNNTLPTIITKFKRQGLNVVDVVALSGGHTIGMSRCTSFRQRLYNQTGNGMADSTLDVSYAAKLRQGCPRSGGDNNLFPLDFITPAKFDNFYYKNLLAGKGLLSSDEILLTKSAETAALVKAYAADVNLFFQHFAQSMVNMGNISPLTGSQGEIRKNCRRLNNDH

SEQ ID NO: 6547 - protein, 354 aa, Zea mays
  unsure (1)..(354): unsure at all Xaa locations
  Clone ID: PAT_MRT4577_98430C.1.pep
TLNYSTWLVITNHLQHCYMXGCDASVLLDNSSSIVSEKGSNPNRNSLRGFEVIDQIKAALEAACPGTVSCADIVALAARDSTALVCSTIDNPFQPQGTDMIFVCVCVCIYIYSDSFGKLRYFLSSKXXGGPYWDVPLGRRDSLGASIQGSNNDIPAPNNTLPTIITKFKRQGLNGGDVAALSGXFLVFIRNIWPSLFTNLAHTHITHGYNIMCEYXGHTIGMSRCTSFRQRLYNQTXNGMADSTLDVSYAAKLRQGCPRSGADSTLFPLDVVAPAKFDNFYYKNLLAGRGLLSSDEVLLTKSAQTASLVKAYAADAGLFFRHFAQSMVSMGNISPLTGSQGEIRKNCRRLNSGH

SEQ ID NO: 6548 - protein, 901 aa, Zea mays
  Clone ID: PAT_MRT4577_98473C.1.pep
MDHVPALVLAGCCFLALLPGWACGLGSMSSIAVSYGEDGPVFCGLNSDGSHLVACFGADASVLYGAPPNIPFLGLTAGDGFVCGLLLDTRQPYCWGSNSYVKSGVPQPMVEGARYSELSAGDNHLCALRAAQDGGRGSSAATSLIDCWGYNMTATHAVDEAVSTVSAGSVFNCGLFARNRTVFCWGDETVSGVVGLAPRDLHFQSIGAGGYHVCGVLENAQVFCWGRSLEMQQVVPSSAIGDGDVNIVPMDAMSTVVGGRFHACGIRSLDHQVACWGFTLHNSTSPPKGLKMYALVAGDYFTCGVPAETSLMPRCWGNSGPLALPMAVPPGICVPTACSHGYYEYVNHGEVGSIKVCKPANSRLCLPCSTGCPEGLYESSPCNATADRVCQFDCLKCVTDECLSFCLSQKRTKSRKLMAFQMRIFVAEIVFAVVLVLSVSVTTCLYVRHKLRHCQCSNRELRLAKSTAYSFRKDNMKIQPDMEDLKIRRAQEFSYEELEQATGGFSEDSQVGKGSFSCVFKGILRDGTVVAVKRAIKASDVKKSSKEFHNELDLLSRLNHAHLLNLLGYCEDGSERLLVYEFMAHGSLYQHLHGKDPNLKKRLNWARRVTIAVQAARGIEYLHGYACPPVIHRDIKSSNILIDEDHNARVADFGLSILGPADSGTPLSELPAGTLGYLDPEYYRLHYLTTKSDVYSFGVVLLEILSGRKAIDMQFEEGNIVEWAVPLIKAGDIFAILDPVLSPPSDLEALKKIASVACKCVRMRGKDRPSMDKVTTALEHALALLMGSPCIEQPILPTEVVLGSSRMHKVSQMSSNHSCSENELADGEDQGIGYRAPSWITFPSVTSSQRRKSSASEADIVGRRATDGRNVGSSIGDGLRSLEEEIAPASPQENLYLQHNF

SEQ ID NO: 6549 - protein, 128 aa, Zea mays
  unsure (1)..(128): unsure at all Xaa locations
  Clone ID: PAT_MRT4577_98547C.1.pep
ARLLIHQPLALSQQLPLLQRVAQNIRAQQLQQLVLTNLAAYSXQHQLVPFNQLAALNSAAYSQHQLPFIQIVDAYHQQFLTFNQLSAFNSAAYLQQQQLLPFSQLANVNPDAFLTQQHLLQFYLHAMP

SEQ ID NO: 6550 - protein, 57 aa, Zea mays
  Clone ID: PAT_MRT4577_98621C.1.pep
GLKKFFPSMGGDKNTNPGHKRYCFNELGIHYIGKYIPKQTLKSFQNQKKGSPFGGPH

SEQ ID NO: 6551 - protein, 48 aa, Zea mays
  Clone ID: PAT_MRT4577_98685C.1.pep
QDNKDVRHVKTYELALKDKDFIEGPWSQNNVDNGAGLSIPVPAPLGGV

SEQ ID NO: 6552 - protein, 69 aa, Zea mays
  unsure (1)..(69): unsure at all Xaa locations
  Clone ID: PAT_MRT4577_98731C.1.pep
MAAKIFCLLMLLGLSASAATATIFPQCSQASIASLHPAYLSPAACAVCEYSILXPYTIHHALATGIIPL

SEQ ID NO: 6553 - protein, 257 aa, Zea mays
  Clone ID: PAT_MRT4577_98913C.1.pep
MSREDNVYMAKLAEQAERYEEMVEYMEKVAKTVDVEELTVEERNLLSVAYKNVIGARRASWRIISSIEHKEESRKNEEHVIQIKEYRGKIEAELSNICDGILKLIDSHLVPSSTAAESKVFYLKMKGDYHRYLAEFKTGAERKEAAESTMIAYKAAQDIALAELASTHPIRLGLALNFSVFYYEILNSPDKACNLARQAFDEAISQLDTLGEDSYKDSTLIMQLLRDNLTLWTADSTTEDGIEEGNEASKGDAGEGQ

SEQ ID NO: 6554 - protein, 252 aa, Zea mays
  Clone ID: PAT_MRT4577_98915C.1.pep
MSREENVYMAKLAEQAERYEEMVEYMEKVAKTTDVQELTVEERNLLSVAFKNVIAAPRASWRIISSIEQKEESRKNEEHVAQIKEYRGKIEAELSNICDGILKLLDTHLVPSSTATESKVFYLKMKGDYHRYLAEFKTGAERKESAESTMVAYKAAQDIALAELPPIHPIRLGLALNFSVFYYEIQNSPDKACNLAKEAFDEAISQLDMLGEDSYKDSNLIMQLLRDNLTLWTEDGIEEGLESSKGDAGEGQ

SEQ ID NO: 6555 - protein, 105 aa, Zea mays
  Clone ID: PAT_MRT4577_99007C.1.pep
TCFIDYRKDRSFFAPQGLGWLAPADQVVAAAQAASAARSTPYLQETSTGVQATAGLQPAPEKKAAPDLHEDGDESHEDVHRLKPEASTAIATSAIALNIDTRPWI

SEQ ID NO: 6556 - protein, 272 aa, Zea mays
  unsure (1)..(272): unsure at all Xaa locations
  Clone ID: PAT_MRT4577_99082C.1.pep
MGRGKVQLKRIENKINRQVTFSKRRNGLLKKAHEISVLCDAEVAVIVFSPKGKLYEYATDSRMDKILERYERYSYAEKALISAESESEGNWCHEYRKLKAKIETIQKCHKHLMGEDLESLNPKELQQLEQQLESSLKHIRSRKSHLMAESISELQKKERSLQEENKALQKELAERQKAVASRQQQQQQXQWDQQTHAQAQTSSSSSSFMMRQDQQGLPPPHNICFPPLTMGDRGEELAAAAAAQQQQPLPGQAQPQLRIAGLPPWMLSHLNA

SEQ ID NO: 6557 - protein, 118 aa, Zea mays
  unsure (1)..(118): unsure at all Xaa locations
  Clone ID: PAT_MRT4577_99248C.1.pep
MLDAAAVLAAALLLLAAGAGTAYAAVSCDQVTSYVAPGLGHAMRSAESPSAVRCSVVRSVNSRASSAADRQATCNCLKSMXTAXPAGVSMDNADNIPGKCGVSVGVPISHTADCTKIN

SEQ ID NO: 6558 - protein, 122 aa, Zea mays
  unsure (1)..(122): unsure at all Xaa locations
  Clone ID: PAT_MRT4577_99251C.1.pep
MAARSSSQQLAAAAVLAAALLVLAAAAATPPAAASCGEVTTSEAPGLAYAMDSAAPPSAACCSGVRSLNSRASPAADRLVICTCLQSMTGRLGGGVSNDQXGNYPGKCGGPLAATINPNGHC

SEQ ID NO: 6559 - protein, 129 aa, Zea mays
  Clone ID: PAT_MRT4577_99256C.1.pep
MAARSSSQQLVAAAAAAVLAAALLLLAAGAGTASAAVSCGEVTSSVAPCLGYAMGSAASPSAACCSGVRSLNSRASSTADRQATCNCLKSMTGRLGGGVSMANAANIPGKCGVSVGVPISPTVDCTKIN

SEQ ID NO: 6560 - protein, 126 aa, Zea mays
  Clone ID: PAT_MRT4577_99257C.1.pep
MAARSSSQQLVAAAVLAAALLLLAAGAGTASAAVSCGEVTSSVAPCLGYAMGSAASPSAACCSGVRSLNSRASSTADRQATCNCLKSMTGRLGGGVSMANAANIPGKCGVSVGVPISPTVDCTKIN

SEQ ID NO: 6561 - protein, 129 aa, Zea mays
  unsure (1)..(129): unsure at all Xaa locations
  Clone ID: PAT_MRT4577_99258C.1.pep
MAARSSSQQLVAAAAAAVLAAALLLLAAGAGTASAAVSCGEVTSSVAPCLGYAMGSAASPSAACCSGVRSLNSRASSTADRQATCNCLKSMTGRXGXGVSMANAANIPGKCGVSVGVPIIPTVDCTKIN

SEQ ID NO: 6562 - protein, 126 aa, Zea mays
  Clone ID: PAT_MRT4577_99262C.1.pep
MAARSSSQQLVAAAVLAAALLLLAAGAGTASAAVSCGEVTSSVAPCLGYAMGSAASPSAACCSGVRSLNSRASSAADRQATCNCLKSMTGRLGGGVSMANAANIPGKCGVSVGVPISPTVDCTKID

SEQ ID NO: 6563 - protein, 93 aa, Zea mays
  Clone ID: PAT_MRT4577_99318C.1.pep
PRYGGGGYAGGGGSGGGGGGSGGGGAGYGGGTRGGGFGNSPGNWRNLPVGPPRPSYPFRSRVVSPSPEGLSSFVSCLLFPPCVFDLRSLCARC

SEQ ID NO: 6564 - protein, 109 aa, Zea mays
  unsure (1)..(109): unsure at all Xaa locations
  Clone ID: PAT_MRT4577_99484C.1.pep
MASMTMALSSTAFAGKAANVPSSSAFGEARATMRKTAAKAKPAAASGSPWYAPHRVLYLGALAGEPPTYLACESXSEYAVITAGVRALLVPEASFFFLGAMPIGCTATV

SEQ ID NO: 6565 - protein, 52 aa, Zea mays
  unsure (1)..(52): unsure at all Xaa locations
  Clone ID: PAT_MRT4577_99523C.1.pep
MPSLRXVWVQGYKAFQPGQDLMLMASPFWNIKFPPPSSQNVGRLIKNGDPCV

SEQ ID NO: 6566 - protein, 258 aa, Zea mays
  unsure (1)..(258): unsure at all Xaa locations
  Clone ID: PAT_MRT4577_9957C.1.pep
IGTLEAGRGKYLSPSRQQHQPRLLEFDRHGEPRKGKKDYSTAILERKKSPNRLVVDEATNDDNSVVALHPDTMERLQLFRGDTVLIKGKKRKDTVCIVLADETCEEPKVRMNKIVRKNLRVRLGDVVSVHQCPDVKYGKRVHILPIDDTIEGITGNLFDAFLKPYFLEAYRPLRKGDLFLVRGGMRSVEFKVIETDPAEYCIVAPDTEIFCEGEPIKREDEERLDEVGYDDVGGVRKQMAQIRELVELPLRHPXLFKS

SEQ ID NO: 6567 - protein, 200 aa, Zea mays
  unsure (1)..(200): unsure at all Xaa locations
  Clone ID: PAT_MRT4577_99607C.1.pep
ESLKRETAPXFLTEHGVRRPSILGVREHIFTGSVSSLAWFMSNQEHSFVTIGQRLLANPLKVRFHYGHPDVFDRLFHLTTGGVSKASKSINLSEDIFAGYNSTLRGGNVTHHEYVQVGKGRDVGLNQISKFEAKIANGNGEQTLSRDIYRLGHRFDFFRMLSCYFTTVGFYFSTLLTVVTVYVFLYGRLYLALSGLEEGL

SEQ ID NO: 6568 - protein, 807 aa, Zea mays
  Clone ID: PAT_MRT4577_9961C.1.pep
MASQGEPSSSDPKGKKDYSTAILERKKSPNRLVVDEATNDDNSVVALHPDTMERLQLFRGDTVLLKGKKRKDTICIVLADETCEEPKVRMNKVVRKNLRVRLSDVVSVHQCPDVKYGKRVHILPIDDTIEGITGNLFDAFLKPYFLEAYRPLRKGDLFLVRGGMRSVEFKVIETDPAEYCIVAPDTEIFCEGEPIKREDEERLDEVGYDDVGGVRKQMAQIRELVELPLRHPQLFKSIGVKPPKGILLYGPPGSGKTLIARAVANETGAFFFLINGPEIMSKLAGESESNLRKAFEEAEKNAPSIIFIDEIDSIAPKREKTHGEVERRIVSQLLTLMDGLKSRAHVIVMGATNRPNSIDPALRRFGRFDREIDIGVPDEVGRLEVLRIHTKNMKLAEDVDLEIIAKDTHGYVGADLAALCTEAALQCIREKMDIIDLEDETIDAEILNSMAVSNDHFKTALGTSNPSALRETVVEVPNVSWEDIGGLENVKRELQETVQYPVEHPEKFEKFGMSPSKGVLFYGPPGCGKTLLAKAIANECQANFISVKGPELLTMWFGESEANVREIFDKARQSAPCVLFFDELDSIATQRGSSVGDAGGAADRVLNQLLTEMDGMNAKKTVFIIGATNRPDIIDPALLRPGRLDQLIYIPLPDEQSRLQIFKACLRKSPVAKDVDLNALAKYTQGFSGADITEICQRACKYAIRENIEKDIERERRRKDNPEAMEEDEVDDIAEIKAAHFEESMKYARRSVSDADIRKYQAFAQTLQQSRGFGSEFRFPDQPTAAAAAADPFASAAAAADDDDLYS

SEQ ID NO: 6569 - protein, 103 aa, Zea mays
  unsure (1)..(103): unsure at all Xaa locations
  Clone ID: PAT_MRT4577_99757C.1.pep
LMLLVLYASAASSTIISQCSQAPIASLLPPYXLSPTLSSKCENPILXPYRIQQAFAPGILPXSPLFLQQPTALLQHLPLXHLSAQNIQAQQLQQLVLGNLADY

SEQ ID NO: 6570 - protein, 65 aa, Zea mays
  Clone ID: PAT_MRT4577_99767C.1.pep
CIEKQSFEPWSSLEVLPDWGKKGHGIVFFMSAATSNVHIAWVCKNTVEHHIPHQQAFRLPMRRGS

SEQ ID NO: 6571 - protein, 91 aa, Zea mays
  unsure (1)..(91): unsure at all Xaa locations
  Clone ID: PAT_MRT4577_99835C.1.pep
VSYILNVDCDHYFNSNKAFREAMSLMMDPAIGWKTCHAQLPQRCDGIDLHDRYANRNIIFXYDINCESLYGFQCTDDGGTRCVFNRQALYG

SEQ ID NO: 6572 - protein, 53 aa, Zea mays
  Clone ID: PAT_MRT4577_99841C.1.pep
SYIQMLDRRQPAKVQARLTMIEFYQSIDLPMALFICKPSRIAKTSACPQWATL

SEQ ID NO: 6573 - protein, 92 aa, Zea mays
  unsure (1)..(92): unsure at all Xaa locations
  Clone ID: PAT_MRT4577_99927C.1.pep
RENMNGKERGGRNITGNQAQSRGGGGGGGRYCXGRGRRSYGGGPHDSSYGAGGGYCGLPAGGGGTYXGGGGYSSRREGGGGGYCGRSGCWRD

SEQ ID NO: 6574 - protein, 136 aa, Zea mays
  Clone ID: PAT_MRT4577_99994C.1.pep
MARTKQTARKSTGGKAPRKQLATKAARKSAPATGGVKKPHRSRPGTVALREIRKYQKSTELLIRKLPFQRLVREIAQDFKTDLRFQSSAVSALQEAAEAYLVGLFEDTNLCAIHAKRVTIMPKDIQLARRIRGERA

SEQ ID NO: 6575 - protein, 800 aa, Oryza sativa
  Clone ID: PAT_MRT4530_100020C.1.pep
MSFSAISSSSSVSPHLTRRRLSPRVWSARPPFTGGGGGGCPMAAHERRTIDLEEGWAFMQKGITKLKNILEGKPEPQFSSEDYMMLYTTIYNMCTQKPPHDYSQQLYDKYRESFEEYITSMVLPSLREKHDEFMLRELVKRWSNHKVMVRWLSRFFHYLDRYFISRRSLPQLSEVGLSCFRDLVYQEIKGKVKSAVISLTYFLEQIDQEREGEQIDRALLKNVLDIFVEIGLTSMDYYENDFEDFLLKDTADYYSIKAQTWILEDSCPDYMLKAEECLKREKERVAHYLHSSSEQKLLEKVQHELLTQYASQLLEKEHSGCHALLRDDKVDDLSRMYRLFSRITRGLEPVSQIFKQHVTNEGTALVKQAEDAASNKKPEKKEIVGLQEQVFVRKIIELHDKYVAYVTDCFQGHTLFHKALKEAFEVFCNKGVSGSSSAELLATFCDNILKKGGSEKLSDEAIEDTLEKVVRLLAYISDKDLFAEFYRKKLARRLLFDKSANDEHERSILTKLKQQCGGQFTSKMEGMVTDLTVARDHQAKFEEFISTHSELNPGIALAVTVLTTGFWPSYKSFDINLPAEMVKCVEVFKEFYQTRTKHRKLTWIYSLGTCNINAKFEAKTIELIVTTYQAALLLLFNGVDRLSYSEIVTQLNLSDDDVVRLLHSLSCAKYKILSKEPNNRSISPNDVFEFNSKFTDKLRRLKIPLPPVDEKKKVVEDVDKDRRYAIDASIVRIMKSRKVLGHQQLVMDGVEQLGHIFKPDFQGCKEATSRIFSNKRFTWNGIIRHIEKIYRNWSCWVFYW

SEQ ID NO: 6576 - protein, 1581 aa, Oryza sativa
  unsure (1)..(1581): unsure at all Xaa locations
  Clone ID: PAT_MRT4530_100065C.1.pep
MPSWTPKRRSKQQQSRILFKPSSSLERPSVSANLVFPQELAMGQEDGDVPQPGVHRPRSRSGSIRRDAVAFEITSPADKRAPHAIHSSKENKGRDGDGSGGGVIGLGGGGGSARRTRLLHGRRTKGRRRREEEAPVGKGRERRWRRVGRRRLGMGGDGVGRRRSGKGKSGAGVGLGGGVGLGGVVGLERRRGAAVRTASSASVAAVVAPEGRCPWSSDAERRRQQEWMKNATEWYGSNFSKLQWHPADMTNSSDSSTTLLALLNRNMLKESLHDTIAGHIERNCKVDIDATLPRKVPAAAAPKRPQHLAASTSASVPGDKEHPQPGGRGVLSWTPGMAAIEQQMRKRALVTSVLSGRREVSPAMVVAALGRRCRVPSEDVRIEVTRPSDFLISFRREEDCASVLGWSGRFSVEGASISFRHWHRSVHARRSKLLFVVKLAVEGLPAHALEFEAIKQFLNKIDCQFIELFLPVDACMTEVLAWSVDPSKIPKEFTLDIPEPMQEWWMPPVMEDPDIHEPLVSQTPPAPPIEKRCLSSCWTAPPMTPTTTIARLCAGAPTAPSSXIDGTGPVVLSPPEPTPVEMEPASALGSPPEHTPEAMASLASLGSPPGTALGGLEVDVISDVVSSPMLAPEGPETVTILGAPVEHASPNEVLISIETVVMGPGSLTRPASAPAKLVVDPHVRESLGVGLARQISFEEPARDLLSSVAFTSSPPLPAVAPLAVVEGANLTFNPPGERESVPLSTGALEMVLGPWPEVHVASPQIVYRKRHLLPTSGRKWPTHRAALGLTQDGSPGAVPSLGDLVAPQPAAIIGTRPQATPARSKRRIEPYSHTPRRSERLAAINGGRHQHSVSKAQRVLMKKLRVVEDESKVEDTDILKYLELFKSPLVPAHVQALAALCNVRLCLHKGVWSLSLCVTNLEGGASWTLTNVYGPQETEQKIQFLEELTWVGQQCVQGAWCIVGDFNLLAAESDKNNGNVNRGLINRFRGLLNTLELRELYLFGRRYTWSSEQERPTITKINKVLMNADWEDFFRDAHLQALSSSASDHCPLLLACEAMVHRSRRFKFEAFWLHLEGFEEVVRSAWDVVPAGSNALSSLHFKLRATAMALKSWGERRISELRLQLAMAHEIILRLDGAMDLRLLSHEERSLRAALKGRCLALAALERIRLRQRARLRYLKHSGTASQFFYLKINARRRKKTIPVLQQGGVWGVTEEDKLAMAHDYFLEIMGSPSPPMVALDLGRLGLPTLDLSELEIEILEDEAKKVMLEMLSDRAPGPDGFGAAFYKRCWEIVKEDVVAALNLVLNANSQHLHLLNTASIILLPKKEDPMQLADYRPISLIHSFIKLFTKGVVQRLHRAKCPAILLKLDIAKAFDTVSWEFLLELLRHLGFGVKWHDCIAVLLVSSSTTVYEGCNWFGLELRESSITPIHCSDEQLAAVTEVLGCPVRLLPIVYLGLPLSVRKLGKADLQPMMDRLAKSLASWKPKLLALDARLAIIKHVLMVLPLYFMSVLELPVWAIKEIEKKCRGFLWKGDENAAGSCSLVAWDKLCLPIENGGLGIKDLRLMGVALRTRWPWLCRV

SEQ ID NO: 6577 - protein, 84 aa, Oryza sativa
  unsure (1)..(84): unsure at all Xaa locations
  Clone ID: PAT_MRT4530_100215C.1.pep
GLGKGGAKXHRKVLRDXIQGITKPAIRRLARRGGVKRISGLIYEETRGXLKIFLENVIRDVVTYTEHXXRKXVTXXDVVYXLKR

SEQ ID NO: 6578 - protein, 126 aa, Oryza sativa
  unsure (1)..(126): unsure at all Xaa locations
  Clone ID: PAT_MRT4530_100251C.1.pep
HSSAFECKKLVSATKARLKLDESADXKKRHEELTAKFEGLGKVIKDALADXATKVAVSDPVADSRCWLVTGEYGWTANMERIMKVHALEDSNMXGYISSXKKTIDINLDNAIMDELRKRADADKND

SEQ ID NO: 6579 - protein, 217 aa, Oryza sativa
  unsure (1)..(217): unsure at all Xaa locations
  Clone ID: PAT_MRT4530_100287C.1.pep
TRPGRARDDRNDYYAIGTYDGETDTWTPDNADIDVGIGLRHDYGKFYASKTFYDPVGRRRVLWGWIGETDSERADILKGWASLQSIPRTVMLDTKTGSNLLQWPVVEVENLRMRGKSFDGLDVSPGSVVPLDVGKATQLDIEAVFEVDTSAADGVVTEAGAAAYSCGTGGGAVGRGLMGPVGLLVLADDQLSERTAGFFYLVKGXDXNLTTFFWEDE

SEQ ID NO: 6580 - protein, 142 aa, Oryza sativa
  Clone ID: PAT_MRT4530_100303C.1.pep
HASAHASAHASAHASGERERERRRERTESLILINSNNEAIILQGTFGPDDNQDDSSNTSSGVSLGDYFLGPGLDILLQHLAESDLNRSGTPPAKKEAVEALPTVNIQEVLGCSVCLEDFEMGTEAKEMPCQHKFHSQCILPW

SEQ ID NO: 6581 - protein, 551 aa, Oryza sativa
  unsure (1)..(551): unsure at all Xaa locations
  Clone ID: PAT_MRT4530_100469C.1.pep
MGNACGGSLRSKYLSFKQTASQRHDTDDNNNAAAADSPKKPSRPPAAAKTDDHPVSASAPAAAMRRGQAPADLGSVLGHPTPNLRDLYAMGRKLGQGQFGTTYLCTELSTGVDYACKSISKRKLITKEDIEDVRREIQIMHHLSGHKNVVAIKGAYEDQLYVHIVMELCAGGELFDRIIQRGHYSERKAAELTRIIVGVVEACHSLGVMHRDLKPENFLLANKDDDLSLKAIDFGLSVFFKPGQTFTDVVGSPYYVAPEVLLKHYGPEADVWTAGVILYILLSGVPPFWAETQQGIFDAVLKGFIDFDSDPWPVISESAKDLITKMLNPRPKERLTAHEVLCHPWIRDHGVAPDRPLDPAVLSRIKQFSAMNKLKKMALRVIAESLSEEEIAGLKEMFQTMDADNSVAITYDERKEGFRKYGSTLQDTXNRDLMDWANIDNXGTIVYIEIISSILSLNKLEREEHLVAAFSYFDKDGSGYITVDELQQACKEHNMPDAFLDDVINEADQDNDGRIDYGEFVAMMTKGNMGVGRRTMRNSLNISMRDAPGAL

SEQ ID NO: 6582 - protein, 173 aa, Oryza sativa
  Clone ID: PAT_MRT4530_100499C.1.pep
MAAEGEKKMITLKSSDGEEFEVEEAVAMESQTIRHMIEDDCADNGIPLPNVNSKILSKVIEYCNKHVHAAAAAASKAADDAASAAAAVPPPSGEDLKNWDADFVKVDQATLFDLILAANYLNIKGLLDLTCQTVADMIKGKTPEEIRKTFNIKNDFTPEEEEEIRRENQWAFE

SEQ ID NO: 6583 - protein, 1130 aa, Oryza sativa
  unsure (1)..(1130): unsure at all Xaa locations
  Clone ID: PAT_MRT4530_101067C.1.pep
MMSSSRPTQCSSSSSRTRQSSRARILAQTTLDAELNAEYEEYGDSFDYSKLVEAQRTTGPEQQARSEKVIAYLHHIQRAKLIQPFGCLLALDEKTFNVIALSENAPEMLTTVSHAVPSVDDPPKLRIGTNVWSLFTDPGATALQKALGFADVSLLNPILVQCKTSGKPFYAIVHRATGCLVVDFEPVKPTEFPATAAGALQSYKLAAKAISKIQSLPGGSMEVLCNTVVKELFDLTGYDRVMAYKFHEDDHGEVFAEITKPGLEPYLGLHYPATDIPQAARFLFMKNKVRMICDCRARSIKIIEDESLHLDISLCGSTLRAPHSCHLQYMENMNSIASLVMAVVVNENEDDDEVGADQPAQQQKRKKLWGLLVCHHESPRYVPFPLRYACEFLAQVFAVHVNKEFELERQVREKSILRMQTMLSDMLLRESSPLSIVSGTPNIMDLVKCDGAALLYGGKVWRLQNAPTESQIRDIAFWLSDVHRDSTGLSTDSLHDAGYPGAAALGDMICGMAVAKINSKDILFWFRSHTAAEIRWGGAKHDPSDKDDSRRMHPRLSFKAFLEVVKMKSLPWNDYEMDAIHSLQLILRGTLNDDIKPTRAASLDNQVGDLKLDGLAELQAVTSEMVRLMETATVPILAVDSNGLVNGWNQKVAELTGLRVDEAIGRHILTVVEESSVPVVQRMLYLALQGKEEKEVKFEVKTHGSKRDDGPVILVVNACASRDLHDHVVGVCFVAQDMTVHKLVMDKFTRVEGDYKAIIHNPSXPLIPPIFGADEFGWCSEWNAAMTKLTGWHRDEVINKMLLGEVFDSTNASCLVKNKDAFVSLCILINSALAGDETEKAPFSFFDRNGKYIECLLSVNRKVNADGVITGVFCFIQVPSHELQHALHVQQASQQNALTKLKAYSYMRHAINNPLSGMLYSRKALKNTGLNEEQMKEVNVADSCHRQLNKILSDLDQDSVMNKSSCLDLEMVEFVLQDVFVAAVSQVLITCQGKGIRVSCNLPERYMKQTVYGDGVRLQQILSDFLFVSVKFSPVGGSVEISCSLTKNSIGENLHLIDLELRIKHQGKGVPADLLSQMYEDDNKEQSDEGMSLAVSRNLLRLMNGDVRHMREAGMSTFILSVELASAPAK

SEQ ID NO: 6584 - protein, 1007 aa, Oryza sativa
  Clone ID: PAT_MRT4530_101087C.1.pep
MQSECGTVKLIWIWWAQLINSVCTLQVNFAYDYRLLPQIFNRAMGPGTAFRKLASKMGGLEEIKNEAVDLENIPIEEVFEQLKCTREGLSSEEGNRRIEMFGPNKLEEKKESKILKFLGFMWNPLSWVMEMAAIMAIALANGGGKPPDWEDFVGIIVLLVINSTISFIEENNAGNAAAALMANLAPKTKVLRDGRWGEQEAAILVPGDIISIKLGDIVPADARLLEGDPLKIDQSALTGESLPVTKNPGDEVFSGSTCKQGEIEAVVIATGVHTFFGKAAHLVDSTNQVGHFQTVLTAIGNFCICSIAVGIVIEIIVMFPIQHRAYRSGIENLLVLLIGGIPIAMPTVLSVTMAIGSHKLSQQGAITKRMTAIEEMAGMDVLCSDKTGTLTLNKLSVDKNLVEVFTKGVDKDHVLLLAARASRTENQDAIDAAMVGMLADPKEARAGIREVHFLAFNPVDKRTALTYIDADGNWHRASKGAPEQILTLCNCREDVKRKVHAVIDKYAERGLRSLAVARQEVPEKSKESAGGPWQFVGLLPLFDPPRHDSAETIRKALHLGVNVKMITGDQLAIGKETGRRLGMGTNMYPSSALLGQNKDASLEALPVDELIEKADGFAGVFPEHKYEIVKRLQEKKHIVGMTGDGVNDAPALKKADIGIAVADATDAARSASDIVLTEPGLSVIISAVLTSRCIFQRMKNYTIYAVSITIRIVLGFLLIALIWKYDFSPFMVLIIAILNDGTIMTISKDRVKPSPLPDSWKLKEIFATGIVLGSYLALMTVIFFWAMHKTDFFTDKFGVRSIRNSEHEMMSALYLQVSIVSQALIFVTRSRSWSFIERPGLLLVTAFMLAQLVATFLAVYANWGFARIKGIGWGWAGVIWLYSIVFYFPLDIFKFFIRFVLSGRAWDNLLENKIAFTTKKDYGREEREAQWATAQRTLHGLQPPEVASNTLFNDKSSYRELSEIAEQAKRRAEIARLRELNTLKGHVESVVKLKGLDIDTIQQNYTV

SEQ ID NO: 6585 - protein, 462 aa, Oryza sativa
  Clone ID: PAT_MRT4530_101198C.1.pep
MQAHAHTLGLRISPPPPAPPRRRARPRRRAVRVAAAASAPRRETDPRKRVVITGMGLVSVFGNEVDAFYERLLAGESGVGAIDRFDAGGFPTRFAGQIRGFSSEGYIDGKNDRRLDDCLRYCIVSGKKALENAGLGKGSDGHTKLDKVRAGVLVGTGMGGLTVFSDGVQNLIEKGYKKISPFFIPYAITNMYSALLAMDAGFMGPNYSISTACATSNYCFYAAANHIRRGEADVIVAGGTEAAIIPIGLGGFVACRALSQRNDDPETASRPWDKERDGFVMGEGAGVLVMESLEHAMKRDAPIIAEYLGGAVNCDAYHMTDPRSDGLGVSSCINQSLEDAGVAPEEVNYINAHATSTLAGDLAEVRAIKQVFKNPSDIKINSTKSMIGHCLGAAGGLEAIAAVKAITTGWVHPTINQFNPEPEVDFDTVANEKQQHEVNVAISNSFGFGGHNSVVVFAPFKP

SEQ ID NO: 6586 - protein, 1137 aa, Oryza sativa
  Clone ID: PAT_MRT4530_101539C.1.pep
MSSSRSNNRATCSRSSSARSKHSARVVAQTPMDAQLHAEFEGSQRHFDYSSSVGAANRSGATTSNVSAYLQNMQRGRFVQPFGCLLAVHPETFALLAYSENAAEMLDLTPHAVPTIDQREALAVGTDVRTLFRSHSFVALQKAATFGDVNLLNPILVHARTSGKPFYAIMHRIDVGLVIDLEPVNPVDLPVTATGAIKSYKLAARAIARLQSLPSGNLSLLCDVLVREVSELTGYDRVMAYKFHEDEHGEVIAECKRSDLEPYLGLHYPATDIPQASRFLFMKNKVRMICDCSATPVKIIQDDSLTQPISICGSTLRAPHGCHAQYMASMGSVASLVMSVTINEDEDDDGDTGSDQQPKGRKLWGLMVCHHTSPRFVPFPLRYACEFLLQVFGIQINKEVELAAQAKERHILRTQTLLCDMLLRDAPVGIFTQSPNVMDLVKCDGAALYYQNQLWVLGSTPSEAEIKNIVAWLQEYHDGSTGLSTDSLVEAGYPGAAALGDVVCGMAAIKISSKDFIFWFRSHTAKEIKWGGAKHEPIDADDNGRKMHPRSSFKAFLEVVKWRSVPWEDVEMDAIHSLQLILRGSLQDEDANKNNNAKSIVTAPSDDMKKIQGLLELRTVTNEMVRLIETATAPILAVDITGSINGWNNKAAELTGLPVMEAIGKPLVDLVIDDSVEVVKQILNSALQGIEEQNLQIKLKTFNHQENNGPVILMVNACCSRDLSEKVVGVCFVAQDMTGQNIIMDKYTRIQGDYVAIVKNPSELIPPIFMINDLGSCLEWNEAMQKITGIKREDAVDKLLIGEVFTHHEYGCRVKDHGTLTKLSILMNTVISGQDPEKLLFGFFNTDGKYIESLMTATKRTDAEGKITGALCFLHVASPELQHALQVQKMSEQAAMNSFKELTYIRQELRNPLNGMQFTRNLLEPSDLTEEQRKLLASNVLCQEQLKKILHDTDLESIEQCYTEMSTVDFNLEEALNTVLMQAMPQSKEKQISIDRDWPAEVSCMHLCGDNLRLQQVLADFLACMLQFTQPAEGPIVLQVIPRMENIGSGMQIAHLEFRLVHPAPGVPEALIQEMFRHSPGASREGLGLYISQKLVKTMSGTVQYLRESESSSFIVLVEFPVAQLSTKRCKASTSKF

SEQ ID NO: 6587 - protein, 356 aa, Oryza sativa
  Clone ID: PAT_MRT4530_101669C.1.pep
MPRETPPPPPPEGGEVHEVVEGEDGQAEDQEERWARLLPELMSEVVRRVEASGGERWPARKDVVSCACVCRRWRDAAVAVVRPPAESGKITFPSSLKQPGPREFPMQCFIKRNKKNSTFYLYLGLTNATVDKGKFLMAARRFRRGPHTEYIVSLDADDLSQGSNAYMGKLRSDFWGTNFKIYDSKPPYDGAKASSSRSSRRFGSRRISPQVSAGNYEVGQVSYKYNLLKSRGPRRMYCALECPSTQETWENCLKTKFRKPTGNTVLRNKAPRWHEHLQCWCLNFHGRVTVASVKNFQLVAAADPNDPASSKDEETVLLQFGKVDDNIFTMDYRQPLSAFQAFAISLSSFGTKLACE

SEQ ID NO: 6588 - protein, 246 aa, Oryza sativa
  Clone ID: PAT_MRT4530_101732C.1.pep
MGRGKVQLKRIENKINRQVTFSKRRSGLLKKANEISVLCDAEVALIIFSTKGKLYEYATDSCMDKILERYERYSYAEKVLISAESDTQGNWCHEYRKLKAKVETIQKCQKHLMGEDLESLNLKELQQLEQQLENSLKHIRSRKSQLMLESINELQRKEKSLQEENKVLQKELVEKQKVQKQQVQWDQTQPQTSSSSSSFMMREALPTTNISNYPAAAGERIEDVAAGQPQHVRIGLPPWMLSHING

SEQ ID NO: 6589 - protein, 421 aa, Oryza sativa
  Clone ID: PAT_MRT4530_102034C.1.pep
MQSLLLPTFAAASAAPPRRGRVPPAGRASVSVRASASAAAVAPRRETDPRKRVVITGMGLVSVFGNDVDAYYDRLLAGESGIGPIDRFDASNFPTRFAGQIRGFSSEGYIDGKNDRRLDDCLRYCIVSGKKALESAGLALGSKSMDKIEKTRAGVLVGTGMGGLTVFSDGVQNLIEKGHRKITPFFIPGEADVMIAGGTEAAIIPIGVGGFVACRALSQRNDDPKTASRPWDQDRDGFVMGEGAGVLVMESLEHAMKRDAPIIAEYLGGAVNCDAYHMTDPRSDGLGVSSCIKQSLADAGVAPEEVNYINAHATSTLAGDLAEVNAIRQVFKDPSEIKINATKSMIGHCLGAAGGLEAIATVKAITTGWVHPSINQFNPEPAVEFDTVPNVKKQHEVNVGISNSFGFGGHNSVVVFAPFKP

SEQ ID NO: 6590 - protein, 623 aa, Oryza sativa
  Clone ID: PAT_MRT4530_102156C.1.pep
MLEKKATRSTRVDGVSGEAVIEEFERVTRDAANVQRETLRRILAENGGVEYLRGLGLAGATDPATFRARVPLATHADLEPYIDRIADGDASPVLTAKPATSISLRSVSPPAAACCSLTSIENVADHGGDHLTAGACSSGTTQGKRKYLLFNEELVKSTMQIYRISYAFRNREFPVENGKALQFIYSSRETRTKGGLTATTATTNVYRSEEFKATMRDIQSQCCSPDEVIFGPDFAQSLYCHLLAGLLAAGDVQIVSATFAHSVVLAFQTFERAWEDLCADIRRGEVSPSRVTSPAVRRAMAALLAAPNPGLADEVARKCAALSNWYGVIPALWPNARYVYGIMTGSMEHYVKKLRHYAGGLPLVAAEYGASEGWVGANVEPGTPPERATFTVLPDIAYFEFIPLKPVAGDGGYAEAEPVGLTEVAAGELYEVVMTTFAGLYRYRLGDVVKVAGFYNATPKLKFVCRRNLMLSINIDKNSEQDLQLAVDAAARAVLAGEKLEVVDYTSHADVSSDPGHYVVFLELNAADPAAVDGDVMQACCDELDRAFADAGYVGSRKSGAIAPLELRVLQRGTFQKVLRHYLSLGAPVSQFKSPRCVSRSNSGVLQILAGCTVNVFFSSAYD

SEQ ID NO: 6591 - protein, 467 aa, Oryza sativa
  Clone ID: PAT_MRT4530_102188C.1.pep
MADEKLAKLREAVAGLSQISDNEKSGFISLVARYLSGEEEHVEWAKIHTPTDEVVVPYDTLAAPPEDLEETKKLLNKLAVLKLNGGLGTTMGCTGPKSVIEVRNGFTFLDLIVIQIESLNKKYGSNVPLLLMNSFNTHEDTLKIVEKYTNSNIEVHTFNQSQYPRVVADEFLPWPSKGKTCKDGWYPPGHGDIFPSLMNSGKLDLLLSQGKEYVFIANSDNLGAIVDMKILNHLIHKQNEYCMEVTPKTLADVKGGTLISYEDKVQLLEIAQVPDAHVNEFKSIEKFKIFNTNNLWVNLKAIKRLVEADALKMEIIPNPKEVDGVKVLQLETAAGAAIRFFDHAIGINVPRSRFLPVKATSDLQLVQSDLYTLVDGFVTRNPARTNPSNPSIELGPEFKKVGCFLGRFKSIPSIVELDTLKVSGDVWFGSSITLKGKVTITAQPGVKLEIPDGAVIENKDINGPEDL

SEQ ID NO: 6592 - protein, 494 aa, Oryza sativa
  unsure (1)..(494): unsure at all Xaa locations
  Clone ID: PAT_MRT4530_102208C.1.pep
KANLLKSKKKKKKKTAKNLRPXXXKKSLSSCQMERAAADRSGAEEGESEWREELRQQQSQVDALRERLVEVKVGMKCSEEDSRKELDHLCRRVKTIATLLAYLKSKARIMAIPHLAHTSCGIRHQDGVGYVDRNGVPLADWSKGGESASCEGLDDETSADSSRVAEHGDANEGDVDVEDILKSIHVVTDVMETLVKRVIVAESEAANEKEKVRMGLEEIRRKTIQVESMSAKVEEMEKFAVGTNGMLNEMRQRVEDMVLETTRQRQRAAENEQELSRVKHDFESLRTYVGTLVNVRETLLSSEKQFETMEKLFDRLVARTNQLESEKAQKEAEVQKVVEENVRLRAMIDKKEAQLQAMSEQCKFMALSQEELQIDVAKQRMVPTAGDLRGHAAQRPTQVVDLVVVKGSRRRLHYYPAGTCTASHTPRPGKTHATPSSSASTRSDLSQSQPWRRLGFGSPPSSSPSSSPPPPSSKLPELSPRKKLLQLKLLMGLI

SEQ ID NO: 6593 - protein, 488 aa, Oryza sativa
  Clone ID: PAT_MRT4530_102369C.1.pep
MGENVVGTYYYPPSAAAMDGVELGHAAAGSKLFDDDGRPRRNGTMWTASAHIITAVIGSGVLSLGWAIAQLGWVAGPAVMVLFSLVTYYTSSLLSDCYRSGDPVTGKRNYTYMDAVNANLSGFKVKICGFLQYANIVGVAIGYTIAASISMLAIGRANCFHRKGHGDPCNVSSVPYMIVFGVAEVFFSQIPDFDQISWLSMLAAVMSFTYSVIGLSLGIVQVVANGGLKGSLTGISIGVVTPMDKVWRSLQAFGDIAFAYSYSLILIEIQDTIRAPPPSESAVMKRATVVSVAVTTVFYMLCGSMGYAAFGDDAPGNLLTGFGFYEPFWLLDIANAAIVVHLVGAYQVFCQPLFAFVEKWAAQRWPESPYITGEVELRLSPSSRRCRVNLFRSTWRTAFVVATTVVSMLLPFFNDVVGFLGALGFWPLTVYFPVEMYVVQKKVPRWSTRWVCLQMLSVGCLVISIAAAAGSIAGVMSDLKVYRPFKGY

SEQ ID NO: 6594 - protein, 109 aa, Oryza sativa
  Clone ID: PAT_MRT4530_102377C.1.pep
MASKLQAFWNHPAGPKTIHFWAPTFKWGISIANVADFAKPPEKISYPQQVAVACTGVIWSRYSMVITPKNWNLFSVNVAMAGTGLYQLSRKIRKDYFSDQKDDVASLEG

SEQ ID NO: 6595 - protein, 109 aa, Oryza sativa; identical to SEQ ID NO: 6594
  Clone ID: PAT_MRT4530_102380C.1.pep

SEQ ID NO: 6596 - protein, 1110 aa, Oryza sativa
  Clone ID: PAT_MRT4530_102471C.1.pep
MDILIPLLLSSIYVSSSAAAAETDAAALLRFKAFVHKDPRGVLSSWVDPGPCRWRGVTCNGDGRVTELDLAAGGLAGRAELAALSGLDTLCRLNLSGNGELHVDAGDLVKLPRALLQLDLSDGGLAGRLPDGFLACYPNLTDVSLARNNLTGELPGMLLASNIRSFDVSGNNMSGDISGVSLPATLAVLDLSGNRFTGAIPPSLSGCAGLTTLNLSYNGLAGAIPEGIGAIAGLEVLDVSWNHLTGAIPPGLGRNACASLRVLRVSSNNISGSIPESLSSCHALRLLDVANNNVSGGIPAAVLGNLTAVESLLLSNNFISGSLPDTIAHCKNLRVADLSSNKISGALPAELCSPGAALEELRLPDNLVAGTIPPGLSNCSRLRVIDFSINYLRGPIPPELGRLRALEKLVMWFNGLDGRIPADLGQCRNLRTLILNNNFIGGDIPVELFNCTGLEWVSLTSNQITGTIRPEFGRLSRLAVLQLANNSLAGEIPRELGNCSSLMWLDLNSNRLTGEIPRRLGRQLGSTPLSGILSGNTLAFVRNVGNSCKGVGGLLEFAGIRPERLLQVPTLKSCDFTRLYSGAAVSGWTRYQTLEYLDLSYNSLDGEIPEELGDMVVLQVLDLARNNLTGEIPASLGRLRNLGVFDVSRNRLQGGIPDSFSNLSFLVQIDISDNNLSGEIPQRGQLSTLPASQYAGNPGLCGMPLEPCGDRLPTATMSGLAAAASTDPPPRRAVATWANGVILAVLVSAGLACAAAIWAVAARARRREVRSAMMLSSLQDGTRTATTWKLGKAEKEALSINVATFQRQLRKLTFTQLIEATNGFSTASLIGSGGFGEVFKATLKDGSCVAIKKLIHLSYQGDREFMAEMETLGKIKHKNLVPLLGYCKIGEERLLVYEFMSHGSLEDTLHGDGGRSASPAMSWEQRKKVARGAARGLCFLHYNCIPHIIHRDMKSSNVLLDGDMEARVADFGMARLISALDTHLSVSTLAGTPGYVPPEYYQSFRCTVKGDVYSFGVVLLELLTGRRPTDKDDFGDTNLVGWVKMKVGDGAGKEVLDPELVVEGADADEMARFMDMALQCVDDFPSKRPNMLQVVAMLRELDAPPPATAI

SEQ ID NO: 6597 - protein, 149 aa, Oryza sativa
  Clone ID: PAT_MRT4530_102501C.1.pep
MLRGFPQARRLLRRMGLEKEDAYFWKQMGKGMLCTYALFGAAWLWNETSPLGWWTLKPRPKEEREMAHLYERRMFPYPGDEEAVEEFIKSGGALGTTIGPKGFADSNMDSDNMQKQLQSKKFDQEAQKLWFRMRNEVVQELQEKGFDVE

SEQ ID NO: 6598 - protein, 137 aa, Oryza sativa
  Clone ID: PAT_MRT4530_102600C.1.pep
MAGKGGKGLLAAKTTAAKSAEKDKGKKAPVSRSSRAGLQFPVGRIHRQLKQRTQANGRVGATAAVYSAAILEYLTAEVLELAGNASKDLKVKRITPRHLQLAIRGDEELDTLIKGTIAGGGVIPHIHKSLINKSSKE

SEQ ID NO: 6599 - protein, 118 aa, Oryza sativa
  Clone ID: PAT_MRT4530_102751C.1.pep
MAGVWVFEDGMVRRADSEAPSRGRGVGGGGGGGKVLVHVPSSEVVTSYEVLERRLRELGWERYLNDPCLLQFHQRSTVHLISVPRDFSRLKLVHMYDVVVKTRNVFEVRDAATTASPP

SEQ ID NO: 6600 - protein, 257 aa, Oryza sativa
  Clone ID: PAT_MRT4530_102917C.1.pep
MAANFWTSSHCKQLLDQEDVDKVPQADSDRGITLEEFRLVKIHMSFHIWRLAQQVKVRQRVIATAVTYFRRVYTRKSMTEYDPRLVAPTCLYLASKVEESTVQARLLVFYIKKMCASDEKYRFEIKDILEMEMKLLEALDYYLVVYHPYRPLLQLLQDAGITDLTQFAWGIVNDTYKMDLILIHPPYMIALACIYIASVLKDKDITLWFEELRVDMNIVKNISMEILDFYDTYKIDPQRGLPEDKIAPVMNKLPSKA

SEQ ID NO: 6601 - protein, 277 aa, Oryza sativa
  Clone ID: PAT_MRT4530_102919C.1.pep
MAANFWTSSHCEGSKQLLDQEDVDKVPQADSDRGITLEEFRLVKIHMSFLLQIKANHLMISDIWRLAQQVKVRQRVIATAVTYFRRVYTRKSMTEYDPRLVAPTCLYLASKVEESTVQARLLVFYIKKMCASDEKYRFEIKDILEMEMKLLEALDYYLVVYHPYRPLLQCFDFRLLQDAGITDLTQFAWGIVNDTYKMDLILIHPPYMIALACIYIASVLKDKDITLWFEELRVDMNIVKNISMEILDFYDTYKIDPQRGLPEDKIAPVMNKLPSKA

SEQ ID NO: 6602 - protein, 66 aa, Oryza sativa
  Clone ID: PAT_MRT4530_102927C.1.pep
IGRYLKKGRYAQRIGTGAPDYLADELEYLAAEVLELAGNAVSDNKKNRIIPRHVLLAIRNDEELCK

SEQ ID NO: 6603 - protein, 795 aa, Oryza sativa
  Clone ID: PAT_MRT4530_102993C.1.pep
MGKFLCPLFISFISVLLCCAASASPWQTTGTGTSLQVDHGETFLVSPDTTFSCGFYPSGDDTNAFYFSIWFTHATDRTVVWTADSGLPVNGHGSKISLSHEGNLAFTDVNGTTVWESKTGWGKHTTVALLNSGNMVMKASDSEDKIVWQSFDWPTDTLLPSQRLTREKRLVSQSGNHFLYFDNDNVLRLQYNGPEITSIYWPSPDYTAVQNGRTRFNSSKIAVLDDEGRFLSSDGFKMVALDSGLGIQRRITIDYDGNLRMYSLNASDGNWTITGEGVLQMCYVHGLCGRNGICEYSPGLRCTCPPGYEMTDPENWSRGCRPTFSVSCGQQREDFTFVKIPHGDYYGFDLTSNKSISLEECMRICMDSCVCLSFTYKGGDGLCYTKGLLYNGQVYPYFPGDNYIKLPKNVASTSLISKHHGLTCKPNASKVMLVSIDAYRKNSDNIMWAYLYVFATIIGAVELVFIMTGWYFLFKMHNIPKSMEKGYKMITSQFRRFTYRELVEATGKFKEELGKGGSGTVYRGILGDKKVVAVKKLTDVRQGEEEFWAEVTLIGRINHINLVRMWGFCSEGRQRLLVYEYVENESLDRYLFDDSGTRNLLSWSQRFKIALGTTRGLAYLHHECLEWVVHCDVKPENILLNRDFEAKIADFGLSKLSKRDSSTFNFTHMRGTMGYMAPEWALNLPINAKVDVYSYGVVLLEIVTGTRVSSGITIEEENIDLMQFVQVVKQMLTSGEVLDTIVDSRLKGHFNCDQAKAMVKAAISCLEERSKRPTMDQIVKDLMVYDDEDYHPAYF

SEQ ID NO: 6604 - protein, 99 aa, Oryza sativa
  unsure (1)..(99): unsure at all Xaa locations
  Clone ID: PAT_MRT4530_10588C.1.pep
PQQKNQRPAXETXAAASNTRGAATRPPAXSAAKXXXQXNRPKAXRPPSTXNGEXXRXNTARXXPXGRQXKAASRAARSTRXENGDSXEEXQTKATPEKN

SEQ ID NO: 6605 - protein, 162 aa, Oryza sativa
  Clone ID: PAT_MRT4530_1065C.1.pep
MSDSEEHHFESKADAGASKTYPQQAGTIRKNGYIVIKNRPCKVVEVSTSKTGKHGHAKCHFVGIDIFNGKKLEDIVPSSHNCDVPHVDRTDYQLIDISEDGFVSLLTESGNTKDDLRLPTDDTLTNQIKNGFGEEGKDMILTVMSAMGEEQICAVKEIGAKN

SEQ ID NO: 6606 - protein, 467 aa, Oryza sativa
  unsure (1)..(467): unsure at all Xaa locations
  Clone ID: PAT_MRT4530_10807C.1.pep
MAVHHSLEVAAAGGDGGGGRCYDDDGHPARTGTEWTCXAHVITAVIGSGVLSLAWSVAQLGWLAGPGMMLVFAAVTALQSALFADCYRSPDPEVGPHRNRTYANAVERNLGSSSAWVCLLLQQTALFGYGIAYTITASISCRAILRSNCYHTHGHDAPCKYGGSYYMLMFGAAQLFLSFIPDFHDMAWLSVLAAVMSFSYSFIGLGLGLANTIANGTIKGSITGAPTRTPVQKVWHVSQAIGDIAFAYPYSLILLEIQDTLKAPPAENKTMKKASIISIVVTTFFYLCCGCFGYAAFGSDAPGNLLTGFGFYEPYWLIDFANACIILHLLGGYQVYSQPIYQFADRFFAERYPASRFVNDFHTVKLPLLPPCRVNLLRVCFRTVYVASTTAVALAFPYFNEVLALLGALNFWPLAIYFPVEMYFIQRHVPRWSPRWVVLQSFSVLCLLVSAFALVGSIQGLISQKLG

SEQ ID NO: 6607 - protein, 81 aa, Oryza sativa
  Clone ID: PAT_MRT4530_10972C.1.pep
FEPGELKSWSFYRAGIAEFVATFLFLYITILTVMGVFKFFFKCATVGIQGICWSFGGMIFALVYWTGGIFGGHNNPTVTFG

SEQ ID NO: 6608 - protein, 160 aa, Oryza sativa
  Clone ID: PAT_MRT4530_11027C.1.pep
MSDSEEHHFESKADAGASKTYPQQAGTIRKNGYIVIKNRPCKVVEVSTSKTGKHGHAKCHFVAIDIFTAKKLEDIVPSSHNCDVPHVNRTEYQLIDISEDGFVSLLTENGNTKDDLRLPTDDNLLSQIKDGFGEGKDLVVTVMSAMGEEQICALKDIGPK

SEQ ID NO: 6609 - protein, 294 aa, Oryza sativa
  Clone ID: PAT_MRT4530_11056C.1.pep
MEQYEKEEKIGEGTYGVVYRARDKVTNETIALKKIRLEQEDEGVPSTAIREISLLKEMHHGNIVRLHDVIHSEKRIYLVFEYLDLDLKKFMDSCPEFAKNPTLIKSYLYQILRGVAYCHSHRVLHRDLKPQNLLIDRRTNALKLADFGLARAFGIPVRTFTHEVVTLWYRAPEILLGSRQYSTPVDMWSVGCIFAEMVNQKPLFPGDSEIDELFKIFRVLGTPNEQSWPGVSSLPDYKSAFPKWQAQDLATIVPTLDPAGLDLLSKMLRYEPNKRITARQALEHEYFKDLEMVQ

SEQ ID NO: 6610 - protein, 47 aa, Oryza sativa
  Clone ID: PAT_MRT4530_11109C.1.pep
FSLCWLNFSAALPFVCPNKWCAWLSKCHESMPFYVNFVQVELYLPKF

SEQ ID NO: 6611 - protein, 182 aa, Oryza sativa
  Clone ID: PAT_MRT4530_11190C.1.pep
MELELGLAPPNSGHLVVDELSSSSSSGGGSGSAPVSASSAGKRGFREAFQETLLLFDDGSCCNTSDDDCRRRKKTVVGWPPVSSARRACGGANYVKVKKEGDAIGRKVDLALHSSYDELAATLARMFPTNDHQGEKKMANDDHGDAAGPVVTYEDGDGDWMLVGDVPWDDFARSVKRLKILG

SEQ ID NO: 6612 - protein, 256 aa, Oryza sativa
  Clone ID: PAT_MRT4530_11246C.1.pep
MSREENVYMAKLAEQAERYEEMVEYMEKVAKTVDVEELTVEERNLLSVAYKNVIGARRASWRIVSSIEQKEEGRGNEEHVTLIKEYRGKIEAELSKICDGILKLLDSHLVPSSTAAESKVFYLKMKGDYHRYLAEFKTGAERKEAAESTMVAYKAAQDIALADLAPTHPIRLGLALNFSVFYYEILNSPDKACNLAKQAFDEAISELDTLGEESYKDSTLIMQLLRDNLTLWTSDLTEDGGDEVKEASKGDACEGQ

SEQ ID NO: 6613 - protein, 419 aa, Oryza sativa
  Clone ID: PAT_MRT4530_11349C.1.pep
MENMRSENFNQGVSMEGVKHAPEMANTNRRALRDIKNIIGAPHQHMAVSKRGLLDKPAAKNQSGHRPMTRKFAATLANQPSSAPLAPIGSERQKRTADSAFHGPADMECTKITSDDLPLPMMSEMDEVMGSELKEIEMEDIEEAAPDIDSCDANNSLAVVEYVDEIYSFYRRSEGLSCVSPNYMLSQNDINEKMRGILIDWLIEVHYKLELLDETLFLTVNIIDRFLARENVVRKKLQLVGVTAMLLACKYEEVSVPVVEDLILICDRAYTRTDILEMERMIVNTLQFDMSVPTPYCFMRRFLKAAQSDKKLELMSFFIIELSLVEYEMLKFQPSMLAAAAIYTAQCTINGFKSWNKCCELHTKYSEEQLMECSKMMVELHQKAGHGKLTGVHRKYSTFRYGCPAKSEPAVFLLKSVAL

SEQ ID NO: 6614 - protein, 364 aa, Oryza sativa
  Clone ID: PAT_MRT4530_1149C.1.pep
MGSSCSRSHSLSEAETTKNAKSADIDRRILQETKAEQHIHKLLLLGAGESGKSTIFKQIKLLFQTGFDEAELRSYTSVIHANVYQTIKILYEGAKELSQVESDSSKYVISPDNQEIGEKLSDIDGRLDYPLLNKELVLDVKRLWQDPAIQETYLRGSILQLPDCAQYFMENLDRLAEAGYVPTKEDVLYARVRTNGVVQIQFSPVGENKRGGEVYRLYDVGGQRNERRKWIHLFEGVNAVIFCAAISEYDQMLFEDETKNRMMETKELFDWVLKQRCFEKIQKVPLSVCEWFKDYQPIAPGKQEVEHAYEFVKKKFEELYFQSSKPDRVDRVFKIYRTTALDQKLVKKTFKLIDESMRRSREGT

SEQ ID NO: 6615 - protein, 270 aa, Oryza sativa
  Clone ID: PAT_MRT4530_11646C.1.pep
MGRPPCCDENGLKKGPWTPEEDEKLMSYIQKHGHASWRVLPELAGLNRCGKSCRLRWTNYLKPDIKRGNFSREEEQTILQLHSILGNKWSAIAKHLPGRTDNEIKNFWNTHLRKKLIKMGIDPMTHCPRTDFFQSLPQLIALANLRQIIERQPWDGHIEGLQTVAVQAAKLEYMQSLLHSAVCHCDQPHHHHHHQQLKHLHHRTGADQPPMPSTGAFFNNIALVSGWITLKLEDGVIPTGNSPVLDHLAGEALEGALGIRDFGSTTASSA

SEQ ID NO: 6616 - protein, 261 aa, Oryza sativa
  Clone ID: PAT_MRT4530_11916C.1.pep
SCVCWNSYIKNYLASTDYDGTVQLWDASSGQGFTQFTEHRKRAWSVSFSEVDPTKLASGSDDCCVKVWSINQKNCTDTIRNVANVCCVQFSPYSSRMLAFGSADYKIYCYDLRNTRIPWCTISGHGKAVSYVRFLDPETLISASTDNTLKIWDLNQTNSSGLSTDACSMTLSGHTNEKNFVGLSVHDGYITCGSENNEVFSYYKTFPMPITSHKFGSIDPITGQETNDDNQQFVSSVCWRGRSNMVVAANSTGSIKVLELV

SEQ ID NO: 6617 - protein, 792 aa, Oryza sativa
  Clone ID: PAT_MRT4530_12732C.1.pep
MVDAMHEYAVGQLKEFEGKKLVSATKEGLKLDESEDEKKRKEELKEKFEGLCKVIKEVLGDKVEKVVVSDRVVDSPCCLVTGEYGWTANMERIMASETETFAFQAEINQLLSLIINTFYSNKEIFLRELISNSSDALDKIRFESLTDKSKLDAQPELFIHIVPDKASNTLSIIDSGIGMTKSDLVNNLGTIARSGTKEFMEALAAGADVSMIGQFGVGFYSAYLVAERVVVTTKHNDDEQYVWESQAGGSFTVTRDTSGEQLGRGTKITLYLKDDQLEYLEERRLKDLIKKHSEFISYPISLWTEKTTEKEISDDEDEEEKKDAEEGKVEDVDEEKEEKEKKKKKIKEVSHEWSLVNKQKPIWMRKPEEITKEEYAAFYKSLTNDWEEHLAVKHFSVEGQLEFKAVLFVPKRAPFDLFDTRKKLNNIKLYVRRVFIMDNCEELIPEWLSFVKGIVDSEDLPLNISREMLQQNKILKVIRKNLVKKCVELFFEIAENKEDYNKFYEAFSKNLKLGIHEDSTNRNKIAELLRYHSTKSGDELTSLKDYVTRMKEGQNDIYYITGESKKAVENSPFLEKLKKKGYEVLYMVDAIDEYAVGQLKEFEGKKLVSATKEGLKLDESEDEKKRKEELKEKFEGLCKVIKEVLGDKVEKVVVSDRVVDSPCCLVTGEYGWTANMERIMKAQALRDSSMAGYMSSKKTMEINPENAIMEELRKRADADKNDKSVKDLVLLLFETALLTSGFSLDDPNTFGSRIHRMLKLGLSIDEDETAEADTDMPPLEDDAGESKMEEVD

SEQ ID NO: 6618 - protein, 488 aa, Oryza sativa
  Clone ID: PAT_MRT4530_12828C.1.pep
MKKLFFFLFLLILAASVVHGEDGAYIGVNIGTAMTSVPAPTQITTLLRSQNIRHVRLYDADPAMLAALANTGIRVIVSVPNEQLLAIGNSNATAANWVARNVAAHYPSVNITAIAVGSEVLSTLPNAAPLLMPAIRYLQNALVAAALDRYIKISTPHSSSIILDSFPPSQAFFNRSLDPVLVPLLKFLQSTGSPLMLNVYPYYDYMRSNGEAVDANTLLHYTNVFDAVVDAAYFAMAYLNVTNVPVMVTETGWPHKGDPSNEPDATSDNADTYNSNLIRHVMNTTGTPKHPGVAVPTYIYELYDEDTRPGSTSEKYWGLFDMNGIPAYTLHLTGSGVLLANDTTNQTYCVAREGADEKMLQAALDWACGPGKVDCSALMQGQPCYDPDNVEAHATYAFNAYYHGMGMGSGTCYFSGVAVITTTDPSHGSCVYAGSGGKNGTSLLNGTSLAPSSNSTAGDSGAHRAIGDVSSFVRAVVAALLLSVVLLL

SEQ ID NO: 6619 - protein, 504 aa, Oryza sativa
  Clone ID: PAT_MRT4530_12829C.1.pep
MKKLFFFLFLLILAASVVHGEDGAYIGVNIGTAMTSVPAPTQITTLLRSQNIRHVRLYDADPAMLAALANTGIRVIVSVPNEQLLAIGNSNATAANWVARNVAAHYPSVNITAIAVGSEVLSTLPNAAPLLMPAIRYLQNALVAAALDRYIKISTPHSSSIILDSFPPSQAFFNRSLDPVLVPLLKFLQSTGSPLMLNVYPYYDYMRSNGVIPLDYALFRPLPPNKEAVDANTLLHYTNVFDAVVDAAYFAMAYLNVTNVPVMVTETGWPHKGDPSNEPDATSDNADTYNSNLIRHVMNTTGTPKHPGVAVPTYIYELYDEDTRPGSTSEKYWGLFDMNGIPAYTLHLTGSGVLLANDTTNQTYCVAREGADEKMLQAALDWACGPGKVDCSALMQGQPCYDPDNVEAHATYAFNAYYHGMGMGSGTCYFSGVAVITTTDPSHGSCVYAGSGGKNGTSLLNGTSLAPSSNSTAGDSGAHRAIGDVSSFVRAVVAALLLSVVLLL

SEQ ID NO: 6620 - protein, 50 aa, Oryza sativa
  Clone ID: PAT_MRT4530_13180C.1.pep
QVPWLVEKSLTKEIKVDGYVPPGMNLTDITKAFDLLHEGACLRCVRATDK

SEQ ID NO: 6621 - protein, 541 aa, Oryza sativa
  Clone ID: PAT_MRT4530_1353C.1.pep
MTLDLSRISGTPWGTSVRLYHLRFRIPRTRSTALPLAPTCPPAASQPHSQSSAASPATAAVRPLRHPEGAEPPRRSAASALFVEHRGIMGWDGDHRPFQAVRHHWFLDASAMAQDLSSSAVWPERNGRIFEHKFKVAEQLVGDIKEILKVKVVDPRYVLINIDGNHFGASLLPSLSLLSSFIEPAIMENTCKRISNTPNSMPVLQGWADLPDDLLQCVLALLSSPSDLAAFIATCPNWHAAFRSAKSTLRTTLFRPLAIRSCASSGDDPVVWELFDPAKPTICIHRVTPPDFLAGMDYECCSYGHAIFSGNAPSLKDTTFAIVDVFTGTSVSPPPCPFFTFVNSCALTAPLDYHNSHFLVEAKHSLFAWRVGSDHWSQCSCPPNSKALEQFVPFKGQLYALEYQQLYTVKLEPQLSLEEVQVVWSVEMSEPDLCEPSLVVCDDMLILLAASIGEAFCLDLSSQPAMWVKMEEEELKEWAFFFDEKREAFRPRPPLSCKNPQRWGGIGYDSYCVSSLAPNQGNRRGLLPNWVKPRMLLSCDH

SEQ ID NO: 6622 - protein, 63 aa, Oryza sativa
  unsure (1)..(63): unsure at all Xaa locations
  Clone ID: PAT_MRT4530_13758C.1.pep
GFNLPVPKGFASSIYRWGQKNLSLSPDPPVEKKKEVEEPQVXKKESSPLKEEADPSLFYKAHL

SEQ ID NO: 6623 - protein, 353 aa, Oryza sativa
  Clone ID: PAT_MRT4530_13914C.1.pep
MAAAVVANGASGDSSKAAFAEIYSRLKEEMLEDPAFEFTDESLQWIDRMLDYNVLGGKCNRGISVIDSFKMLKGTDVLNKEETFLACTLGWCIEWLQAYFLVLDDIMDNSQTRRGQPCWFRVPQVGLIAVNDGIILRNHISRILQRHFKGKLYYVDLIDLFNEVEFKTASGQLLDLITTHEGEKDLTKYNLTVHRRIVQYKTAYYSFYLPVACALLLSGENLDNFGDVKNILVEMGTYFQVQDDYLDCYGDPEFIGKIGTDIEDYKCSWLVVQALERADENQKHILFENYGKPDPECVAKVKDLYKELNLEAVFHEYERESYNKLIADIEAHPNKAVQNVLKSFLHKIYKRQK

SEQ ID NO: 6624 - protein, 375 aa, Oryza sativa
  Clone ID: PAT_MRT4530_13916C.1.pep
MAAAVVANGASGDSSKAAFAEIYSRLKEEMLEDPAFEFTDESLQWIDRIISLTYECRWIKELRVAQSATKMLDYNVLGGKCNRGISVIDSFKMLKGTDVLNKEETFLACTLGWCIEWLQAYFLVLDDIMDNSQTRRGQPCWFRVPQVGLIAVNDGIILRNHISRILQRHFKGKLYYVDLIDLFNEVEFKTASGQLLDLITTHEGEKDLTKYNLTVHRRIVQYKTAYYSFYLPVACALLLSGENLDNFGDVKNILVEMGTYFQVQDDYLDCYGDPEFIGKIGTDIEDYKCSWLVVQALERADENQKHILFENYGKPDPECVAKVKDLYKELNLEAVFHEYERESYNKLIADIEAHPNKAVQNVLKSFLHKIYKRQK

SEQ ID NO: 6625 - protein, 945 aa, Oryza sativa
  unsure (1)..(945): unsure at all Xaa locations
  Clone ID: PAT_MRT4530_1407C.1.pep
MRFLLNSRLSSSCLVGWSGTLNSLCSFLLDVRNSLLREPKHGSSVQINYGSGFEEKNKGSEIKKQTGNLDKTVEELSNVYRGAQETNRKLYQELFPIQIMQMCGWLLKVVRWENLNCVHMEAHGNRRSSPTYLVMLWMISVASLLITCRGSIQKQVLFPGFTAAQMDYIDNDGIFLLSNGSVFGFGFVTSNVSDNTFYILAVVHMATTTTVWSANPNSPVTHSDDFFFDKDGNAFLQSGGGSXYGLPISPGXRDCHLYATTGLWQSXVVLGKDASSPLWQSFSHPTDTLLSGQNFIEGMTLMSKSNTVQNMTYTLQIKSGNMMLYAGFETPQPYWSAQQDSRIIVNKNGDSIYPANLSSASWSFYDQSGSLLSQLVIAQENANATLSAVLGSDGLIAFYMLQGGNGKSKFSITVPADSCDMPAYCSPYTICSSGTGCQCPSALGSFANCNPGVTSACKSNEEFPLVQLDSGVGYVGTNFFPPAAKTNLTGCKSACTGNCSCVAVFFDQSSGNCFLFNQIGSLQHKGGNTTRFASFIKVSSRGKGGSDSGSGKHNTIIIVIMLGTLAIIGVLIYIGFWIYKRKRHPPPSQDDAGSSEDDGFLQTISGAPVRFTYRELQDATSNFCNKLGQGGFGSVYLGTLPDGSRIAVKKLEGIGQGKKEFRSEVTIIGSIHHIHLVKLRGFCTEGPHRLLAYEYMANGSLDKWIFHSKEDDHLLDWDTRFNIALGTAKGLAYLHQDCDSKIVHCDIKPENVLLDDNFIAKVSDFGLAKLMTREQSHVFTTLRGTRGYLAPEWLTNYAISEKSDVYSYGMVLLEIIGGRKSYDPSEISEKAHFPSFAFKKLEEGDLQDIFDAKLKYNDKDGRVETAIKVALWCIQDDFYQRPSMSKVVQMLEGVCEVLQPPVSSQIGYRLYANAFKSSSEEGTSSGMSDYNSDALLSAVRLSGPR

SEQ ID NO: 6626 - protein, 495 aa, Oryza sativa
  Clone ID: PAT_MRT4530_14135C.1.pep
MDAVAANGIGEVERKAQRSYWEEHSKDLTVEAMMLDSRAADLDKEERPEVLSVLPSYKGKSVLELGAGIGRFTGELAKEAGHVLALDFIESVIKKNENINGHHKNITFMCADVTSPDLTIEDNSIDLIFSNWLLMYLSDEEVEKLVGRMVKWLKVGGHIFFRESCFHQSGDSKRKVNPTHYREPRFYTKIFKECHSYDKDGGSYELSLETCKCIGAYVKSKKNQNQLCWLWEKVKSTEDRGFQRFLDNVQYKTTGILRYERVFGEGYVSTGGIETTKEFVDKLDLKPGQKVLDVGCGIGGGDFYMAENYDAHVLGIDLSINMVSFAIERAIGRKCSVEFEVADCTTKTYAPNTFDVIYSRDTILHIHDKPALFRSFFKWLKPGGKVLISDYCRNPGKPSEEFAAYIKQRGYDLHDVKTYGKMLEDAGFHHVIAEDRTDQFLRVLQRELAEVEKNKEAFMADFTQEDYDDIVNGWNAKLKRSSAGEQRWGLFIATK

SEQ ID NO: 6627 - protein, 630 aa, Oryza sativa
  Clone ID: PAT_MRT4530_14370C.1.pep
MESGLVASHRLRVPFAAAHHRHHPAAPPHLLRQRRGSVAATPLRLGLHLPTPTPLRLPAALPLRPSLPPLRAAAASAAAPEPVGSASPKFLGVETKTLKKIVPLGLMFFCILFNYTILRDTKDVLVVTAKGSSAEIIPFLKTWVNLPMAIGFMLLYTKLADVLSKEALFYTVIFPFIAFFGAFGYLLYPMRDAIHPTALADRLLAALGPSFLGPVAILRVWSFCLFYVMAELWGSVVISVLFWGFANQITTVEEAKEFYPLFGLGANIALIFSGRTVKYFSNMRQNLGPGVDGWAISLRGMMSIVVLLGLVIAGIYWGVNKFVIDKSAAPVVERKKKDKPKLSMGESLKVLVSSRYVRDLATLVVAYGISINLVEVTWKSKLKAQYPSPNEYSSFMGDFSTATGIATFTMMLLGRVILRKFGWGVAATITPAVLLLTGVGFFSLILFGEPLTPLMATLGMTPLLAAVYVGAMQNIFSKSAKYSLFDPCKEMAYIPLDEDMKVKGKAAIDVVCNPLGKSGGALIQQFMILSFGSLANSTPYLGGILLVIVLAWLGAVRSLDSQFSPLAKQELEKEKMLKAKTVETTAQVVGSGNGSLQETLASENSANGSAIKVSQEPESTTSEKSGQQSQ

SEQ ID NO: 6628 - protein, 443 aa, Oryza sativa
  Clone ID: PAT_MRT4530_14451C.1.pep
AWSPGWRNAEKMLEEFVSHGLLEYSKHGMKVEGATTSLLSPYLHFGEVSVRKVYQLVRMQQIKWENEGTSEAEESIHFFMRSIGLREYSRYLCFNFPFTHEKSLLGNLKHYPWKVDEERFKSWRQGMTGYPLVDAGMRELWATGWTHNRIRVIISSFAVKFLLIPWTWGMKYFWDVLLDADLESDILGWQYISGSLPDGHELSRLDNPEVQGQKYDPDGVYVRTWIPELARMPTEWIHHPWDAPSCILEVAGVELGFNYPKPIVDLHIARECLDDSISTMWQLDTAEKLAELDGEVVEDNLSNIKTFDIPKVVLRETSPCALPIDQRVPHASSKDHNLKSKVLKASNRSSICVDMIRSSKMEATSSVANSPVSRKRSFCETAFHVPSYSSSAEVHSHIQDHGGSLVGPSRYLLQEAGRNCVDEVEDSSTADSGSSISRQRKAA

SEQ ID NO: 6629 - protein, 178 aa, Oryza sativa
  Clone ID: PAT_MRT4530_14488C.1.pep
IEFDRDDELFATAGVSKRIKVSSFLQSKLSCLSWNKYSKNVIASSDYEGIVTVWDVQTRQSVMEYEEHEKRAWSVDFSRTEPSMLVSGSDDCKVKVWCTKQEASAINIDMKANICSVKYNPGSSHYVAVGSADHHIHYFDLRNPSAPVHVFGGHKKAVSYVKFLSTNELASASTDSTL

SEQ ID NO: 6630 - protein, 685 aa, Oryza sativa
  Clone ID: PAT_MRT4530_14490C.1.pep
MGDSTVAGALVPSVPKQEQAPSGDASTAALAVAGEGEEDAGARASAGGNGEAAADRDLLCPICMAVIKDAFLTACGHSFCYMCIVTHLSHKSDCPCCGNYLTKAQLYPNFLLDKVLKKMSARQIAKTASPIDQFRYALQQGNDMAVKELDSLMTLIAEKKRHMEQQESETNMQILLVFLHCLRKQKLEELNEIQTDLQYIKEDISAVERHRLELYRTKERYSMKLRMLLDEPAASKMWPSPMDKPSGLFPPNSRGPLSTSNPGGLQNKKLDLKGQISHQGFQRRDVLTCSDPPSAPIQSGNVIARKRRVQAQFNELQEYYLQRRRTGAQSRRLEERDIVTINKEGYHAGLEDFQSVLTTFTRYSRLRVIAELRHGDLFHSANIVSSIEFDRDDELFATAGVSKRIKVFEFSTVVNEPSDVHCPVVEMATRSKLSCLSWNKYSKNVIASSDYEGIVTVWDVQTRQSVMEYEEHEKRAWSVDFSRTEPSMLVSGSDDCKVKVWCTKQEASAINIDMKANICSVKYNPGSSHYVAVGSADHHIHYFDLRNPSAPVHVFGGHKKAVSYVKFLSTNELASASTDSTLRLWDVKENCPVRTFRGHKNEKNFVGLSVNNEYIACGSETNEVFVYHKAISKPAANHRFVSSDLDDADDDPGSYFISAVCWKSDSPTMLTANSQGTIKVLVLAP

SEQ ID NO: 6631 - protein, 739 aa, Oryza sativa
  Clone ID: PAT_MRT4530_14565C.1.pep
LLVPLAAIIAIGFSIAQWVGGSKNDGYGDYLIEEEEGLNDHDVVVKCHEIQTAISEGATSFLFTEYQYVGIFMSIFAVVIFLFLGSVEGFSTKSQPCTYSKDKYCKPALFNALFSTASFLLGAITSLVSGYLGMKIATFANARTTLEARKGVGKAFIIAFRSGAVMGFLLASSGLVVLYIAINVFKLYYGDDWEGLFESITGYGLGGSSMALFGRVGGGIYTKAADVGADLVGKVERNIPEDDPRNPAVIADNVGDNVGDIAGMGSDLFGSYAESSCAALVVASISSFGINHDFTGMCYPLLVSSVGIIVCLITTLFATDFFEIKAVKEIEPALKKQLIISTALMTVGIAIISWLALPAKFTIFNFGAQKEVTNWGLFFCVAIGLWAGLIIGFVTEYYTSNAYSPVQDVADSCRTGAATNVIFGLALGYKSVIIPIFAIAVSIYVSFSIAAMYGIAVAALGMLSTIATGLAIDAYGPISDNAGGIAEMAGMSHRIRERTDALDAAGNTTAAIGKGFAIGSAALVSLALFGAFVSRAGVKVVDVLSPKVFIGLIVGAMLPYWFSAMTMKSVGSAALKMVEEVRRQFNSIPGLMEGTGKPDYATCVKISTDASIKEMIPPGALVMLTPLIVGTLFGVETLSGVLAGALVSGVQIAISASNTGGAWDNAKKYIEAGASEHARTLGPKGSDCHKAAVIGDTIGDPLKDTSGPSLNILIKLMAVESLVFAPFFATHGGLLFKWF

SEQ ID NO: 6632 - protein, 721 aa, Oryza sativa
  unsure (1)..(721): unsure at all Xaa locations
  Clone ID: PAT_MRT4530_14624C.1.pep
MSASPSSMXSGAGAGEAGVRTVVWFRRDLRVEDNPALAAAARAAGEVXVPVYVWAPEEDGPYYPGRVSRWWLSQSLKHLDASLRRLGASRLVTRRSADAVVALIELVRSIGATHLFFNHLYGSIDPEFQIDPLSLVRDHRVKALLTAEGIAVQSFNADLLYEPWEVVDDDGCPFTMFAPFWDRCLCMPDPAAPLLPPKRIAPGELPARRCPSDELVFEDESERGSNALLARAWSPGWQNADKALAAFLNGPLMDYSVNRKKADSASTSLLSPYLHFGELSVRKVFHQVRMKQLMWSNEGNHAGDESCVLFLRSIGLREYSRYLTFNHPCSLEKPLLAHLRFFPWVVDEVYFKVWRQGRTGYPLVDAGMRELWATGWLHDRIRVVVSSFFVKVLQLPWRWGMKYFWDTLLDADLESDALGWQYISGSLPDGRELDRIDNPQLEGYKFDPHGEYVRRWLPELARLPTEWIHHPWDAPESVLQAAGIELGSNYPLPIVELDAAKTRLQDALSEMWELEAASRAAMENGMEEGLGDSSDVPPIAFPPELQMEVDRAPAQPTVHGPTTAGRRREDQMVPSMTSSLVRAETELSADFDNSMDSRPEVPSQVLFQPRMEREETVDGGGGGGMVGRSNGGGHQGQHQQQQHNFQTTIHRARGVAPSTSEASSNWTGREGGVVPVWSPPAASGPSDHYAADEADITSRSYLDRHPQSHTLMNWSQLSQSL

SEQ ID NO: 6633 - protein, 200 aa, Oryza sativa
  unsure (1)..(200): unsure at all Xaa locations
  Clone ID: PAT_MRT4530_14668C.1.pep
MARVYVGNLDPRVTAREIEDEFRVFGVLRSVWVARKPPGFAFIDFDDRRDAEDAIRDLDGKNGWRVELSTKAGSGRGRDRSGGSDMKCYECGEPGHFARECRLRIGSGGLGSGRRRSRSRSRSPRYRGRSRSRSPRYRRSPSYGRRPTGSFSXRRSYSRSPPPARARSYSRSPPPPRERSYSRSPAQPANREESPYANNA

SEQ ID NO: 6634 - protein, 386 aa, Oryza sativa
  Clone ID: PAT_MRT4530_14815C.1.pep
MELDSLREAFDRVIEKRASSSAKAQEVIDQIVSEVEQAITKMQMMNTDSMGTADHSSILAELKAKLNELAPLNQLEGCQKELNVALSKYLKLLEKSFSPDISKAYRNVDFEASTINSIIANHFYRQGLFDLGDSFVRECGESDGAHLKLQFQEMYSILEAMQVRNLQPALSWAAKNHDQLLQNGSMLELKLHQLQFVEILTKGSRDEALKYARTHLVPFASLHKAEIQKLMACLLWADRLDQSPYAEFMSSTHWEKLAEELTHQFCSLLGQSSESPLGVAVSAGFQGLPTLLKLTTVMAAKKQEWQAMKQLPVPIDIGPEFQYHSVFVCPVLREQSSDENPPMLMPCGHVVSKQSIMKLSKSSSRPFKCPYCPSEAVASQCKQLHF

SEQ ID NO: 6635 - protein, 159 aa, Oryza sativa
  Clone ID: PAT_MRT4530_14868C.1.pep
MDAAGAGAGGKLKKGAAGRKAGGPRKKAVSRSVKAGLQFPVGRIGRYLKKGRYAQRIGTGAPVYLAAVLEYLAAEVLELAGNAARDNKKNRIIPRHVLLAIRNDEELGKLLAGVTIAHGGVLPNINPVLLPKKTAEKAAAAGKEAKSPKKAAGKSPKKA

SEQ ID NO: 6636 - protein, 163 aa, Oryza sativa
  Clone ID: PAT_MRT4530_14871C.1.pep
MEVGAKVPKKAGAGGRRGGGGPKKKPVSRSVKAGLQFPVGRIGRYLKQGRYSQRIGTGAPVYLAAVLEYLAAEVLELAGNAARDNKKNRIIPRHVLLAIRNDEELGKLLAGVTIAHGGVLPNINPVLLPKKTGSAAAKEAKEGKTPKSPKKATTKSPKKAAAA

SEQ ID NO: 6637 - protein, 451 aa, Oryza sativa
  Clone ID: PAT_MRT4530_14919C.1.pep
MEFVANGKVILFLLFVSTSVLIVSPASPPRFHYINPHNFTTPASSSSSASASAVHRSRNNNNPSLSLVHRDAISGATYPSRRHQVVGLVARDNARVEHLEKRLVASTSPYLPEDLVSEVVPGVDDGSGEYFVRVGVGSPPTDQYLVVDSGSDVIWVQCRPCEQCYAQTDPLFDPAASSSFSGVSCGSAICRTLSGTGCGGGGDAGKCDYSVTYGDGSYTKGELALETLTLGGTAVQGVAIGCGHRNSGLFVGAAGLLGLGWGAMSLVGQLGGAAGGVFSYCLASRGAGGAGSLASSFYYVGLTGIGVGGERLPLQDSLFQLTEDGAGGVVMDTGTAVTRLPREAYAALRGAFDGAMGALPRSPAVSLLDTCYDLSGYASVRVPTVSFYFDQGAVLTLPARNLLVEVGGAVFCLAFAPSSSGISILGNIQQEGIQITVDSANGYVGFGPNTC

SEQ ID NO: 6638 - protein, 473 aa, Oryza sativa
  Clone ID: PAT_MRT4530_14922C.1.pep
MEFVANGKVILFLLFVSTSVLIVSPASPPRFHYINPHNFTTPASSSSSASASAVHRSRNNNNPSLSLVHRDAISGATYPSRRHQVVGLVARDNARVEHLEKRLVASTSPYLPEDLVSEVVPGVDDGSGEYFVRVGVGSPPTDQYLVVDSGSDVIWVQCRPCEQCYAQTDPLFDPAASSSFSGVSCGSAICRTLSGTGCGGGGDAGKCDYSVTYGDGSYTKGELALETLTLGGTAVQGVAIGCGHRNSGLFVGAAGLLGLGWGAMSLVGQLGGAAGGVFSYCLASRGAGGAGSLVLGRTEAVPVGAVWVPLVRNNQASSFYYVGLTGIGVGGERLPLQDGLFQLTEDGAGGVVMDTGTAVTRLPREAYAALRGAFDGAMGALPRSPAVSLLDTCYDLSGYASVRVPTVSFYFDQGAVLTLPARNLLVEVGGAVFCLAFAPSSSGISILGNIQQEGIQITVDSANGYVGFGPNTC

SEQ ID NO: 6639 - protein, 868 aa, Oryza sativa
  unsure (1)..(868): unsure at all Xaa locations
  Clone ID: PAT_MRT4530_15007C.1.pep
MAGAGAVGGSNWEEMVRRMLPPGTTIPEAPANLDYSIALEYDGPPVSYELPRIDPVDLPAIPTAQPVSGPLVPGRSNGVVAPVVRPVFMPPVHRKQDAHRAEPPPVAAQGRRRRSSESVDSAPQNEGFSDDDDSCSVSQESAHNFHGQRGGRTAAQEGRRAQVVTFGVTEDSRYESKEFDDVSEQYVAVTKKEKRGRTCSRCGKRKWESKESCIVCDARFCSYCVLRAMGSMPEGRKCITCIGQPIDESKRSKLGKGSRILSRLLSPLEVRQILKAEKECQANQLRPEQLIINGFPLNPDEMASLLSCQRPPQKLKPGRYWYDKESGLWGKEGEKPDRVVSTNLTFNGKLQPNASNGNTQVYMNGREITKIELRVLKIAQVQCPRDTHFWVYHDGGYEEEGQNNIKGKIWESPVTRFACALFSLPVPPANSDEPKDEAPYSARTVPDYLDQKRIQKLLILGSPGAGTSTIFKQAKLLYDTRFTQEELDSIKLMIQSNMFKYLGILLEGRERFEEEALAGSNNPSSEDENTQHDGNKSNGSDSCIYSINAKLKKFSDWLLDIIAMGDLDAFFPAATREYAPIVEEMWKDPAIQATYKRKDELHFLPDVAEYFLSRAIEVSSNEYEPSEKDIIYAEGVTQGNGLAFIEFTLDDRSPMSEMYTDNHEPHSQTLNKYQLIRVSAKGMNEGCKWVEMFEDVSMVIFSVALSDYDQLGAPSSGGNSPLVNKMIQSRDLFEATIRQPCFRDMPFVLVLNKFDLFEEKIGRVPLSTCEWFSDFCPLRTHHNNQSLAXQAFYYVAMKXFKALYAACTDRNLFVCQARARDRLTVDEAFKFIREVLKWEDEKDGGGYYPDESFYSTTELSSSRLIRQE

SEQ ID NO: 6640 - protein, 751 aa, Oryza sativa
  Clone ID: PAT_MRT4530_15014C.1.pep
MGGERPPPISGGGAFAFISKGWREVRDSASADLRQMRARADRELEHLLASASALAGPPLPPVAAGAPIAEVEFVRKRIQPKIMELRRQYSSTVRDAGWAPKAAGASLRVDLSGITAIRNAIVAEGGGGGGGGGRWGLVRWKGHADDEGRKEWEVVRMIRSGLKEFERRSLSSEVFGGFRGRGEFVEKFKLSLKSLNKESQESKEVLPLDLTEILAYLVRQSGPFLDQLGIRRDLCDKIVETLYSKHNGRLIYHSLSADRSLIGNENMTDELDLRIARVLESTGHHTEESFWKDHAKYKLSDNRRHVAIVTTASLPWMTGTAINPLFRAAYLARSTKQKFTRRTENYIRNWLQERLGFEANFKISFYPGKFSKERRSIIPAGDTSQFISSSEADIAILEEPEHLNWYHHGKRWTDKFKHVIGVVHTNYLEYIKREKNGALQAFLVKHINNWVTRAYCHKVLRLSAATQDLPRSVVCNVHGVNPKFLKVGEKIAADKEHGQQSFTKGAYFLGKMVWAKGYRELIDLLSKHKSDLEGFNVDVYGNGEDSQAVQMAARKLNLSLNFFKGRDHADSSLHGYKVFINPSVSDVLCTATAEALAMGKFVICADHPSNEFFKSFPNCLTYKTSEEFVARVKEAMASEPSPLTPEQRYSLSWEAATERFMEYSELDKVLNNKIGYSGQDGKRSKVRKIPLLPRLSEVVDGGLAFAHHCLTGNEILRLATGAIPGTRDYDKQQCMDLNLLPPQVQHPVYGW

SEQ ID NO: 6641 - protein, 775 aa, Oryza sativa
  Clone ID: PAT_MRT4530_15016C.1.pep
MGGERPPPISGGGAFAFISKGWREVRDSASADLRQMRARADRELEHLLASASALAGPPLPPVAAGAPIAEVEFVRKRIQPKIMELRRQYSSTVRDAGWAPKAAGASLRVDLSGITAIRNAIVAEGGGGGGGGGRWGLVRWKGHADDEGRKEWEVVRMIRSGLKEFERRSLSSEVFGGFRGRGEFVEKFKLSLKSLNKESQESKEVLPLDLTEILAYLVRQSGPFLDQLGIRRDLCDKIVETLYSKHNGRLIYHSLSADRSLIGNENMTDELDLRIARVLESTGHHTEESFWKDHAKYKLSDNRRHVAIVTTASLPWMTGTAINPLFRAAYLARSTKQKVTLVVPWLCKSDQELVYPNNITFSSPEEQENYIRNWLQERLGFEANFKISFYPGKFSKERRSIIPAGDTSQFISSSEADIAILEEPEHLNWYHHGKRWTDKFKHVIGVVHTNYLEYIKREKNGALQAFLVKHINNWVTRAYCHKVLRLSAATQDLPRSVVCNVHGVNPKFLKVGEKIAADKEHGQQSFTKGAYFLGKMVWAKGYRELIDLLSKHKSDLEGFNVDVYGNGEDSQAVQMAARKLNLSLNFFKGRDHADSSLHGYKVFINPSVSDVLCTATAEALAMGKFVICADHPSNEFFKSFPNCLTYKTSEEFVARVKEAMASEPSPLTPEQRYSLSWEAATERFMEYSELDKVLNNKIGYSGQDGKRSKVRKIPLLPRLSEVVDGGLAFAHHCLTGNEILRLATGAIPGTRDYDKQQCMDLNLLPPQVQHPVYGW

SEQ ID NO: 6642 - protein, 753 aa, Oryza sativa
  Clone ID: PAT_MRT4530_15145C.1.pep
MATTSTLHQAVAYLLAVMLVCLAPVTPASAQPWPGCPDKCGNISISYPFGIGAGCARDKDFQLECDGNTPHFNYLDDREKKLVSLSIADGEVRVFVDAGSNCHDDRFKAISGHYRTPDYGRSIAYRFSTARNRLVVLGCPVLGYLVDADDNYTYVTGCTSTCRRSQSQGDLPGQCTGESGCCQNTMPRALNVYKPYILTLNKTEEPTRNVPDQQELPPTEPVFRHLDSTKCQYVFVAEDKWINTTYSYRAFINRTSDFTVPVVLDWAIRNAGNCDIAVRNRTDYACRSAHSECFNASDGQGYRCRCSKGYEGNPYLDGGCKDIDECQRTKEYPCFGKCTNTIGSYTCECRPGTSGNATQENGCLPTDKFTLALKVVTGVSVRKLIRTKQRFFEQNGGVLLQQQMSSYGGTSGGAGGFKIFSKEELEKATNSFAADRVLGRGGYGIVYKGVLEDNMVVAIKKSKMIEEAQTKEFAKEMCILSQINHKNVVKLLGCCLEVEVPMLVYEFVSNGTLDHYIHGSTLNTVISLDSRLRIAAESAEALSYMHSSASPPILHGDVKTANILLDDKLTAKVSDFGTSKLVPNDEFEIATLVQGTCGYLDPEYLMTCQLTNKSDVYSFGVVLLELLTRKKALYFGGSEEDRSLVSCFMTAVRDGRHEELIDSQVRNEMTEEVLQEITHLVMRCVSMSGEERPMMKEVAEKLEMLRRYQLHPWDKGDANPEEKQSLLDMEQRNVDQKFRHHHDYDPENPACRS

SEQ ID NO: 6643 - protein, 482 aa, Oryza sativa
  Clone ID: PAT_MRT4530_1519C.1.pep
MAAAANGAACCGGATGPGYATPLEAMEKGPREKLLYVTCVYNGTGINKPDYLGTVDVDPNSPTYSQVIHRLPVTHVGDELHHSGWNACSSCHGDPSASRRFLILPSLLSGRVYVVDTLKDPRAPALHKVVEAEDIAEKTGLGFPHTSHCLASGEIMISCLGDKEGNAAGNGFLLLDSEFNVKGRWEKPGHSPLFGYDYWYQPRHKTMISSSWGAPAAFRTGFDLQHVQDGLYGRHLHVYDWPGGELKQTLDLGSTGLLPLEVRFLHDPSKDTGYVGCALTSNMVRFFKTADGSWSHEVAISIKPLKVRNWILPEMPGLITDFVISLDDRYLYLVNWLHGDIRQYNIEDPAKPVLAGQVWAGGLLQKGSEVVYVTEDDKEEQYSVPQVKGHRLRGGPQMIQLSLDGKRIYVTNSLFSRWDEQFYGQDLVKKGSHMLQIDVDTEKGGLSINPNFFVDFGAEPEGPSLAHEMRYPGGDCTSDIWI

SEQ ID NO: 6644 - protein, 640 aa, Oryza sativa
  unsure (1)..(640): unsure at all Xaa locations
  Clone ID: PAT_MRT4530_15363C.1.pep
MATAIPQRQLFVAGEWRAPALGRRLPVVNPATESPIGEIPAGTAEDVDAAVAAAREALKRNRGRDWARAPGAVRAKYLRAIAAKIIERKSELARLETLDCGKPLDEAAWDMDDVAGCFEYFADLAESLDKRQNAPVSLPMENFKCYLRKEPIGVVGLITPWYFTFFSHPALIFIYDPSMALMNYPLLMATWKVAPALAAGCTAVLKPSELASVTCLELADVCKEVGLPSGVLNIVTGLGSEAGAPLSSHPGVDKVAFTGSYETGKKIMASAAPMVKPVSLELGGKSPIVVFDDVDVEKAVEWTLFGCFWTNGQICSATSRLILHKKIAKEFQERMVAWAKNIKVSDPLEEGCRLGPVVSEGQYEKIKQFVSTAKSQGATILTGGVRPKHLEKGFYIEPTIITDVDTSMQIWREEVFGPVLCVKEFSTEEEAIELANDTHYGLAGAVLSGDRERCQRLTEEIDAGIIWVNCSQPCFCQAPWGGNKRSVPEINXRRSIPAIIWVNCCATLLLPSSMGAGTSDSGFGRELEEGAIDNYLSVKQVTEYASDEPWGWYKSPNYSQSLGELKILRSSWLVASFSESGKAGFSSFWLLVHFLDFTTTASQNLDQKLDCLGELLIMGEAAAARSSPNRPFVSLYQQPW

SEQ ID NO: 6645 - protein, 380 aa, Oryza sativa
  Clone ID: PAT_MRT4530_15416C.1.pep
MASVAELKEKHAAATASVNSLRERLRQRRQMLLDTDVERYSRTQGRTPVSFNPTDLVCCRTLQGHSGKVYSLDWTPEKNWIVSASQDGRLIVWNALTSQKTHAIKLHCPWVMTCAFAPNGQSVACGGLDSACSIFNLNSQADRDGNIPVSRILTGHKGYVSSCQYVPDQETRLITSSGDQTCVLWDVTTGQRISIFGGEFPSGHTADVLSLSINSSNSNMFVSGSCDATVRLWDIRIASRAVRTYHGHEGDINSVKFFPDGQRFGTGSDDGTCRLFDVRTGHQLQVYSREPDRNDNELPTVTSIAFSISGRLLFAGYSNGDCYVWDTLLAEVVLNLGNLQNSHEGRISCLGLSSDGSALCTGSWDKNLKIWAFSGHRKIV

SEQ ID NO: 6646 - protein, 851 aa, Oryza sativa
  Clone ID: PAT_MRT4530_15551C.1.pep
MASRRQWGAGAGAVDVPAQERKGEAAKIARRPKTTTVVAQQPPRIRRALADVSNLVNGRAALPVVNRQKAAAAAADKCRKPIKQRNENNKAAKPEVIVISSDSEKHKKNPAQRAASRRAPIQTLTSILTKCSRASDGVISPKKELIYDIDASDSHNELAVVDYVEDIYRFYRNTENTYRPLCTYMVSQTEINERMRAILTDWLIEVHYRLMLMPETLYLTVYIIDQYLSLENVPRKELQLVGVSAMLIACKYEETWAPLLALASCLTVELPFLQVKDFLVISDNSFSRQQVLSTEKSILNKLQWNLTVPTMYMFILRYLKAALGDEELEHMTFFYAELALVQYSMLFFAPSVIAAAAVYAARCTLGLSPLWSDLLEYHTGLAEPQLLECARRLVSLHAAAPESRQKVVYKKFVFFSSWFVVVVMGIYKRPFFLVSACRFVFFSSWFVVVMACTMSSMACHSLPESGSNLSAADELFQNQRSEQGIYWTLWDSRLSDDLNTTTVYSDNHGSNGGGTQSFDTSEHCSTVPSDSDEQPGYPSQFEPLHMEQTNDMFLSQFSDEEVRRMDAPFQALDMFPDSMHRLMSYEHILNGALVSDSKNQEVNMDQDDMDTCGFPLYFSHGLQDDGGLPSFAKGMVAADTSSMDKTNRYIWVFANAGASATERGDPGSSPPGFEEAVLEELEEVMVQMARTTRICLRDAFYRLAEGSRSPRSAAAAADGATVAEATRYHAQAAVDLSRSLLEILQLVILMLSVSSSPLAAANPLQCVDDAAAPSPRRDRQDGGEPHLQAAAVLAGSRGGDDAAHACLRRPSSPSPDHRRTGGDSLGFSFQCDLARRIASSLACLTKDTLCM

SEQ ID NO: 6647 - protein, 297 aa, Oryza sativa
  Clone ID: PAT_MRT4530_1576C.1.pep
GRVGGRVGGRVGGRVGARAAAVADLALAAGHRAAARRRRRTPYWGGEGFGEMPPKRQRSAAGPSGEAPVNSLDDGCLMHIFSFLSPIPDRYNTALVCHRWRFLACHPRLWLRVERPIRNTIEPGVYPNLESAVSAARPGDTILIAAGGTHVARNIQIKKPLCIIGGGELPDDTVLTCSRGSDNALEFHSTCKIANLTIRTELGCCLLHRSGRLTIEECLLQCEQNPLDYLSFPIISTAIEYDSFSSLKEQGHGVTVVRTRIEGGAKAVRTNGTLALQHVRAIYSRSSVFFWFEVGER

SEQ ID NO: 6648 - protein, 538 aa, Oryza sativa
  Clone ID: PAT_MRT4530_15828C.1.pep
MARGSGAGGGGGGGGGGLELSVGVGGGGGARGGGGGEAAAAVETAAPISLGRLILSGMVAGGVQYGWALQLSLLTPYVQTLGLSHALTSFMWLCGPIAGMVVQPCVGLYSDRCTSKWGRRRPYILTGCVLICLAVVVIGFSADIGYAMGDTKEDCSVYHGSRWHAAIVYVLGFWLLDFSNNTVQGPARALMADLSGRHGPGTANSIFCSWMAMGNILGYSSGSTNNWHKWFPFLKTRACCEACANLKGAFLVAVIFLSLCLVITLIFAKEVPFKGNAALPTKSNEPAEPEGTGPLAVLKGFRNLPTGMPSVLIVTGLTWLSWFPFILYDTDWMGREIYHGDPKGTDPQIEAFNQGVRAGAFGLLLNSIVLGFSSFLIEPMCRKVGPRVVWVTSNFLVCIAMAATALISFWSLKDFHGTVQKAITADKSIKAVCLVLFAFLGVPLAVLYSVPFAVTAQLAATRGGGQGLCTGVLNISIVIPQVVIALGAGPWDELFGKGNIPAFGLASGFALIGGVAGIFLLPKISKRQFRSVSMGGGH

SEQ ID NO: 6649 - protein, 335 aa, Oryza sativa
  Clone ID: PAT_MRT4530_15830C.1.pep
MGCLLMLCLVSPLLLATSVHGNPWYGYGYGLFPQFYDHSCPKAKEIVQSIVAQAVARETRMAASLVRLHFHDCFVKGCDASVLLDNSTTIISEKGSNPNMNSLRGFEVVDEIKAALEAACPGTVSCADILALAARDSTVLVGGPYWDVPLGRRDSLGASIQGSNNDIPAPNNTLPTIITKFKRQGLNIVDVVALSGGHTIGMSRCTSFRQRLYNQSGNGMADYTLDVSYAAQLRQGCPRSGGDNNLFPLDFVSPAKFDNFYFKNILSGKGLLSSDQVLLTKSAETAALVKAYADDVNLFFKHFAQSMVNMGNISPLTGSQGEIRKNCRRLNNYYH

SEQ ID NO: 6650 - protein, 642 aa, Oryza sativa
  Clone ID: PAT_MRT4530_16044C.1.pep
MESLALLHAKPGGLPPRAGLRLPLPRARSARVSLPSSPAAPVSLQSPLLLASRSGPTSRDAVVGLGLGCGLLRRRSGASGGGGGGVSCGAQPAAAAAAGAVPAAQPEGKKFLGVEVKTLKKIVPLGLMFFCILFNYTILRDTKDVLVVTAKGSSAEIIPFLKTWVNLPMAIGFMLLYTKLSNVLSREALFYTVIFPFIAFFGAFAFVLYPLRNVIHPTALADKLLAALGPSFLGPVAILRIWSFCLFYVMAELWGSVVISVLFWGFANQITTVEEAKEFYPLFGLGANIALIFSGRTVKYFSNLRKTLGPGIDGWEVSLKGMMSLVVLLGLVITSIYWGVNKFVLNDPSLPKSDRKKKKDKPKLGMKESLKVLLSSRYVRDLATLVVAYGISINLVEVTWKSKLKAQFPSPNEYSSFMGDFSTATGIATFTMMLLGRIILRKFGWGVAAMITPTVLLLTGVGFFSLILFGQPLTPMLATMGMTPLLAAVYVGALQNIFSKSAKYSLFDPCKEMAYIPLDEDMKVKGKAAIDVVCNPLGKSGGALIQQFMILTFGSLANSTPYLGGILLVIVLAWLGAASSLDKQFSSLAKEDLKRDMSAKEKVDPSLLKAPEADVLVEHTNGTIESEATATESSPSNSSPSN

SEQ ID NO: 6651 - protein, 52 aa, Oryza sativa
  unsure (1)..(52): unsure at all Xaa locations
  Clone ID: PAT_MRT4530_16153C.1.pep
SSIYRSVQKSLDMSPYTPVEEEQEVQQSEVQEXALSNIKNKSELSSYDKSKL

SEQ ID NO: 6652 - protein, 199 aa, Oryza sativa
  Clone ID: PAT_MRT4530_16438C.1.pep
MGDSTPRRRPGLRLASTPLLSASSSSPPLLLFFFFFLVDRFVRSDRFFGEMEQSFIMIKPDGVQRGLIGDIISRFEKKGFYLRGMKFMNVERSFAQQHYADLSDKPFFPGLVEYIISGPVVAMVWEGKDVVATGRRIIGATRPWEAAPGTIRADYAVEVGRNVIHGSDSVDNGKKEIALWFPEGLAEWRSNLHPWIYES

SEQ ID NO: 6653 - protein, 265 aa, Oryza sativa
  unsure (1)..(265): unsure at all Xaa locations
  Clone ID: PAT_MRT4530_16528C.1.pep
MAPSDDLVYMAKLAEQAERYDEMVEAMNSVAKLDEGLTKEERNLLSVGYKNLIGAKRAAMRIIGSIELKEETKGKESHVRQTAEYRRKVEAEMDKICCDVINIIDKYLIPHSSGAESSVFYYKMKGDYYRYLAEFKTGTEKIEVSELSLNAYETASKTAQTDLTPTDPIRLGLALNISVFYCEIMNSPDKACQLAKNAFDEAVAELPSLSEENYKDSTLIMQLLRDNLALWNSDMADDADDIRERTDTTGAKGDPAAXDGGANSW

SEQ ID NO: 6654 - protein, 110 aa, Oryza sativa
  Clone ID: PAT_MRT4530_17049C.1.pep
HGEGPAHHFFGPTEGKGAEKIKPPRVNSRPHLSAFHWAGPETFGKNRNPPHAEEDKFFPTQIDHPGAGDVRGGRRRRRGPWDEGPQPKRGGFFSPGGSSALLGPFFFSGG

SEQ ID NO: 6655 - protein, 1039 aa, Oryza sativa
  Clone ID: PAT_MRT4530_17346C.1.pep
MDVDSRMTTESDSDSDAAATAAASASVAAQGGLASETSSSSSASAPSTPGTPTVAPAPAAAGATGPRPAPGYTAVSAVIEKKEDGPGCRCGHTLTAVPAVGEEGTPGYIGPRLILFGGATALEGNSATPPSSAGSAGIRLAGATADVHCYDVLSNKWSRLTPQGEPPSPRAAHVATAVGTMVVIQGGIGPAGLSAEDLHVLDLTQQRPRWHRVVVQGPGPGPRYGHVMALVGQRFLLTIGGNDGKRPLADVWALDTAAKPYEWRKLEPEGEGPPPCMYATASARSDGLLLLCGGRDANSVPLASAYGLAKHRDGRWEWAIAPGVSPSPRYQHAAVFVNARLHVSGGALGGGRMVEDSSSVAVLDTAAGVWCDTKSVVTTPRIGRYSADAAGGDAAVELTRRCRHAAAAVGDQIFIYGGLRGGVLLDDLLVAEDLAAAETTTAANHAAASAAATNVQSGRTPGRYAYNDERARQTAPESAQDGSVVLGTPVAPPVNGDMYTDISPENAVLQGQRRLSKGVDYLVEASAAEAEAISATLAAVKARQVNGEMEQLPDKEQSPDSASTSKHSSLIKPDSILSNNMTPPPGVRLHHRAVVVAAETGGALGGMVRQLSIDQFENEGRRVSYGTPENATAARKLLDRQMSINSVPKKVIASLLKPRGWKPPVRRQFFLDCNEIADLCDSAERIFSSEPSVLQLKAPVKIFGDLHGQFGDLMRLFDEYGAPSTAGDIAYIDYLFLGDYVDRGQHSLETMTLLLALKVEYPQNVHLIRGNHEAADINALFGFRIECIERMGERDGIWTWHRMNRLFNWLPLAALIEKKIICMHGGIGRSINHVEQIENLQRPITMEAGSVVLMDLLWSDPTENDSVEGLRPNARGPGLVTFGPDRVMEFCNNNDLQLIVRAHECVMDGFERFAQGHLITLFSATNYCGTANNAGAILVLGRDLVVVPKLIHPLPPAITSPETSPEHHIEDTWMQSKVICVCETVAHSHAKSVQANDIGLDIVEATLLILMGYLTRFIEGVHMIAPFLCEKAHDLKQLL

SEQ ID NO: 6656 - protein, 389 aa, Oryza sativa
  Clone ID: PAT_MRT4530_17523C.1.pep
MAAAATTSSHLLLLSRQQAAASLQCGLSFRRQPGRLAGGSSAPSVRCMAAVDTASAPAATEASKKSSYEITTLTTWLLKQEQAGTIDGEMTIVLASISTACKQIASLVQRAPISNLTGVQGAVFSNCLKSSGRTGVIASEEEDVPVAVEESYSGNYIVVFDPLDGSSNIDAAVSTGSIFGIYSPNDECLADIADDQNLDQVEQRCIVSVCQPGSNLLAAGYCMYSSSVIFVLTIGTGVYVFTLDPMYGEFVLTQEKVQIPKAGKIYAFNEGNYALWDDKLKSYMDSLKEPGPSGKPYSARYIGSLVGDFHRTLLYGGIYGYPRDQKSKNGKLRLLYECAPMSFIVEQAGGKGSDGHQRILDIMPTEIHQRVPLYIGSVEEVEKVEKFLA

SEQ ID NO: 6657 - protein, 126 aa, Oryza sativa
  Clone ID: PAT_MRT4530_17623C.1.pep
MSAMETDINAPPPPAPAPAGAGEGSSSAAGPSSRKPNKRFEIKKWNAVALWAWDIVVDNCAICRNHIMDLCIECQANQASATSEECTVAWGVCNHAFHFHCISRWLKTRQVCPLDNSEVGFQVYGH

SEQ ID NO: 6658 - protein, 492 aa, Oryza sativa
  Clone ID: PAT_MRT4530_18010C.1.pep
MVLSHGVSGSDESVHSTFASRYVRTSLPRFRMPEQSIPKEAAYQIINDELMLDGNPRLNLASFVTTWMEPECDKLIQASVNKNYVDMDEYPVTTELQNRCVNMIAHLFNAPLGDSETAVGVGTVGSSEAIMLAGLAFKRRWQNKMKAAGKPCDKPNIVTGANVQVCWEKFARYFEVELKEVKLSDGYYVMDPAKAVDMVDENTICVAAILGSTLNGEFEDVKLLNDLLTKKNAETGWDTPIHVDAASGGFIAPFLYPELEWDFRLPLVKSINVSGHKYGLVYAGIGWCIWRSKEDLPEELIFHINYLGADQPTFTLNFSKGSSQVIAQYYQLIRLGFEGYKNIMENCQENAMVLKQGLEKTGRFNIVSKDNGVPLVAFSLKDSARHNEFEISDFLRRFGWIVPAYTMPPDAQHVTVLRVVIREDFSRTLAERLVLDVEKVLHELDALPARVVANGGDAAAASASEREMEKQREVISLWKRAVLAKKKTNGVC

SEQ ID NO: 6659 - protein, 161 aa, Oryza sativa
  Clone ID: PAT_MRT4530_18379C.1.pep
MTSSSSPSRKVLSKIACNRLQKELAEWQVNPPSGFKHKVTDNLQRWVIEVAGAAGTLYAGETYQLQVDFPEHYPMEAPQVIFLHPAPMHPHIYSNGHICLDILYDSWSPAMTVSSVCISILSMLSSSPAKQRPADNDRYVRNCRNGRSPKETRWWFHDDKV

SEQ ID NO: 6660 - protein, 823 aa, Oryza sativa
  Clone ID: PAT_MRT4530_18548C.1.pep
MADNPPLIMLLAFLFSALLLLSPAHGGSRLQRGESLSVERASDILVSSNGVFAFGFYNLSSTVFTVSIWFAASAGRTVAWTANRDRPVHGAGSKLTLRRDGRLVLADYDGTPVWQTNSSSGAAAAAELTDSGNLVVTSHGGDVLWQSFDYPTDTLLPGQPVTATARLSTTDVLHPTSHYALRFDDRYLLSLAYDGPDISNIYWPDPDASSWANGRISYNASRRGVLDDAGRFLASDNTTFVASDTGAAAGGVTWRRLTLDHDGNLRLYSLRDADGGWSVSWMAFSQPCGIHGLCGWNGLCVYTPRPACSCPPGYVPADAGDRGKGCRPTFNLTCGGGGGRPEMGFARLPQTDFWGSDLNLFSSISVDGCKAACLELCNCVAFEYKDDVSDCYLKSALFNGKTYPGYPGTVYLKLPANLVAESDTYTAAPAAAAAVNLACDAARTEEVLLSFSAASPDTSSWRYYYGFLSAFFAVELCFIAFGWWFTARSRPATSEQWAAEEGYRVVTDHFRRFTYGELRKATKNFKDVIGHGRYGSVYRGVLAGAGDDRAVAVKKLKAATPQRGDDEFETEVSVIGRINHMNLVRIRGVCSERHRRRRLLVYEYVDNGSLATWLFGAKETLNWNQRYNIAVGVAKGLAYLHHECLDWIIHCDVKPENILLDEDFEPKISDFGLAKMQQRRDLDDPASFSIRGTRGYMAPEWVSSLPITEKVDVYSYGVVLLELVRGARMADLATDSVGDAEIAMRQLVWKIREGLKIGDRTWVISLVDRRLNGSFVYSQVALMLEVATSCLEKERNQRPSMNDVVKKFYTSDKKVEFIGEMSS

SEQ ID NO: 6661 - protein, 611 aa, Oryza sativa
  Clone ID: PAT_MRT4530_18601C.1.pep
ISGETAAGSSRSGPDPMGGEVPEPRRLNRALSFDDWVPDEALHLVMGHVEDPRDREAASRVCRRWHRIDALTRKHVTVAFCYAARPARLRERFPRLESLSLKGKPRAAMYGLIPDDWGAYAAPWIDELAAPLECLKALHLRRMTVTDADIAALVRARGHMLQELKLDKCIGFSTDALRLVARSCRSLRTLFLEECHITDKGGEWLHELAVNNSVLVTLNFYMTELKVAPADLELLAKNCKSLISLKMSECDLSDLISFFQTANALQDFAGGAFYEVGELTKYEKVKFPPRLCFLGLTYMGTNEMPVIFPFSMKLKKLDLQYTFLTTEDHCQIIAKCPNLLILEVRNVIGDRGLEVVGDTCKKLRRLRIERGDDDPGLQEEQGGVSQLGLTAVAVGCRELEYIAAYVSDITNGALESIGTFCKNLYDFRLVLLDRERQVTDLPLDNGVCALLRNCTKLRRFALYLRPGGLSDDGLSYIGQYSGNIQYMLLGNVGESDHGLIRFAVGCTNLQKLELRSCCFSERALSLAVLQMPSLRYIWVQGYRASQTGLDLLLMARPFWNIEFTPPSPESFNHMTEDGEPCVDSHAQVLAYYSLAGRRSDCPQWVIPLHPA

SEQ ID NO: 6662 - protein, 1130 aa, Oryza sativa
  Clone ID: PAT_MRT4530_18725C.1.pep
MAQAASSSIPSELPSRTNHDVEFSVVDYHQCTLESLEKDLAARVKWGSSQHVVISGYDMSTGEETLFKDNMDVAHALFVRKSDRKLILFVNVEDKISEKIKCDFITNNLAESWNKWVKDMKDRPIADLAEGIRAKTMDLFARRRKIGEKLDGVMLPIVVRQLNAMTRDLGHLKVVQGNRDQAEMAEITPEHDISRHAVNLTEHTCTCREWQVSGKSCPHALALIISARNPRMADYLDPCYSVEKYKLAYAGVIHPLPDKSQWPKVNIGFKLLPPLTMRDVGRQRKNRIVGCLEKGSKPRTKGRWQIQCKRCLNMGHRQTSSKCPLNGTKKKRKNRAKQGRPLGSTSDAAGSSTPKRQKVAINDSSNMSPGLVTRSISNPTMDCYYKLPVEKLAMRLLLFIGLVISLQFMADGASLPDDRCLKKCGDVDILYPFGIGEGCAIEGFVLSCSKTEDGRGDVALYGTTPVLNISLRYGQVRMKSTYISSMCYNLSTKNMDYKNWLLNLTTSPFTISQKENIFIVIGANTAANMFGYSRYSTMLNMIGCLSQCSPYNSFTAQDGSCVGIGCCQAVLSNNISYHEVQFNPLYNTTTSYNNRSITDRASYCGYAVVMEAAAFRFRTAYLNSTAFWDEHNGSVPVVLNWVVGNETCQVAKQMGDRYACRSKNSMCIDSSSGPTGYLCNCTEGYRGNPYLPDGCQDINECDVNNPPPCPGRCKNIPGSFTCSSPSQSRTVILAVSLSVGIVAMAMIVTCSYLVRERKKLANIKKKYFQQHGGMLLLQEIGLKQGQSTAFTIFTEAELIEATNKFEDKNVLGRGGHGTVYRGMLKDSRLIAIKRCMSMIDDRQKKEFGKEMLILSQINHKNIVKLLGCCLEVEVPMLVYEFIPNGTLFHFIHGGNDCRNIPFSTRVRIAHESAQALDYLHSSASPPIIHGDVKTSNILLDENYTAKISDFGASILVPTDEAQFVTLVQGTCGYLDPEYMQTCQLTDKSDVYSFGVVLLELLTGKMAFNLEGPENEKSLSLSFLCAMKEGRLMDIIDHHIQTDENAGVLEEVADLASQCLEMIGDNRPSMRDVADKLGRLRKVMQHPWAQHDPEEMESLLGESSVAGLEMVSTGNFSMEGGAVQGILESGR

SEQ ID NO: 6663 - protein, 274 aa, Oryza sativa
  Clone ID: PAT_MRT4530_18794C.1.pep
MAGGGGEYLRQFVEETAWYNEIFLSHVVPGDWWRALPHPLQSWLRNGLGGYLIYFACGFLWCFVIYYWKRHAYIPKDSIPTIEAMKKQIIVASKAMPLYCALPTLSEYMVENGWTQCYVNISEVGWPMYLVYLALYLIFVEFGIYWMHRELHDIKPLYKYLHTYHHIYNKENTLSPFAGLAFHPLDGILQAIPHVFALYLIPTHFRTHIALLFIEAVWTTNIHDCIHGKVWPVMGAGYHTIHHTTYRHNYGHYTVWMDWMFGTLREPEDILKKD

SEQ ID NO: 6664 - protein, 475 aa, Oryza sativa
  Clone ID: PAT_MRT4530_18872C.1.pep
MASGQKVVKPMEVSVEAGNAGEAAWLDDDGRARRTGTFWTASAHIITAVIGSGVLSLAWAIAQLGWVAGPAVMLLFAFVIYYTSTLLAECYRTGDPATGKRNYTYMDAVRANLGGAKVTFCGVIQYANLVGVAIGYTIASSISMRAIRRAGCFHHNGHGDPCRSSSNPYMILFGAVQIVFSQIPDFDQIWWLSIVAAVMSFTYSGIGLSLGIVQTISNGGIQGSLTGISIGVGVSSTQKVWRSLQAFGDIAFAYSFSNILIEIQDTIKAPPPSEAKVMKSATRLSVATTTVFYMLCGCMGYAAFGDAAPDNLLTGFGFYEPFWLLDVANVAIVVHLVGAYQVFVQPIFAFVERWASRRWPDSAFIAKELRVGPFALSLFRLTWRSAFVCLTTVVAMLLPFFGNVVGLLGAVSFWPLTVYFPVEMYIAQRGVPRGSARWVSLKTLSACCLVVSIAAAAGSIADVIDALKVYRPFSG

SEQ ID NO: 6665 - protein, 342 aa, Oryza sativa
  Clone ID: PAT_MRT4530_19048C.1.pep
MAFFSHHHLQQPHPQAPPPPPPQQQQQPVPPSFRNALPVPVDGQIPAPLPFFNPPPAFQDQPAQPPLVDAMGLTAAAGLGWRQPREQELLGENSQMSSIDFLQTGSAVSTGLALSLEDRRHGGGSGAGAGNSSGDSPLLLLPMLDDDISREVQRLDADMDRFIKAQSERLRQSILEKVQAKQFEALASVEDKILRKIRDKEAEVENINKRNSELEDQIKQLAVEVGAWQQRAKYNESMINALKYNLEQVCAHQSKDFKEGCGDSEVDDTASCCNGGAANLQLMPKENRHSKDLTACRVCKSSEACMLLLPCRHLCLCKECESKLSFCPLCQSSKILGMEIYM

SEQ ID NO: 6666 - protein, 142 aa, Oryza sativa
  Clone ID: PAT_MRT4530_19282C.1.pep
MAGNDNWINSYLDAILDAGKAAIGGDRPSLLLRERGHFSPARYFVEEVITGYDETDLYKTWLRANAMRSPQERNTRLENMTWRIWNLARKKKEFEKEEACRLLKRQPEAEKLRTDTNADMSEDLFEGEKGEDAGDPSVAYGD

SEQ ID NO: 6667 - protein, 103 aa, Oryza sativa
  unsure (1)..(103): unsure at all Xaa locations
  Clone ID: PAT_MRT4530_19435C.1.pep
MSGRGKGGKGLGKGGAKRHRKVLRDNIQGITKPAIRRLARRGGVKRISGLIYEETRGVLKDFLENVIRDAVTYTEHAKRTTETAMDRLLRAKTXGRTLYGFGG

SEQ ID NO: 6668 - protein, 1887 aa, Oryza sativa
  unsure (1)..(1887): unsure at all Xaa locations
  Clone ID: PAT_MRT4530_19802C.1.pep
MGFLVGLVLGIAAGVALIVGFARAENSRAARRRQLAATIASFSKMTIEDSRKLLPADLYPSWVVFSTQQKLKWLNQELIKIWPFVNAAASELIKTSVEPVLEQYRPIILASLKFSKLTLGTVAPQFTGVSIIENDESGIVMELEMNWDANPRVFRLIFKPLVDQLPCFGAVCFSLRKKKKLDFRLKVIGGEISAIPGISDALEDTIKNAIEDSITWPVRKVIPIIPGDYSCLCASNLQNNDLNPIWNEHFEFIVEDADTQTVTVKIYDDDGIQESELIGCAQVTLKDLQPGKVKDVWLKLVKDLEIQRDRKDRGQVHLELLYCPFDMKEETPNPFRQQFSMTSLERTMTSMENGSGSNGFNRLSSRKKKEIIMRGVLSVTVISGEDLPAMDMNGKSDPYVVLSLKKSKTKYKTRVVSESLNPVWNQTFDFVVEDVHDKHSPVDAPRGAQRHAATNQSPAAPAAPTPLAEARGAPPIPEPRRPRRVDAPRGAQLRAASPGVVEVALSPWEVDRGHLGLGIFGDLGVKISRSGHEPHEHPGVSYLGQIRFRFGRYQQSIIVCFIQRPIKPSSEPHGPRFQSIQENERPGSHENPWVSDERPRTPHILYPLPLLPNPNLALHFPTSEAVVEASVSSSSFSYCCCCCLNPSGLRADAPFVAVGFGASGAMAPKGAGRGKGRGGGGGGKGDKRKKEEKVVPSAIDVTVVTPYESQVTLKGISTDRVLDVRKLLGSNVETCHLTNYSLSHVTRGQRLEDGVEIVSLKPCSLTIVEEEYATEAAAAAQVRRLLDIVACTTAFVNKPRDGAKHKSSKHARPATPPSPPALAASPDAHGAGAAQAPPISEAHDMAAIRPPPRLGEFYDFLSFAHLTPPVHFIRRKESNGASQEGDYFEIEVKVCNGKLLHIVASVKGFYSAGKPHTVSHSLVDLLQQLSSAFANAYDALMKAFLDHNKKKDSPASEDKKNAGHVEKETTIKGLGKHFEQLKKIKKKECHVEGAMSEKEDSDSNCSVINGMEESENTKETDISKLMSEDDFCRLKDLGAGLHQKSLEELTMMAHKFYDDTALPKLVGLELVARDYDMNSPNPFDKSDIVNIIPVCKHVVYSSIDGRNLLESSKMALDKGKLDDAVNFGTKALSKIVAVCGPYHRLTANAYSLLAVVLYHTGDFNQATIYQQKALDINERELGLDHPETMKSYGDLSVFYYRLQHIEMALKYLHASPASATQSLFRQLITFQTAASYHAIAIALSMMDAYSLSVQHEQTTLQILQEKLGQDDLRTQDAAAWLEYFESKALEQQEAARRGIPKPDSSIASKGHLSDLLDYISPDQERKERDTQRKGRRAKNNIRAHQGELVEEKESFEHDIGSPHEANKEEFQQVKLKAHPPAISEENYAIHDELKQVDPLSPEEYSDEGWQAANLRGRSANVRKKSSRRRPALTKLMVDRLEDGRTGSAYRAGVQQHMKGDKEDVINSSSQLSFGSFLKTDIMELEMNWDANPSIILDVKTLPIQVKDIGIAGELGXSTGDAVTRRGAVEQPALEQKEAKEKDNAQNTDLIVSSEEEDKKLTDEDEEKEKPSHDSSKEVLSSEPEEIGNDEKAPDSNSDESPTESKKKGGSKLSASAPPFNPGSLLSMSHPYSTVAIYDASVVLQPIPSQPMEILPHAIDTRVPRGPRSTLYYRTGHTFQRKQGYAHSQSTILRGSNSPPTMNPHAAEFVPGKTSQQPDVANREPSADVSVTDSADQLLAPQTSDEVKAGMPAAEQAIQGESTSPCKGKENRAKDALRNSCKTELARQILFSFIVKSVHDSLGSTGAESDRKPSGPDESGNAQSSNNINKSPSGRKELDKQQKATVVPKSEKDTEGFTVVSKRRRSKQHFVHPIHGLYSQQSICTSVS

SEQ ID NO: 6669 - protein, 1413 aa, Oryza sativa
  unsure (1)..(1413): unsure at all Xaa locations
  Clone ID: PAT_MRT4530_19805C.1.pep
MAPKGAGRGKGRGGGGGGKGDKRKKEEKVVPSAIDVTVVTPYESQVTLKGISTDRVLDVRKLLGSNVETCHLTNYSLSHTRGQRLEDGVEIVSLKPCSLTIYKEYATEAAAAAQVRRLLDIVACTTAFVNKPRDGAKHKSSKHARPATPPXDMAAIRPPPRLGEFYDFLSFAHLTPPVHFIRRKESNGASQEGDYFEIEVKVCNGKLLHIVASVKGFYSAGKPHTVSHSLVDLLQQLSSAFANAYDALMKAFLDHNKFGNLPYGFRANTWLIPPIYLDSATKCPALPVEDENWGGNGGGNGRDGKYDRRRWAKEFSTLARMPCKTEEGRVIRDRKAFLLHNLFVDTAIFRAASTIQRLIDLSGNSTSQQAGPDGSLAIEERVGDLLITVKRDQADASLKLEDKVDGVALYQTGSMDISQRNLLKGLTSDESVVVKDTSTLGVVIVKHCGYTATVKVSGRTKDGNGGKQTSDICDHLDGISNVDVDDLPDGGSNALNINSLRISLPKIVNSDIASTQCPTPQSHVDNHARKLVRKILEDSLMKLENMPANNPKTIRWELGSSWLQNLQKKDSPASEDKKNAGHVEKETTIKGLGKHFEQLKKIKKKECHVEGAMSEKEDSDSNCSVINGMEESENTKETDISKLMSEDDFCRLKDLGAGLHQKSLEELTMMAHKFYDDTALPKLVADFASLELSPVDGRTMTDFMHTRGLNMCSLGRVVELAEKLPHIQSICIHEMVIRSFKHIVRAVIAAVDDMQNMSAAIAETLNILLGCPRLESDTETDAHSEHNLRFRWVERFLSKRYNWKLKDEFAHLRKFIILRGLCSKVGLELVARDYDMNSPNPFDKSDIVNIIPVCKHVVYSSIDGRNLLESSKMALDKGKLDDAVNFGTKALSKIVAVCGPYHRLTANAYSLLAVVLYHTGDFNQATIYQQKALDINERELGLDHPETMKSYGDLSVFYYRLQHIEMALKYVNRALYLLQFSCGLSHPNSAATYINVAMMEEGMGNVHVALRYLHEALKCNKRLLGADHIQTAASYHAIAIALSMMDAYSLSVQHEQTTLQILQEKLGQDDLRTQDAAAWLEYFESKALEQQEAARRGIPKPDSSIASKGHLSVSDLLDYISPDQERKERDTQRKGRRAKNNIRAHQGELVEEKESFEHDIGSPHEANKEEFQQVKLKAHPPAISEENYAIHDELKQVDPLSPEEYSDEGWQAANLRGRSANVRKKSSRRRPALTKLMVDRLEDGRTGSAYRAGVQQHMKGDKEDVINSSSQLSFGSFLKTDKVNGNSSNIENKVFNAISKPERGIKLSGINRPATIASKLVSYKDVAVSPPGTVLKPILEQKEAKEKDNAQNTDLIVSSEEEDKKLTDEDEEKEKPSHDSSKEVLSSEPEEIGNDEKAPDSNSDESPTESKKK

SEQ ID NO: 6670 - protein, 487 aa, Oryza sativa
  Clone ID: PAT_MRT4530_2005C.1.pep
MAKDVEMAVRNGDGGGGGGYYATHPHGGAGGEDVDDDGKQRRTGNVWTASAHIITAVIGSGVLSLAWATAQLGWVVGPVTLMLFALITYYTSGLLADCYRTGDPVSGKRNYTYMDAVAAYLGGWQVWSCGVFQYVNLVGTAIGYTITASISAAAVHKANCYHKNGHDADCGVYDTTYMIVFGVVQIFFSMLPNFSDLSWLSILAAVMSFSYSTIAVGLSLARTISGATGKTTLTGVEVGVDVTSAQKIWLAFQALGDIAFAYSYSMILIEIQDTVKSPPAENKTMKKATLLGVSTTTAFYMLCGCLGYAAFGNAAPGNMLTGFGFYEPYWLIDFANVCIVVHLVGAYQVFCQPIFAAVETFAARRWPGSEFITRERPVVAGRSFSVNMFRLTWRTAFVVVSTVLAIVMPFFNDILGFLGAVGFWPLTVYYPVEMYIRQRRIQRYTSRWVALQTLSLLCFLVSLASAVASIEGVSESLKHYVPFKTKS

SEQ ID NO: 6671 - protein, 770 aa, Oryza sativa
  Clone ID: PAT_MRT4530_2013C.1.pep
MALIGTVAAEVLIPLAAVIGILFAVLQWYMVSRVAVPPHDGVGGAGKVERESDGGDGDGDGVDDEEDGVDYRGVEARCAEIQHAISVGATSFLMTEYKYLGAFMAAFAAVIFVSLGSVGRFSTSTEPCPYDAARRCRPALANAAFTAAAFLLGATTSVVSGYLGMRVATFANARTALEARRGIGRAFAVAFRSGAAMGFLLASSALLVLFAAVNAFGLYYGDDWGGLYEAITGYGLGGSSMALFGRVGGGIYTKAADVGADLVGKVERNIPEDDPRNPAVIADNVGDNVGDIAGMGSDLFGSYAESSCAALFVASISSFGADHDFAAMMYPLLVSAAGIVACAATTLVATDAGELGAADEVAPALKRQILISTVLMTAAVAAVTFLSLPRSFTLFDFGERKLVKNWHLFICVSAGLWAGLVIGYVTEYFTSNAYGPVQTVAQSCRTGAATNVIFGLAVGYKSVIVPIFAIAGAIYASFRLAAMYGIALAALGMLSTIATGLTIDAYGPISDNAGGIAEMAGMPRRVRERTDALDAAGNTTAAIGKGFAIGSAALVSLALFGAYVSRAGIRTVNVVSPRVFVGLLAGAMLPYWFSAMTMRSVGSAALRMVEEVRRQFDEIPGLAEGLAAPDYATCVRISTDASLREMVAPGALVMASPLVAGTLFGVEALAGLLAGALVSGVQVAISASNSGGAWDNAKKYIEAGATEEARSLGPKGSEAHKAAVIGDTIGDPLKDTSGPSLNILVKLMAVEALVFAPFFAAHGGIVFNHL

SEQ ID NO: 6672 - protein, 287 aa, Oryza sativa
  Clone ID: PAT_MRT4530_20264C.1.pep
MGKEVDVSTLEAGGARDYIDPPPAPLVDVDELGKWSLYRALIAEFVATLLFLYVTVATVIGYKHQTDAAVNGADAACGGVGVLGIAWAFGGMIFILVYCTAGVSGGHINPAVTFGLFLARKVSLVRAVLYIVAQSLGAICGVGLVKGFQSAFYVRYGGGANELSDGYSKGTGLAAEIIGTFVLVYTVFSATDPKRNARDSHVPVLAPLPIGFAVFMVHLATIPITGTGINPARSLGAAVIYNQHKAWHDHWIFWVGPLIGAAIAAAYHQYVLRASAAKLGSSSSFRG

SEQ ID NO: 6673 - protein, 55 aa, Oryza sativa
  Clone ID: PAT_MRT4530_20333C.1.pep
GCQQWFYSLPFKLLVTKQVGVCETRPGWGWGNLLKCLGALPVFLLALLLGFIVMG

SEQ ID NO: 6674 - protein, 497 aa, Oryza sativa
  Clone ID: PAT_MRT4530_2073C.1.pep
MAAELASLPRGLHFFRLSGCVVSHATFPGSKAMGRWIGPQREADGDRGPRTKEEAAPKRFVHTPIPPSILSDPTLAAAATGLLPAAYNFELPKTAHRIRSSGARRTALQLPEGLLLFSLPLSHLLAPFLEPDPSNDVLILADPTYGACCLADRPAKALAADVLVHYGHSCLVPVTSSLLPVLYVFVEIRVDAQRLADAVRAAFPDPADAPRLAIAGTVQFISAVHAAREILSHDGYQGIVVPQAKPLSAGEVLGCTAPALKRSEGVGAVVFVADGRFHLEAFMIANPGVKAYRFDPFLGVLVLEEYDHVGMKQARKEAVLAARKAKSWGVILGTLGRQGSVKVLDRVVEHLEEKGLEHTVVLMSELSPARMELFGDSVDAWVQIACPRLSIDWGEGFKKPMLTTFEFDVALGYVPGWWEKGSRECGSGDATGCCSGSGTSTDCGCSNGGCADKDFGGEYPMDYYSQDGGDWNSCYMKKKPSTGERKLRVRIGNYSNS

SEQ ID NO: 6675 - protein, 492 aa, Oryza sativa
  Clone ID: PAT_MRT4530_20929C.1.pep
MDPCKFRPSSSFDTKTTTTNAGAPVWNDNEALTVGPRGPILLEDYHLIEKVAHFARERIPERVVHARGASAKGFFECTHDVTDITCADFLRSPGAQTPVIVRFSTVIHERGSPETIRDPRGFAVKFYTREGNWDLLGNNFPVFFIRDGIKFPDVIHAFKPNPRSHVQEYWRVFDFLSHHPESLHTFFFLFDDVGIPTDYRHMDGFGVNTYTFVTRDAKARYVKFHWKPTCGVSCLMDDEATLVGGKNHSHATQDLYDSIAAGNFPEWKLFVQVIDPEEEERFDFDPLDDTKTWPEDEVPLRPVGRLVLNRNVDNFFNENEQLAFGPGLVVPGIYYSDDKMLQCRVFAYADTQRYRLGPNYLMLPVNAPKCAHHNNHYDGAMNFMHRDEEVDYYPSRHAPLRHAPPTPITPRPVVGRRQKATIHKQNDFKQPGERYRSWAPDRQERFIRRFAGELAHPKVSPELRAIWVNYLSQCDESLGVKIANRLNVKPSM

SEQ ID NO: 6676 - protein, 544 aa, Oryza sativa
  Clone ID: PAT_MRT4530_20985C.1.pep
MALTLRSSTSFLSPLDPSSKREDAPPCCVVPMPAPGSGGRLRLARAAPVEHATMEEMASPEAATLLHHGGGGGQGQRRGKGTAVYVMLPLETVGAGGKVARARALAASLAALRSGGVEGVMVDVWWGVVEREGPRRYDWEGYGELVRMVERAGLRLQMVMSFHQCGGNVGDSCNIPLPGWVLEEMKSNPDIVYTDRSGRRNPEYISLGCDTLPVLKGRTPIQVYSDYMRSFRDTFCGYLGNTIVEIQVGLGPCGELRYPSYPEANGTWRFPGIGEFQCYDKYMRASLQQAAAAAGHEEWGRGGPHDAGEYKQFPEETGFFRRDGTWCTEYGDFFLGWYSGMLLEHGDRVLAAAEAVFRGTGAALSAKVAGIHWHYRTRSHAAELTAGYYNTRRRDGYAPVAAMLARRGAVLNFTCMEMRDEQQPEHAGCSPEQLVRQVRSAARAARVGLAGENALERYDEAAFAQVVATAASAGLGAFTYLRMNKKLFDGDNWRQFVSFVRAMADGGERAALPSCDTEQSDLYVGFLEKRAAPEAEAAAAAAVV

SEQ ID NO: 6677 - protein, 89 aa, Oryza sativa
  unsure (1)..(89): unsure at all Xaa locations
  Clone ID: PAT_MRT4530_21046C.1.pep
APPLLLLLPPPAETSSSYPSRIXRSTPPPATETRPLVDRSAARAGAGRQAARGVGGNFGVKINKTTGAAYTIASRGEKRGREGKGPEXW

SEQ ID NO: 6678 - protein, 1155 aa, Oryza sativa
  Clone ID: PAT_MRT4530_21231C.1.pep
MFTPQGKGWTGWSTPAPANQRSGGGAPAASAPLGKGKGTTLRVAELEQELHEYQYNMGLLLIEKKEWTAKLDEINQALTQKEEILKREQAAHLNAISEYERREESMRKALGVEKQCVTDLEKALREIRGEIAEVKFMSEKKITDAQSLEASLEEKRLEIEGKLHAADAKLAEANGTPTQADRDLEEVEARQRRLEKEKLYFENERKAGEDRIKRQEDSLRDWDKKLKESQNRILDLQRSLNDREERANENDKLFKIKQEELEEAKKALEHTKATLKIKEDDINKRLAELHLQEKEAESKNRKLEEREKKIAEREEKVSAREKVGLQKLLEDHNVKLESKRRDFDLQLENEKKSFDAMLVQKEADLVQREKDVRSSEEKLSKKEQVLNESKKKLEEWQNDLDTKSNALKKWEESLQNDEKQLSEQKLQIENERKQAEMYKLELESLKATVVAEKEKILQEQNNLKLTEEERQEHIMLTAQLKKEIDEYRMRSNSLSEETEDLRKQRQKFEEEWEQLDEKRTHLEEEAKKLNNEKKNLERWHDNEEKRLKDREDELDIKYKEQGENLALKEKSLIDNIDHQRLENEELLKRERADLQRNLQLHRHELEMEMEKKQASKERELEEKENELNRKMDFVENELKRAAELNESKIQKILLEKKQLQKEKEVLVEDRQKLETDKADIRRDIDSLNTLSKSLKERREAYNRDRNNLIDIFEKYKVCKNCGVIIFEGLDALALKDSTDIEYPSLAVEADDRSPNPDTLAQETGALVNSGGRLSLLQKCSRIFKFSPRKKAEQSSEQQAVKNTDFGARLEEASQSDDDYEPTPVYQVAYNSFDAEDLPSESGAFENEESERQDIADDVQMESSLGVADNCVDIHGTQSFDGNTDMVVDTTIVDVDQNGKDSAVLPVVDLEPETSKQGRRQQNRKGRAKGGVKRTRSVLAVVEDAKEILGENLEVKKDDGQGDSVTVGGTRKRRFAGATISEQDEDSEAHSESVSLGGQRRKRRQTAAAVTQAPGEKRYNLRRTTVANAATAAQTNKKKAAKKGSKQTVEATADDTEGTSKAEEPATGSKGASQSADDASQLPEYSQAEAGDTHGPVEVTSAEGVDIVDGIDAAPDAMPMTPSGSELGAEQDDEEDDDSERRNQSIGKKLWSFFTT

SEQ ID NO: 6679 - protein, 370 aa, Oryza sativa
  Clone ID: PAT_MRT4530_21267C.1.pep
MAIMVDPPNGMGNQGKYYYSMWQTLFEIDTKYVPIKPIGRGAYGIVCSSINRETNEKVAIKKIHNVFDNRVDALRTLRELKLLRHLRHENVIALKDIMMPVHRRSFKDVYLVYELMDTDLHQIIKSPQGLSNDHCQYFLFQLLRGLKYLHSAEILHRDLKPGNLLVNANCDLKICDFGLARTNSSKGQFMTEYVVTRWYRAPELLLCCDNYGTSIDVWSVGCIFAELLGRKPIFPGTECLNQLKLIVNVLGTMSESDLEFIDNPKARRYIKSLPYTPGVPLASMYPHAHPLAIDLLQKMLIFDPTKRISVTEALEHPYMSPLYDPSANPPAQVPIDLDIDENISADMIREMMWHEMLHYHPEVVAAMSAR

SEQ ID NO: 6680 - protein, 138 aa, Oryza sativa
  unsure (1)..(138): unsure at all Xaa locations
  Clone ID: PAT_MRT4530_21361C.1.pep
MQMLMSVFVIIIGCYTAIDWITDIVIFIIGVSTMHLKRCQTVKLYIAASLTXFYIVKALFGFIKQLIGYNIVAFCHPSTVFIFGKSTRETMAKMIEALGFGVIWFERRLSFRLLRCICAVFHTAYGALSVQSALMPHS

SEQ ID NO: 6681 - protein, 782 aa, Oryza sativa
  Clone ID: PAT_MRT4530_21504C.1.pep
MAPTLAFLLVLLLLLAGGGGGGAFLAAAASTDTVVPGKGMAGNQTLVSKNGRFELGFFTPGSGIHYFLGVRLRNMAEYSPTFWIGDRVGVIDLPGVSLEVFGDKLYIKEDGVSLWWSSVAGNGSSSSSDGGAVAVLLDTGDLVVRDQGNPSGVLWRSFDYPGDSLLPGGRLGLDAATGTNVSLTFKGFSHNGSLQVDASRRNGFVLTTDGIDSRGAFPDWMVTSQDNGSSLVLNHPDAPNSTEFLQFNLGLISLMRWSDSTAGWVARWTFPSDCKSGAFFCGDFGACTAGGGGGCECVDGFTPSYPDEWRLGYFVTGCSRSLPLSCEANGQTEHDDSFAILDNLRGLPYNAQDEPVTTDEDCRAACLNKCYCVAYSNESGCKLWYHNLYNLSSADKPPYSKIYVRLGSKLKSNRGLATRWIVLLVVGSLAVTSVMLGLVLLCRYRRDLFASSKFEVEGSLIVYTYAQIRKATGNFSDKLGEGGFGSVFRGTLPGSTTVVAVKNLKGVGQAEKQFRTEVQTVGMIRHTNLVRLLGFCVNGNRRLLVYEYMSNGSLDAHIFSEKSSLLSWHVRYQIALGIARGLAYLHEECEDCIIHCDIKPENILLDYEFCPKICDFGMAKLLGREFNSALTTVRGTMGYLAPEWIYGQPITKKADVYSFGIVLFEIISGRRSTETVKFGSHRYFPTYAAVQMNEGDVLCLLDSRLEGNANVKELDITCRVACWCIQDEENDRPSMGQVVRMLEGVVDMEMPPIPASFQNLMESEDSGIYSEESWNFRTRDQF

SEQ ID NO: 6682 - protein, 280 aa, Oryza sativa
  Clone ID: PAT_MRT4530_21919C.1.pep
MSGAYRDRGFGGAAAEMDRKRIKDVLEKHLDRSSPSTSRGAAVAKERDRLAAAGGKLPAPLGKAGKVSDGAEEFETDSEDSDVSGSEGEDTSWISWFCSLRGNEFFCEIDDDYIQDDFNLCGLSNQVPYYDYALDLILDIESSNGDVFTEEQNELIESSAEMLYGLIHARYILTSKGLAAMLEKFKNYDFGRCPRVYCCGQPCLPAGQSDIPRSSTVKIYCPKCEDLHYPRSKYQGNIDGAYFGTTFPHLFLMTYPHLKPQKPSQQYVPKVFGFKLHKQS

SEQ ID NO: 6683 - protein, 625 aa, Oryza sativa
  Clone ID: PAT_MRT4530_21965C.1.pep
MKREYQEAGGSSGGGSSADMGSCKDKVMAGAAGEEEDVDELLAALGYKVRSSDMADVAQKLEQLEMAMGMGGVSAPGAADDGFVSHLATDTVHYNPSDLSSWVESMLSELNAPLPPIPPAPPAARHASTSSTVTGGGGSGFFELPAAADSSSSTYALRPISLPVVATADPSAADSARDTKRMRTGGGSTSSSSSSSSSLGGGASRGSVVEAAPPATQGAAAANAPAVPVVVVDTQEAGIRLVHALLACAEAVQQENFAAAEALVKQIPTLAASQGGAMRKVAAYFGEALARRVYRFRPADSTLLDAAFADLLHAHFYESCPYLKFAHFTANQAILEAFAGCHRVHVVDFGIKQGMQWPALLQALALRPGGPPSFRLTGVGPPQPDETDALQQVGWKLAQFAHTIRVDFQYRGLVAATLADLEPFMLQPEGEADANEEPEVIAVNSVFELHRLLAQPGALEKVLGTVHAVRPRIVTVVEQEANHNSGSFLDRFTESLHYYSTMFDSLEGGSSGQAELSPPAAGGGGGTDQVMSEVYLGRQICNVVACEGAERTERHETLGQWRNRLGRAGFEPVHLGSNAYKQASTLLALFAGGDGYRVEEKEGCLTLGWHTRPLIATSAWRVAAA

SEQ ID NO: 6684 - protein, 346 aa, Oryza sativa
  Clone ID: PAT_MRT4530_22107C.1.pep
MATAGKVIKCKAAVAWEAGKPLSIEEVEVAPPQAMEVRVKILYTALCHTDVYFWEAKGQTPVFPRILGHEAGGIVESVGEGVTELAPGDHVLPVFTGECKECDHCKSEESNMCDLLRINVDRGVMIGDGKSRFTIKGKPIFHFVGTSTFSEYTVIHVGCLAKINPEAPLDKVCILSCGFSTGFGATVNVAKPKKGQTVAIFGLGAVGLAAMEGARLSGASRIIGVDLNPAKFEQAKKFGCTDFVNPKDHSKPVHEGWGVAVLVGVPTKDDVFKTHPMNFLNEKTLKGTFFGNYKPRTDLPNVVELYMKKELELEKFITHSVPFSEINTAFDLMLKGESLRCVMRMD

SEQ ID NO: 6685 - protein, 629 aa, Oryza sativa
  Clone ID: PAT_MRT4530_2230C.1.pep
MAFGDRITTFEDSEKESEYGYVRKVSGPVVVADGMGGAAMYELVRVGHDNLIGEIIRLEGDSATIQVYEETAGLMVNDPVLRTRKVMPAQPLSVELGPGILGNIFDGIQRPLKTIAIKSGDVYIPRGVSVPALDKDALWHFKPEKLGVGDIITGGDLYAIVNENTLMQHKVALPPGAMGKISYIAPAGQYSLQDTVLELEFQGIKKEFTMLQTWPVRSPRPVMEKLAADTPLLTGQRVLDALFPSVLGGTCAIPGAFGCGKTVISQALSKYSNSQAVVYVGCGERGNEMAEVLMDFPQLTMTTEDGREESVMKRTTLVANTSNMPVAAREASIYTGITIAEYYRDMGYNVSMMADSTSRWAEALREISGRLAEMPADSGYPAYLAARLASFYERAGKVRCLGSPKRDGSVTIVGAVSPPGGDFSDPVTSATLSIVQVFWGLDKKLAQRKHFPSVNWLISYSKYSKIPTALEPHYEREDPDFIDIRTKAREVLQREDDLNEIVQLVGKDALAESDKITLETAKLLREDYLAQNAFTPYDKYCPFYKSVWMMRNIIHFNTLATQAVERAAGADGQKITYSVIKHRMGDLFYRLVSQKFEDPAEGKEVLIAKFQKLYDDLTAGFRNLEDEAR

SEQ ID NO: 6686 - protein, 338 aa, Oryza sativa
  Clone ID: PAT_MRT4530_22368C.1.pep
MSFLFKSSNGATTEKNLTLEEQQEKINDLRKELGEHSSEEIQDFLSDASCLRFLRARNWNVQKASKMMKSAVKWRVSYMPQKINWDDVAHEAETGKIYRADYKDKHGRTVLVLRPGLENTTSGKGQIKYLVYCLEKAIMSLTEDQEKMVWLTDFQSWTLGSTPLKVTRETVNVLQDCYPERLGLAILYNPPRIFESFWKDFYRSTTLASVLFWYLPNVEIVKPFLDHETYKKVKFVYSSDKESQKIMADVFDLDKLDSAFGGRNPATFEYNSYAERMRADDIKMGSSFKSNGITLPQDHSHVSADKEANGGGSDASSEASFYSGTDSPNHEEGGSILA

SEQ ID NO: 6687 - protein, 469 aa, Oryza sativa
  Clone ID: PAT_MRT4530_22543C.1.pep
MAPQLPLEVASAPKLDDDGHPQRTGNLWTCVAHIITAVIGCGVLALSWSVAQLGWVAGPIAMVCFAFVTYISAFLLSHCYRSPGSEKMQRNYSYMDAVRVHLGRKHTWLCGLLQYLNLYGIGIAYTITTATCMRAIKRANCYHSEGRDAPCDSNGEHFYMLLFGAAQLLLSFIPNFHKMAWLSVVAAIMSFAYSTIGLGLGLAKTIGDGTVKGNIAGVAMATPMQKVWRVAQAIGDIAFAYPYTIVLLEIQDTLRSPPPESETMQKGNVIAVLATTFFYLCVGCFGYSAFGNAAPGNLLTGFGFYEPYWLIDFANACIVLHLLGGYQMFSQQIFTFADRCFAASFPNSAFVNRSYSVKILPWRRGGGGGGAGRYEVNLQRVCFRTVYVASTTGLALVFPYFNEVLGVLGALVFWPLAIYLPVEMYCVQRRISPWTPRWAALQAFSVVCFVVGTFAFVGSVEGVIRKRLG

SEQ ID NO: 6688 - protein, 545 aa, Oryza sativa
  Clone ID: PAT_MRT4530_22702C.1.pep
MGSSVKDAGGGKEEQQQQLESPLLEAAVSSGGGDGGGGHGVSGELESILGDETVPWARRMWAATGVEMRLMLRLAAPAVLVYMINYLMSMSTQIFSGHLGTLELAAASLGNTGIQVFAYGLMVFSWLLAWHAMHGLLANGSYVVQMQLGMGSAVETLCGQAYGAHKYDMLGVYLQRSTVLLMATGVPLAVIYAFSRPILVLLGESPEIASAAAVFVYGLVPQIFAYAANFPIQKFMQAQSIMAPSAYISAATLAFHLVLSYLVVYQFGLGLLGASLMLSISWWVIVVAQFIYIVTSRRCRLTWTGFSMLAFSGLPDFFKLSLASAVMLCLETWYFQILVLIAGLLKDPEMALASLSVCMTISGWVFMISVGFNAAASVRVSNELGAGNPKSAAFSVVVVTVLSFFLSVVISLVILLCRDYISYIFTDGEDVATAVSKLTPLLALTLILNGIQPVLSGVAVGCGWQAFVAYVNVGCYYIVGIPLGCLLGFYFDLGAAGIWSGMIGGTLMQTLILMWVTFRTNWNREVEEAMKRLNKWEDKTPLLSE

SEQ ID NO: 6689 - protein, 1121 aa, Oryza sativa
  Clone ID: PAT_MRT4530_23251C.1.pep
MDSLWAAIAALFVAAAVVVRGAAAADDAQLLEEFRQAVPNQAALKGWSGGDGACRFPGAGCRNGRLTSLSLAGVPLNAEFRAVAATLLQLGSVEVLSLRGANVSGALSAAGGARCGSKLQALDLSGNAALRGSVADVAALASACGGLKTLNLSGDAVGAAKVGGGGGPGFAGLDSLDLSNNKITDDSDLRWMVDAGVGAVRWLDLALNRISGVPEFTNCSGLQYLDLSGNLIVGEVPGGALSDCRGLKVLNLSFNHLAGVFPPDIAGLTSLNALNLSNNNFSGELPGEAFAKLQQLTALSLSFNHFNGSIPDTVASLPELQQLDLSSNTFSGTIPSSLCQDPNSKLHLLYLQNNYLTGGIPDAVSNCTSLVSLDLSLNYINGSIPASLGDLGNLQDLILWQNELEGEIPASLSRIQGLEHLILDYNGLTGSIPPELAKCTKLNWISLASNRLSGPIPSWLGKLSYLAILKLSNNSFSGPIPPELGDCQSLVWLDLNSNQLNGSIPKELAKQSGKMNVGLIVGRPYVYLRNDELSSECRGKGSLLEFTSIRPDDLSRMPSKKLCNFTRMYVGSTEYTFNKNGSMIFLDLSYNQLDSAIPGELGDMFYLMIMNLGHNLLSGTIPSRLAEAKKLAVLDLSYNQLEGPIPNSFSALSLSEINLSNNQLNGTIPELGSLATFPKSQYENNTGLCGFPLPPCDHSSPRSSNDHQSHRRQASMASSIAMGLLFSLFCIIVIIIAIGSKRRRLKNEEASTSRDIYIDSRSHSATMNSDWRQNLSGTNLLSINLAAFEKPLQNLTLADLVEATNGFHIACQIGSGGFGDVYKAQLKDGKVVAIKKLIHVSGQGDREFTAEMETIGKIKHRNLVPLLGYCKAGEERLLVYDYMKFGSLEDVLHDRKKIGKKLNWEARRKIAVGAARGLAFLHHNCIPHIIHRDMKSSNVLIDEQLEARVSDFGMARLMSVVDTHLSVSTLAGTPGYVPPEYYQSFRCTTKGDVYSYGVVLLELLTGKPPTDSADFGEDNNLVGWVKQHTKLKITDVFDPELLKEDPSVELELLEHLKIACACLDDRPSRRPTMLKVMAMFKEIQAGSTVDSKTSSAAAGSIDEGGYGVLDMPLREAKEEKD

SEQ ID NO: 6690 - protein, 215 aa, Oryza sativa
  unsure (1)..(215): unsure at all Xaa locations
  Clone ID: PAT_MRT4530_23285C.1.pep
MATEEDASTMAAAEADPKPAATPSYPEMILAAIEALDDRNGSNKTAISQHIEGKYEGLLPPAHPSLLTAHLARMKQTGELAFSKNNYFRGDDPSLPPKRGRGXRPPKPKDAAAAAAXAPAPAPAAPAASSPRPRGRPPKPKDPLAEAVAKATSGMPRARGRPPKKAKVEQEDPIGAPAAASAPAAAAEAAPPVKRGRGRPPKVRPAAPVGEPAAA

SEQ ID NO: 6691 - protein, 329 aa, Oryza sativa
  Clone ID: PAT_MRT4530_23712C.1.pep
MDPGAGGPLTESEKADLDAIAAIKESAAAEYKEKGNRLVKMGRSHYADAVDCYTKAIAQMEPLPPPPVPSPDASVLFANRAHVNLLLGNHRRALDDAARAVQLSPSNVKAYYRAAKAAIALGLLPEAAAFCRRGIEQDPANEELKKLLAQVDAQQSEQDRHRAKVAQAVSAAKDIVAAIEKRGLKLGKAAYQELTGVKKPKLDEQGVLHWPVLLLYPEAGVGTVLSKSEILKILLEGTMDSKSLPESLLDEEDGENDDGKSSTITSSDKGSVKWINVKEGKTLQEVLQHKDFIIPAIPGLHYLLLGYSYKHASCMQIGVPRTQTCATVI

SEQ ID NO: 6692 - protein, 485 aa, Oryza sativa
  Clone ID: PAT_MRT4530_23714C.1.pep
MALSVEKTSSGREYKVKDLSQADFGRLEIELAEVEMPGLMACRAEFGPSQPFKGARISGSLHMTIQTAVLIETLTALGAEVRWCSCNIFSTQDHAAAAIGRDSAAVFAWKGETFEEYWWCTERCLDWGVGGGPDLIVDDGGDATLLIHEGVKAEEEFEKSGKVPDPESTDNAEFKIVLTIIRDGLKSDPSKYRKMKERLVGVSEETTTGVKRLYQMQETGALLFPAINVNDSVTKSKFDNLYGCRHSLPDGLMRATDVMIAGKVAVVCGYGDVGKGCAAALKQAGARVIVTEIDPICALQALMEGLQVLTLEDVVSEADIFVTTTGNKDIIMVDHMRKMKNNAIVCNIGHFDNEIDMLGLETYPGVKRITIKPQTDRWVFPETNTGIIVLAEGRLMNLGCATGHPSFVMSCSFTNQVIAQLELWKEKSTGKYEKKVYVLPKHLDEKVAALHLGKLGARLTKLSKSQADYISVPVEGPYKPAHYRY

SEQ ID NO: 6693 - protein, 831 aa, Oryza sativa
  Clone ID: PAT_MRT4530_23715C.1.pep
MPPLLYNLFVLIVVFLGGGAPACSAATDTVKPGHVVGGKDKVVSNNGKFALGFFKAPAPNQEKWFLGIWFNTVPNRTTVWVANGGEPIMDAADAGSPELTISGDDGDLVALHPTTKSIAWSTNVSAKNSTSNSNNTAAVLLNSGNLVLQDTSNMSQPRTLWQSVDHPTDTLLPGAKLGRDKLTGLNRRLVSKKSMAGPSPGAYCFEVDEDTPQLVLKLCNSSVTYWSSGPWNGQYFTGIPELIGNSPGFHLGFFDNSREEYLQFNVSNEAVVTRNFIDVDGRNKQQVWLDSSQSWLTLYSNPKVQCDVYGVCGAFSVCSFSLLPLCSCMKGFTVGSVKDWEQGDQTGGCVRKNQLDCVGSNTSSSDSTDKFYSMSDIILPDKAESMQDVDSSDECMKVCLNNCSCTAYSYGSKGCLVWHTELLNAKLQQQNSNGEIMYLRLSARDMQRSKKRRVIIGVVVGACAAGLAVLMFILMFIIRRNKDKNRSENYGSLVAFRYKDLRSATKNFSEKIGEGGFGSVFRGQLRDSTGIAVKRLDGRSQGDKQFRAEVRSIGTIQHINLVNLIGFCSDGDSRFLVYEHMPNRSLDTHLFQSNGKFLDWNTRYQIALGVARGLCYLHESCHDRIIHCDIKPQNILLDASFLPKVADFGMAKFVGRDFSRALTTMRGTIGYLAPEWISGTAITPKVDVYSYGMVLLELVSGRRNSARSEEECTTTTTTSTSTDTDGNYSVYFPVQASRKLLDGDVMSLLDQKLCGEADLKEVERVCKIGCWCIQEDEVDRPTMGQVVQILEGVLDCDMPPLPRLLQRIFERPSSVSTSTPVFLFVGSPERQ

SEQ ID NO: 6694 - protein, 348 aa, Oryza sativa
  Clone ID: PAT_MRT4530_23844C.1.pep
MAMASSAYAPAGGVGTHSAPGRIRPPRGLGFSTTTTKSRPLVLTRRGGGGGNISVARLRCAASSSSAAARPMSQPRFIQHKKEAFWFYRFLSIVYDHVINPGHWTEDMRDDALEPADLYSRKLRVVDVGGGTGFTTLGIVKRVDPENVTLLDQSPHQLEKAREKEALKGVTIMEGDAEDLPFPTDTFDRYVSAGSIEYWPDPQRGIKEAYRVLRLGGVACMIGPVHPTFWLSRFFADMWMLFPKEEEYIEWFKKAGFKDVKLKRIGPKWYRGVRRHGLIMGCSVTGVKREHGDSPLQLGPKVEDVSKPVNPITFLFRFLMGTICAAYYVLVPIYMWIKDQIVPKGMPI

SEQ ID NO: 6695 - protein, 580 aa, Oryza sativa
  Clone ID: PAT_MRT4530_24032C.1.pep
MGEVAEDIYTQDGTVDVKGNPATKKNTGNWRACPYILANECCERLAYYGMSTNLVNYMKTRLGQESAIAANNVTNWSGTCYITPLLGAFLADAYMGRFWTIASFMIIYILGLALLTMASSVKGLVPACDGGACHPTEAQTGVVFLALYLIALGTGGIKPCVSSFGADQFDENDEGEKRSKSSFFNWFYFSINIGALVASSVLVYVQTHVGWGWGFGIPAVVMAVAVASFFVGTPLYRHQRPGGSPLTRIAQVLVASARKWGVEVPADGSRLHETLDRESGIEGSRKLEHTGQFACLDRAAVETPEDRSAANASAWRLCTVTQVEELKSVVRLLPIWASGIVFATVYGQMSTMFVLQGNTLDASMGPHFSIPAASLSIFDTLSVIVWVPVYDRLIVPAVRAVTGRPRGFTQLQRMGIGLVISVFSMLAAGVLDVVRLRAIARHGLYGDKDVVPISIFWQVPQYFIIGAAEVFTFVGQLEFFYDQAPDAMRSMCSALSLTTVALGNYLSTLLVTIVTHVTTRNGAVGWIPDNLNRGHLDYFFWLLAVLSLINFGVYLVIASWYTYKKTADSPDDKAEHAGAN

SEQ ID NO: 6696 - protein, 1799 aa, Oryza sativa
  Clone ID: PAT_MRT4530_24184C.1.pep
MGTGSRAVVGAAAGLGSAVLGPPSSLPPRRRAPVFRRSCRTGASTACRRRTRLRPAVSRASPIRSEDESLCVVERSPQLIEEEGRLRRALFARVSGLDMALSAGDAAAALSAALHLPAGRFSVHCAQPDHFLIVFANSGDMDLALSRSPIPAPPYQLILRPWTRLVMATSFSMPFRVSLDLEGVPAHAWNASTAAALVAPGRLISVDTPARPDEYRFLRVTISSHNPAAIPKARLLLIPEPTLGSQCLLRYRVLLHVLSVVCLSAPSASGDVDPAGGGGASGEGGGAANDGGGAANDGGGDLGARSSRAHAATSFSPLADDGRGLLLALPDATNSPAAADAITASPVDVVPPVDAGSPAADVATTCSPVAAGMPAAAVAAAGSTAPAVVAPDSPVAAVAVFSSPTVVAASSSPAASPVDIVAASSSPAAAVAAFGSPTVVVASNSLVAGSLAAVVSPVCATSPVAACHPPTASSLLSGPSGGGPAFPASPLCSRRSPLLADGIAASYAEPTGLFFDELDALAAEFGPAVPLPPRVSPVPPSASGAGTSLPRTACTPPTGGEWLRPESPLSQQAPTLVVDVPDGVLYDVPMVVLDLDGRPLAHSLPSSVADNAALHAFLTSCSRPLPPALLPPPLPLPPLAAKAVEVVPKRSECIAAKMALEALEGPIHAVSRAQRNLMRKLGLVPERGPVTAEAVAAYNALFSKPLSQEHIIALSSLFSSSLPPAKAAEELVETIMDVIPSRTILEMLGLDFDYSFLPAVGRSGGVLLASRTTVWSVSDVHLADFSLASLVRHSSDVAPWWLSVVYGPQEEPDKLRFLDELRSLRSSRTGPWAIVGDFNLILEDQDKNNLNLNRRMMGRFRRLVDELELRELPLHGRRFTWSNERESPTLVKLDRVLFSADWEELFPSCLLQAASSIASDHCALLLHTCVTSPKAHRFRFEAFWPKFDGFLQVVQDAWHPPANLPPLAALAWCFSTTAKRLQSWSDRHIGSVRLQLQMAKELVFRLDVAQESRSLSPLETWLRRDLKLKCIGLASLERTIARQRSRLVWLKEGDTNTKFFHLHARARRRKNFITCLCDGDQLAVSHDALQELASSHFCAILGTSVERELALDLHSLGLRPAQLEGLDCLFTEDEVWAVIKSLPSDKAPGPDGFTGRFYKSCWPVIKVEILAALNSLFLTNGQGFASLNDALISLLPKKDEAVDVKDFRPISLIHSFGKLFSKILASRLSPRLDELVAPNQSAFIKGRSLHDNFRYVQLAARALHAKRIPRLLLKVDIAKAFDTRGLRQGDPLSPMLFILVMDVLNAMLRKASDLGDFLPLNDRAIRHRASLYADDLVLFLSPVRQDLEFIQGILSVFGAASGLRTNFTKCSITPIRCSVLDLELVQSSFPCSISEFPCTYLGIPLSVRKLPKAALQPLVDKVSHRLPPWKGRLTTLAGRSVLVQSVLSSIPVHVSIAIGLPSWVIKAIDKKRRAFLWTGTDSANGGQCRVSWMRVCRPRDLGGLGIPDLRVAGFALRVRWLWLQRSGHPYWSDLKAPVERSVSDMFAASTFSILGDGQSTLFWTDRWIDGRSIASIAPDLLHVVPPRFRGSRTVAAGLANNSWVGDIRGALTVPVISQFLLVWDAVVPTQLSPGIEDHLVWRWTGDQCYSARSEYQAFFLGQHSFAYADLLWHAKGPAKCKFFLWFAFQQRCWTADLLQKRGIDSHSACPFCAQELETANHILIDCVFARQVWLRVLSPPRWAALSPPRGSWLQDWWSSSRVCLPEHLRSGFDSLVLLVSWQLWKERNSRVFTLRSLRS

SEQ ID NO: 6697 - protein, 98 aa, Oryza sativa
  unsure (1)..(98): unsure at all Xaa locations
  Clone ID: PAT_MRT4530_24833C.1.pep
MLLDLHLVPSSTAAESTVSYLKMKGDYHRYLVVFKTGAVRKVAAVSTLVVYMAAQDFGLACLATTHPIRIGLSLNYSGFYYXIINSSDKACYLAMQAF

SEQ ID NO: 6698 - protein, 1294 aa, Oryza sativa
  Clone ID: PAT_MRT4530_25119C.1.pep
MVSNSFWLFILLVSFIPISAWAESRDISTLFTLRDSITEGKGFLRNWFDSETPPCSWSGITCIGHNVVAIDLSSVPLYAPFPLCIGAFQSLVRLNFSGCGFSGELPEALGNLQNLQYLDLSNNELTGPIPISLYNLKMLKEMVLDYNSLSGQLSPAIAQLQHLTKLSISMNSISGSLPPDLGSLKNLELLDIKMNTFNGSIPATFGNLSCLLHFDASQNNLTGSIFPGITSLTNLLTLDLSSNSFEGTIPREIGQLENLELLILGKNDLTGRIPQEIGSLKQLKLLHLEECQFTGKIPWSISGLSSLTELDISDNNFDAELPSSMGELGNLTQLIAKNAGLSGNMPKELGNCKKLTVINLSFNALIGPIPEEFADLEAIVSFFVEGNKLSGRVPDWIQKWKNARSIRLGQNKFSGPLPVLPLQHLLSFAAESNLLSGSIPSHICQANSLHSLLLHHNNLTGTIDEAFKGCTNLTELNLLDNHIHGEVPGYLAELPLVTLELSQNKFAGMLPAELWESKTLLEISLSNNEITGPIPESIGKLSVLQRLHIDNNLLEGPIPQSVGDLRNLTNLSLRGNRLSGIIPLALFNCRKLATLDLSYNNLTGNIPSAISHLTLLDSLILSSNQLSGSIPAEICVGFENEAHPDSEFLQHHGLLDLSYNQLTGQIPTSIKNCAMVMVLNLQGNLLNGTIPVELGELTNLTSINLSFNEFVGPMLPWSGPLVQLQGLILSNNHLDGSIPAKIGQILPKIAVLDLSSNALTGTLPQSLLCNNYLNHLDVSNNHLSGHIQFSCPDGKEYSSTLLFFNSSSNHFSGSLDESISNFTQLSTLDIHNNSLTGRLPSALSDLSSLNYLDLSSNNLYGAIPCGICNIFGLSFANFSGNYIDMYSLADCAAGGICSTNGTDHKALHPYHRVRRAITICAFTFVIIIVLVLLAVYLRRKLVRSRPLAFESASKAKATVEPTSTDELLGKKSREPLSINLATFEHALLRVTADDILKATENFSKVHIIGDGGFGTVYKAALPEGRRVAIKRLHGGHQFQGDREFLAEMETIGKVKHPNLVPLLGYCVCGDERFLIYEYMENGSLEMWLRNRADALEALGWPDRLKICLGSARGLAFLHHGFVPHIIHRDMKSSNILLDENFEPRVSDFGLARIISACETHVSTDIAGTFGYIPPEYGLTMKSTTKGDVYSFGVVMLELLTGRPPTGQEEVQGGGNLVGWVRWMIARGKQNELFDPCLPVSSVWREQMARVLAIARDCTADEPFKRPTMLEVVKGLKMTHGMECGPLVVTVSRDM

SEQ ID NO: 6699 - protein, 579 aa, Oryza sativa
  Clone ID: PAT_MRT4530_25375C.1.pep
MGSCNENILVWNVRGLDFDYSFLPAVGRSGGVLLAWRTTVWSVSDVHLAEFSLTALVRHSSDVAPWWLSVVYGPQEEPDKLRFLDELRSLRSSRTGPWAVVGDFNLILEAQDKNNLNLNRRMMGRFRRLVDELELRELPLHGRRFTWSNERESPTLVKLDRVLFSADWEELFPSCLLQAASSIASDHCALLLHTCVTSPKALRFRFEAFWPKFDGFLQVVQDAWHPPANLPPLAALAWCFSTTAKRLQSWSDRHIGSVRLQLQMAKELVFRLDVAQESRSLSSLETWLRRDLKLKCLGLASLERTIARQRSRLVWLKEGDANTKFFHLHARARRRKNFITRLCDGDQLAVSHDALQELASSHFCAILGTSVERELALDLHSLGLRPAQLEGLDCPFTEDEVWAVIKSLPSDKAPGPDDFTGRFYKSCWPVIKVEILAALNSLFLTNGQGFASLNDALISLLPKKDEAVDVKDFRPISLIHSFGKLFSKILASRLSPRLDELVAPNQSAFIKGRSLHDNFRYVQLAARALHAKRVPRLLLKVDIAKAFDTVSWPFLLEVHGSPIGEVFAKEILFPPCFSF

SEQ ID NO: 6700 - protein, 135 aa, Oryza sativa
  Clone ID: PAT_MRT4530_25382C.1.pep
HASAHASGGGVGGGSGSSGGYGYGAGYRSAGGGYYDSTAYGYGRGGYGYGGNAGFGSGYGGGYGGSLYGGAYGAYGAYGGGAYGGGAYGGGAYGGGAYGGAPGAYGGAGGYGSYGGAGAAGAGGRGSSRYHPYGK

SEQ ID NO: 6701 - protein, 382 aa, Oryza sativa
  Clone ID: PAT_MRT4530_25494C.1.pep
MVVPSATTPARQETVVAAAPPAAAASGVVGGGGGVTIATVDMSAERGAVARQVATACAAHGFFRCVGHGVPAAAPVAARLDAATAAFFAMAPAEKQRAGPASPLGYGCRSIGFNGDVGELEYLLLHANPAAVAHRARTIDAMDPSRFSAIVNEYIEAMKKLACEILDLLGEGLGLKDPRYFSKLTTNADSDCLLRINHYPPSCNIHKLDHDDQCNIKSLVSTKASNGGNLMAGGRIGFGEHSDPQILSLLRANDVEGLQVFVPDHEGKEMWVQVPSDPSAIFVNVGDVLQALTNGRLISIRHRVIATACRPRLSTIYFASPPLHARISALPETITASSPRRYRSFTWAEYKTTMYSLRLSHSRLELFKIDDDDSDNASEGKA

SEQ ID NO: 6702 - protein, 403 aa, Oryza sativa
  Clone ID: PAT_MRT4530_25496C.1.pep
MVVPSATTPARQETVVAAAPPAAAASGVVGGGGGVTSSTGDMSAERGAVARHFFTACAAHGFFRCVGHGVPAAAPVAARLDAATAAFFAMAPAEKQRAGPASPLGYGCRSIGFNGDVGELEYLLLHANPAAVAHRARTIDAMDPSRFSEICLHISASEYCSGVMQRSISAIVNEYIEAMKKLACEILDLLGEGLGLKDPRYFSKLTTNADSDCLLRINHYPPSCNIHKLDHDDQCNIKSLVSTKASNGGNLMAGGRIGFGEHSDPQILSLLRANDVEGLQVFVPDHEGKEMWVQVPSDPSAIFVNVGDVLQALTNGRLISIRHRVIATACRPRLSTIYFASPPLHARISALPETITASSPRRYRSFTWAEYKTTMYSLRLSHSRLELFKIDDDDSDNASEGKA

SEQ ID NO: 6703 - protein, 911 aa, Oryza sativa
  Clone ID: PAT_MRT4530_25684C.1.pep
MGQPVTQQNFKMGQPVTQQNFLKKCWPWESNPQPSVSRAMLHIILYIMFISSKETNLTGRQPSYLSPYRSPLLATPISASTAAVRLLRHRREHHRSAVVLLLVERSFEGSAGVLTGAWGSGLAGAGSGGSSGTLEKRGERCAGQAKRRSQRRTGRAERRVKWPTMDRSWINSKRFSNEYMDGVNEFMTFLSERFGDDEEMLCPCRRCLNRVPQFKGRVHDHLHIHGMATTYTRWIHHGEPLKVVPHEIDDHVDEDTSLNEDFDMNVDEEDDPDDGIHGMVEELYTAEEEGQGKKSMFAILLEEMKQELYPGGPCTRWKDNGGRKKIPEKVLRHFPLIPRLKRIFSSKRTAEEVQWHKLKRKPVENELSHPADGESWKDFDRKYGWFAEDARNIRLGLATDGFNPFGKMSFSYSMWPVFLIPYNFPPWECVEQSNFIMGLLIPGRECPGKDIDVFLEPLIEELLELWKGVPTVDVLTKKKFDLHAAVIWCIHDYPGLSTLSGRVTRGYYACVHCDKNACSKRIRNKICYIGHRRFLARDHPWRRSKVFDGNVENCEKPEKFTTDELMEQLERVKDVRPGKHPESKKRKRDEEGQCWKRRSCLWDLPYWSSLKLRHNLDVMHIEKNICEYILGTFLGIAGKSKDSTNSRLDLEDMGIRKHLHLIRDGDSYSAPHAPYTMTKTQKADFCDFLKSVKFPNGYASNLATCVTADGCNLQGLKTHDCHILLQRIIPAAVRGIMPKDINEALAELGNFFQQLCAKTLNLDVLERLKANVPIILCKLEKIFPPSFFDVMLHLAVHLPEEAILRGPVQYGWMYPIERRLLTLKRFVRNMARLEGSIAEAYVAAECLTICSKYFGDDVDMYHHQITNLLTFNKYHTDGSIAVIQSTYHIHPTDFNAPKPYNPECREEAQVA

SEQ ID NO: 6704 - protein, 183 aa, Oryza sativa
  Clone ID: PAT_MRT4530_25685C.1.pep
MLNLIKIKDKKKEQAASAAGKAPVKKQSAGELRLHKDISELNLPKSTSISFPNGKDDLMNFEIIVRPDEGYYLGGTFVFTFQVSPSYPHEPPKVKCKTKVYHPNIDLEGNVCLNILREDWKPVLNINTVIYGLNLLFTQPNDEDPLNHEAAAVLRDNPKLFEANVKRAMAGGYVGQHYFPRCA

SEQ ID NO: 6705 - protein, 173 aa, Oryza sativa
  Clone ID: PAT_MRT4530_26068C.1.pep
MSRHPSTKWAQRSDKVFLTIELPDARDVKLNLKPEGQFIFSAKGPADDTPYELDLELFDAVNVEESKAAVAARSICYLIKKAESKWWPRLLKKEGKPPVFLKVDWDKWQDEDDEDIGLGDFGDMDFSKLGMGGPDDDLEDDDEDDTADSANKDDEDIKAEGSGEQEAAGEAKP

SEQ ID NO: 6706 - protein, 186 aa, Oryza sativa
  Clone ID: PAT_MRT4530_26070C.1.pep
MSRHPSTKWAQRSDKVFLTIELPDARDVKLNLKPEGQFIFSAKGPADDTPYELDLELFDAVNVEESKAAVAARSICYLIKKAESKWWPRLLKKEGKPPVFLKVDWDKWQDEDDEDIGLWRELTVHFLLVAVGDFGDMDFSKLGMGGPDDDLEDDDEDDTADSANKDDEDIKAEGSGEQEAAGEAKP

SEQ ID NO: 6707 - protein, 173 aa, Oryza sativa
  Clone ID: PAT_MRT4530_26127C.1.pep
MANDSLTRSHIVGDVLDQFSNSVPLTVMYDGRPVFNGKEFRSSAVSMKPRVEIGGDDFRFAYTLVMVDPDAPNPSNPTLREYLHWMVTDIPSSTDDSFGREIVTYESPSPTMGIHRIVMVLYQQLGRGTVFAPQVRQNFNLRSFARRFNLGKPVAAMYFNCQRPTGTGGRRPT

SEQ ID NO: 6708 - protein, 449 aa, Oryza sativa
  Clone ID: PAT_MRT4530_26698C.1.pep
MWRGGATAASAARALRSRLIPDTSHHPATALAPIASPRSSSSSSSSSAPTIAAAVPAVAEATAAAAAVSRQAGSVSDALRHYGRCYFELSKARLSFQGCISNNSVNCRRALVVATSGAGYVLGSGNMVDIAGLCCTCAGTMMVAASANTLNQVFEIKNDAKMKRTMRRPLPSGRISPAHAAMWATSVGVAGTALLAWKANGLAAGLAASNLILYAFVYTPLKQIHPVNTWVGAVVGAIPPLLGWAAASSELSLNAMILPAALYYWQIPHFMALAYLCRNDYLAGGYRMFSFADPTGKRTAWVSLRNCLYMLPLGFFAYNWGLTSEWFSLEASLLTLGLTIGALSFVLEPTPKTARRMFYGSLLYLPAFMAGLLLHRLPNEQKEHNVTQTSEITGILYGAEQQDEERARQKREDRKPSRIHSRPPVAYASVAPFPFLPVPIYVSTQGHEL

SEQ ID NO: 6709 - protein, 375 aa, Oryza sativa
  Clone ID: PAT_MRT4530_2675C.1.pep
MAAAEARAAWQRAANRCIVQEDRKRAPKLACCPPSSEQQHVKSNGNCRNSEDRPVPNFMPLSWNPMNSSLPPDIRWWLQLQPNLGGQKNLAGLQDLKNIGGYSQVPSKCKENASDCLFNDKEFLDFKNFNPPPSKNPQKDDFDMNAPWKGGERSQPWWQITDENELALLVAERAMQHIENCDLPRPTQIVRVQGTESRSHENMGRYRGNVARSDAQDFSRGINTEPRGKRTYQNPAEQAQLLEALCHSQTRAREAEMAGKKAQSEKDDVIKLFFRQASHLFACKQWLKMLQLENICLQLKHREHQIATMIPDIPWITLKKRTTPDHEKEDWTRKKGRRHKNAGSFCDALLFAVGLGLAGAGLLLGWTFGWLLAKF

SEQ ID NO: 6710 - protein, 824 aa, Oryza sativa
  Clone ID: PAT_MRT4530_26806C.1.pep
MAPPCSSALVLPCLLVIAMAALQSAVVFADTVTAKRPLSGSQSALVSKRRKFALGFFQPENSQHWYLGIWYNQISKHTPVWVANRGTPISNPDTSQLTIATDGNMVLLDNSTTAIWSTNISKIASNSTVGVILDTGNLVLADESNTSIIHWQSFDHFGNTWLPGGKLGRNNKLAGVSTRLVAWKARNDPSPGVFSLELDPNGTSQYLLEWSITQQYWTSGNWTGRIFADVPEMTGCYPSSTYTFDYVNGENESESYFVYDLKDESVLTRFFLSEMGQIQFLTWIYAAKDWMPFWSQPKVKCDVYSLCGPFSVCTENALTSCSCLRGFSEQNVGEWLQGDHTSGCRRNVELQCSSNASVMGRTDGFYTMANVRLPSNAESVVVIGNDQCEQACLRSCSCTAYSYNGSCSLWHGDLINLQDVSAISSQGSSTVLIRLAASELSGQKQKNTKNLITIAIVATSVLVLMIAALFFIFRRRMVKETTRVEGSLIAFTYRDLKSVTKNFSEKLGGGAFGLVFKGSLPDATVVAVKKLEGFRQGEKQFRAEVSTIGNIQHVNLIRLLGFCSEKSRRLLVYEYMPNGSLDKQLFDNKKHVLSWNTRYQIALGIARGLDYLHEKCRDCIIHCDIKPENILLDGSFAPKVADFGLAKLMGRDISRVLTTARGTVGYIAPEWIAGTAVTAKADVFSYGMTLLEIVSGRRNVQGRRRRQEQQDDGGAAADRPFPLVAAGRLVGGGGGRREELVSAVVDGRLGGDADMGEAERACRVAFWCIQDDENARPAMATVVQVLEGLVEIGVPPIPRSLQFLAELADQSNYLQFFSDLLPSN

SEQ ID NO: 6711 - protein, 523 aa, Oryza sativa
  Clone ID: PAT_MRT4530_26969C.1.pep
MAGAEAANGRNKYAVLDPSDEPEGRRRPSAWERRSKERFVLACAIFASLNAILLGYDVGVMSGAIIYIQKDLHITEFQEEILVGCLSVVSLLGSLSGGRTSDAIGRKWTMALGAIVFQAGAAIMTFAPSFTVLMIGRLLAGVGIGFGAMVSAVYIAEISPAAARGTLTSLPEICINLGILLGYVSNYAFSGLSEHINWRIMLGVGILPSVFIGFALFVIPESPRWLMMEKRVPEARAVLLQISESEAEVEERIAEIEEAANLLKSTKSEDKAVWMELLNPSPAVRRMLYAGCGIQMFQQITGIDATVYYSPTIFRDAGIKSDQELLAATVAVGFTKTVFILVAIFLIDKVGRKPLLYVSTIGMTMCLFVLGIALTLQKHAMGLISPRIGIDLAVFAVCGNVAFFSIGMGPICWVLSSEIFPLRLRAQASALGQVGGRVSSGLVSMSFLSMARIISVAGMFFVFAVISTVSVAFVYFCVPETKGKTLEQIEMMFEGGKEWRGSEIELEDTQHLIQSSKKSVSLG

SEQ ID NO: 6712 - protein, 34 aa, Oryza sativa
  Clone ID: PAT_MRT4530_27304C.1.pep
LIPRRAHKHTPAFLYATAGVRKLPSADSEWLLDK

SEQ ID NO: 6713 - protein, 397 aa, Oryza sativa
  unsure (1)..(397): unsure at all Xaa locations
  Clone ID: PAT_MRT4530_27531C.1.pep
WPPPTSSPPPPPPPPPPRLFPLPPPSPAPPPHLLAASSSTAASSATPRPPRLSLRSPPPSSLRPSQRPHFPVVSAAGTAKKTTTNGTEKATSGGYXLSQRLGIKCSEEEIDMXMTRVQFTKPVKLLPLVXCVLYGVADSGNYQWTVEXGARSVVCMLLSCSCLPGITQRDIDWRYFKRDIDALNEPYLPIXVLALIWALLLAGLGLGALLDVWAGHDFPIIFYLAVGGSLLSYIYSAPPLKLKQNGWIGNFALGASYIGLPWWAGQALFGTLTPDIVVLTSLYSIAGLGIAIVNDFKSVEGDRALGLQSLPVAFGMETAKWICVGAIDITQLSVAGYLFSSGKPYYALALLGLTIPQVVFQFQYFLKDPVKYDVKYQASAQPFFVLGLLVTALATSH

SEQ ID NO: 6714 - protein, 662 aa, Oryza sativa
  Clone ID: PAT_MRT4530_27544C.1.pep
METRDDVADASALPYSYSPLPAGDAASADLAAARRSRRRPLCVALFLASAAVILAVAVLSGVRLAGRPATTTMVVPGVVEMEMASRGPESGVSEKTSGAEEMVRLMGGAAGGEAFPWSNAMLQWQRTGFHFQPERNWMNDPNGPVYYKGWYHLFYQYNPDGAVWGNKIAWGHAVSRDLVHWRHLPLAMVPDQWYDVNGVWTGSATTLPDGRLAMLYTGSTNASVQVQCLAVPSDPDDPLLTNWTKYHANPVLYPPRTIGDRDFRDPTTAWRDPSDGDWRIVIGSKDEHHAGIAVVYRTADFVTYDLLPGLLHRVEATGMWECIDFYPVAGGEGVDMTEAMYARNKGVVHVMKASMDDDRHDYYALGRYDPARNAWTPLDAAADVGIGLRYDWGKFYASKTFYDPAKRRRVLWGWVGETDSERADVAKGWASLQSIPRTVELDTKTGSNLLQWPVEEVETLRTNSTDFGGITVDYASVFPLNLHRATQLDILAEFQLDPLAVDAVLEADVGYNCSTSGGAAGRGALGPFGLLVLADKRHRGDGEQTAVYFYVAKGSDGGVTTHFCQDESRSSHADDIVKRVVGNVVPVLDGETFSLRVLVDHSIVESFAQGGRSTATSRVYPTEAIYANAGVFLFNNATSARVTAKKLVVHEMDSSYNQAYMA

SEQ ID NO: 6715 - protein, 557 aa, Oryza sativa
  Clone ID: PAT_MRT4530_27686C.1.pep
MEAKPVAMEVEGVEAAGGKPRFRMPVDSDLKATEFWLFSFARPHMASFHMAWFSFFCCFVSTFAAPPLLPLIRDTLGLTATDIGNAGIASVSGAVFARLAMGTACDLVGPRLASASLILLTTPAVYCSSIIQSPSGYLLVRFFTGISLASFVSAQFWMSSMFSAPKVGLANGVAGGWGNLGGGAVQLLMPLVYEAIHKIGSTPFTAWRIAFFIPGLMQTFSAIAVLAFGQDMPGGNYGKLHKTGDMHKDSFGNVLRHALTNYRGWILALTYGYSFGVELTIDNVVHQYFYDRFDVNLQTAGLIAASFGMANIISRPGGGLLSDWLSSRYGMRGRLWGLWTVQTIGGVLCVVLGIVDFSFAASVAVMVLFSFFVQAACGLTFGIVPFVSRRSLGLISGMTGGGGNVGAVLTQYIFFHGTKYKTETGIKYMGLMIIACTLPVMLIYFPQWGGMLVGPRKGATAEEYYSREWSDHEREKGFNAASVRFAENSVREGGSVSIAKVVDSLGTVARNVKVLRLYELQILSKSEEQCQASAFVRSKCRARAQCGSWPRGLSGVQ

SEQ ID NO: 6716 - protein, 513 aa, Oryza sativa
  Clone ID: PAT_MRT4530_27817C.1.pep
RIRGVSVLYKSVQFFPCNSDVGCDPSKVGTDNGAQPCQYQVVVSEYSAKGSSANISEVTSADPSEVTRIFTMGLPYTSQHGGQILFGPTDGYLYLMMGDGGGKGDPFNFSQNKKSLLGKIMRLDVDNPPSKSSSTGQSEIANQSLWGNYSIPKDNPYTDDSDLEPEVWALGLRNPWRCSFDSARPSYFYCADVGQDQYEEVDLISKGGNYGWRAYEGPLVFNPPSAPGGNTSLNSINAIPPIMGYSHSDVNKKIGSASIIGGNVYRGSTDPCLVGRYLYADLYASAMWTGTEAPESSGNYSSSLISFSCSKSSPIACDTAAGSPLPSLGYIYSFGEDNNKDTYVLSSKGVYRVVRPSLCGYTCPTEKPATNTGTTTPSSAASSSILSDVEINGFYLELKVLQVSLPDSSMFVPEILKFVMDALLDCPDRLLDCYPNVSVAYRILLTVPMTVASAERSLSKLRLLKNYLRSTMSQERLNGLVMCSIENDILDTIDLNTVLDDFASRNIQRSIFS

SEQ ID NO: 6717 - protein, 274 aa, Oryza sativa
  unsure (1)..(274): unsure at all Xaa locations
  Clone ID: PAT_MRT4530_28152C.1.pep
GCRNRHEGDTSSQFASRTHSPFASRRGGRAFSAARXMAGAAAAVEDAGMDEVQKRLMFDDECILVDEQDNVVGHESKYNCHLMEKIESENLLHRAFSVFLFNSKYELLLQQRSATKVTFPLVWTNTCCSHPLYRESELIQENYLGVRNAAQRKLLDELGIPAEDVPVDQFTPLGRMLYKAPSDGKWGEHELDYLLFIVRDVKVVPNPDEVADVKYVSREQLKELIRKADAGEEGLKLSPWFRLVVDNFLMGWWDHVEKGTLNEAVDMETIHKLK

SEQ ID NO: 6718 - protein, 168 aa, Oryza sativa
  unsure (1)..(168): unsure at all Xaa locations
  Clone ID: PAT_MRT4530_28392C.1.pep
ADEWQKFYRGWMKLNVDGXFDATSGTGGLGAVLRNSLGSVILSFFSACGSMERCSSPLEAELLACKEGINLALQWALLPLIMESDCLVAINMIQSPGREMSQLAYLVRDIEELLAGDRVVSIQKVQRCQNNISHFLANRGRTNFLSEFWPDGSCNLISQFVNEEALNE

SEQ ID NO: 6719 - protein, 119 aa, Oryza sativa
  unsure (1)..(119): unsure at all Xaa locations
  Clone ID: PAT_MRT4530_28680C.1.pep
LIFQDKNKYNTRGXLFVVRCTIKDITGQIISASIAGDMDLASAYSHELPRYGLEAGLTNYAAAYCTGLLLARRVLKIRGSDQEYKGNVEATGEDFFVEPAYERRPFRALLDVGLIRTTT

SEQ ID NO: 6720 - protein, 760 aa, Oryza sativa
  unsure (1)..(760): unsure at all Xaa locations
  Clone ID: PAT_MRT4530_29154C.1.pep
MQQHQGGGSQYGAVPPDMGPFSPTHHASAPAPLPLSSRPPPAALSQPPPPQQQQQQPRTSYDELAAATSAGAGGFPDDDMLGDAGGSGGGGGSGAAGNRWPREETLALIRIRSEMDATFRDATLKGPLWEEVSRKLAELGYKRSAKKCKEKFENVHKYYKRTKEGRAGRQDGKSYRFFTELEALHAAAPQTPQPQQQQQQQLPPVTSSAPAMHAFAPPVPAPPPMSAMPPPPGPIQPAPISSAAPAVPLELPPQPPINLQGLSFSSMSGSESDDESEDDEMTAETGGSQDRLGKRKXAPAAKGWRLSSRGSSSKSSTGRRRCSGGFWRLWRSERRSARXREEAWRRQEVARLNREQEQLAQERAAAASRDAAIISFLQRIGGQSVQVPPAATVIQMPTPVQLQTPPPVKQPARQHQPQPTPPPPQAAPIPAAPLQQQPPQPQHKETIPPEAVTPRRAPPTSGSSLELVPAAEQHVESGLGGGEGGSASSSRWPKTEVQALIQLRMELDMRYQETGPKGPLWEEISSGMRRLGYNRSSKRCKEKWENINKYFKKVKESNKKRPEDSKTCPYFHQLDVIYRRKHLTGGGGGGASAANVAATAIEHQNPNRHEIEGKNINDNDKRKNGGGGGAQVPTSNGDTAPTTATFDVDSGMKKRFKLNMRMFVRKLTGNPLAVKPEDIVRELSEQPPREFTTDETDSDDMGDDYTDDGEEGEDDGKMQYRIQFQRPNPGGANTAPPPATTPASAVPTSTPTSTFLAMVQ

SEQ ID NO: 6721 - protein, 332 aa, Oryza sativa
  Clone ID: PAT_MRT4530_29234C.1.pep
MSSRMAGSAILRHVGGVRLFTASATSPAAAAAAAARPFLAGGEAVPGVWGLRLMSTSSVASTEAAAKAEAKKADAEKEVVVNSYWGIEQSKKLVREDGTEWKWSCFRPWETYTADTSIDLTKHHVPKTLLDKIAYWTVKSLRFPTDIFFQRRYGCRAMMLETVAAVPGMVGGMLLHLRSLRRFEQSGGWIRTLLEEAENERMHLMTFMEVANPKWYERALVITVQGVFFNAYFLGYLLSPKFAHRVVGYLEEEAIHSYTEFLKDLEAGKIDNVPAPAIAIDYWRLPANATLKDVVTVVRADEAHHRDVNHFASDIHYQGMELKQTPAPIGYH

SEQ ID NO: 6722 - protein, 519 aa, Oryza sativa
  Clone ID: PAT_MRT4530_29468C.1.pep
MAGGAMVQTVGGKTYPGKMTAFVFFTCLVASSGGLIFGYDIGISGGVTSMDSFLSEFFPSVYAQAKASKDTNQYCKFDSQLLTLFTSSLYLAALATSFVAAWVTRVFGRKWSMFCGGVTFLAGSALNGAATDVMMLILGRILLGIGVGFANQSVPLYLSEMAPANLRGMLNIGFQLMTTIGILSANLINYATSSIEGGWGWRIGLGLAGVPALIITLGALVLPDTPNSLIARGYAGDAKRVLVKIRGTDDVHDEYDDMVAASEEAASIEHPWRNILHRKYRPQLTIAILIPCFQQLTGINVIMFYAPVLFLTIGFAGDASLMSAVITGLVNMFATVVSIISVDRLGRRVLFLQGGTQMFISQVVVGTLIALQFGVAGVGEMSRSYAILLVLFICMYVAGFAWSWGPLGWLVPSEVFALEIRSAGQSIAVCVNMMLTFVIGQAFLTMLCHLKFGLFYFFAGWMLVMTTFVALFLPETKGVPIEEMNHVWSRHWFWGSYVTAHDVAGAGAGGGGNRRSHNV

SEQ ID NO: 6723 - protein, 473 aa, Oryza sativa
  Clone ID: PAT_MRT4530_29514C.1.pep
MDQHQLDEENQRAALFHSSAPSSSLGADGEEERETVPLLSCKMADDKSDTVQVSEDTAHQISIDPWYQVGFILTTGVNSAYVLGYSASIMVPLGWIGGTCGLILAAAISMYANALLAHLHEVGGKRHIRYRDLAGHIYGRKMYSLTWALQYVNLFMINTGLIILAGQALKAIYVLFRDDGVLKLPYCIALSGFVCALFAFGIPYLSALRIWLGLSTVFSLIYIMIAFVMSLRDGITTPAKDYTIPGSHSDRIFTTIGAVANLVFAYNTGMLPEIQATIRPPVVKNMEKALWFQFTVGSLPLYAVTFMGYWAYGSSTSSYLLNSVKGPIWIKTVANLSAFLQTVIALHIFASPMYEFLDTRFGSGHGGPFAIHNIMFRVGVRGGYLTVNTLVAAMLPFLGDFMSLTGALSTFPLTFVLANHMYLTVKQNKMSIFRKCWHWLNVVGFSCLSVAAAVAAVRLITVDYSTYHLFADM

SEQ ID NO: 6724 - protein, 447 aa, Oryza sativa
  Clone ID: PAT_MRT4530_29596C.1.pep
MGAKDSKPSYSYSSSYDHGNSSSGYNSRYPAYPANASSSQNTRYAPSMENYVQPETHARLQRKYSRIGDDYRSLNQVTEALAQAGLESSNLIVGIDFTKSNEWTGKLSFNRRCLHDIGNTPNPYEQAISIIGRTLSAFDEDNLIPCFGFGDASTHDQEVFSFYPENRPCNGFEEALERYREIVPTLRLAGPTSFAPMIETAIGIVDSTGGQYHVLLIIADGQVTRSVDTQSGQLSPQERDTIDAIVKASQFPLSIVLVGVGDGPWDMMHQFDDNIPARSFDNFQFVNFTDIMSKSIAADRKEAEFALSALMEIPTQYKATLDLQLLGRRQRIQPRIPLPPPMRNAYSRSTSFDQHSGVYSRSSSFGPQTSGFQQSESFKQRQPVATTAPDTYTSESSLEGRLLCAICMDKSKDLAFGCGHQTCYECGKNLVRCPMCQQHITTRIRLY

SEQ ID NO: 6725 - protein, 505 aa, Oryza sativa
  Clone ID: PAT_MRT4530_29796C.1.pep
MAAPSAIPRRGLFIGGGWREPSLGRRLPVVNPATEATIGDIPAATAEDVELAVSAARDAFGRDGGRHWSRAPGAVRAKYLKAIAAKIKDKKSYLALLETLDSGKPLDEAAGDMEDVAACFEYYADLAEALDGKQRAPISLPMENFESYVLKEPIGVVGLITPWNYPLLMATWKVAPALAAGCTAVLKPSELASLTCLELGGICAEIGLPPGVLNIITGLGTEAGAPLASHPHVDKIAFTGSTETGKRIMITASQMVKPVSLELGGKSPLIVFDDVDIDKAVEWAMFGCFANAGQVCSATSRLLLHEKIAKRFLDRLVAWAKSIKISDPLEEGCRLGSVVSEGQYQKIMKFISTARCEGATILYGGARPQHLKRGFFIEPTIITNVSTSMQIWREEVFGPVICVKEFRTEREAVELANDTHYGLAGAVISNDLERCERISKAIQSGIVWINCSQPCFVQAPWGGNKRSGFGRELGQWGLDNYLSVKQVTKYCSDEPYGWYRPPSKL

SEQ ID NO: 6726 - protein, 96 aa, Oryza sativa
  unsure (1)..(96): unsure at all Xaa locations
  Clone ID: PAT_MRT4530_30009C.1.pep
KTHAYFKRLHSKFKRXRRQGTTDYRAXRIRLSNQDKNKANTPAYRFVARCTHKDLTFEIVYATIEDDIVMAAAYCHEQPRYGLEVGLTNYARAYCT

SEQ ID NO: 6727 - protein, 60 aa, Oryza sativa
  unsure (1)..(60): unsure at all Xaa locations
  Clone ID: PAT_MRT4530_30384C.1.pep
CPCPPPPPPPPPPPPCGPSEMSPPPNXAPPPPPPLAAASSTTTTAPXPPPPPPPTGRNLL

SEQ ID NO: 6728 - protein, 801 aa, Oryza sativa
  Clone ID: PAT_MRT4530_3082C.1.pep
MCSRDETVLGSFRSRTSRTRISLTVAIGSSNDGLDKSIKPFHFYLVLAVAIFKAFCALREHFLPAEQVILGASQKDTMLAVSQMDSQDQTVKSNAGSASPNQLTDVNDHSNVSRQYDTSPSSHQECWRSEDLNRYACSDDSKESGHLKKSLSLGNMLHKDHDHHFSEGAECDIIDCDHKGHCSSLKSNSAVGDSAKLNTKGNENAFDALSDLVSPSGDHVVDSDSHYLCYDQTKFPRSQSAIFQNNSNCGTEGSADSEILGPRCRSYEDLCSAVSEKVDYLNSDLCSAVSEKVDYLNSVEPHHSKSNLDVHCAGPSSPDVYERMNFEDNGSIGCSDAADGGQRSTASAEESFVRDGMLSHEYWDNKYVSGHQSVDPVAPYYSGTGDGSHHSNNDGGINEALDQERKDNLWNRDSTPYHKSLVIDASDLKLCDSKDISEELKHNRTGINDNQYFDVDPDELSPRTFSIKRIEDWINQIDIDDGTLVEEQGESSNSVLTKYNEPVAGVPAVRPDAKSPLGMEIAYTYISKLTPTSSSAQLGNLGLVAIPRLSAFLGLRLLNLSGNSIVRITAGALPRGLHMLSLSKNNISTIEGLRELTRLRLLDISYNRISRIGHGLASCSSLKELYLGGNKISEVDGLHRLLKLKVLDLRHNKISTSKGLGQLAANYSSLEAVNLDGNPAQKNVGDEHLKKYLVGLLPNLGFYNKHPIRASGSKEVSDRHTRKISSSHRSDRSGRSDRKSSRLVASTSSYKAQSSRHARSGHASSSFLKNPRGRSMAVAASGPRLMEYGGAGDVQIERKAQ

SEQ ID NO: 6729 - protein, 319 aa, Oryza sativa
  Clone ID: PAT_MRT4530_3088C.1.pep
MAIKRTKAEKKVAYDKKLCQLLDEYTKVLIAVADNVGSNQLQEIRKGLRGDSIVLMGKNTLIRRCIKVHADNTGNKEFLELMPLLVGNVGLIFTKGDLKEVREEVAKYKVGAPARVGLVAPVDVVVPPGNTGLDPSQTSFFQVLNIPTKINKGTVEIITPVELIKKGDKVGSSESALLAKLGIRPFSYGLVITNVYDSGSVFSPEVLDLTEDDLMEKFASGVSMVASVSLAISYPTIAAAPHMFLNGYKNVLAVAVETEYSYPHADKIKEYLKDPSKFAVAAPVAADSGAAAPSAAKEEEKKEEPEEESDGDLGMSLFD

SEQ ID NO: 6730 - protein, 470 aa, Oryza sativa
  Clone ID: PAT_MRT4530_3089C.1.pep
MAIKRTKAEKKVAYDKKLCQLLDEYTKVLIAVADNVGSNQLQEIRKGLRGDSIVLMGKNTLIRRCIKVHADNTGNKDFLELMPLLVGNVGLIFTKGDLKEVREEVAKYKVGAPARVGLVAPVDVVVPPGNTGLDPSQTSFFQVLNIPTKINKGTVEIITPVELIKKGDKVGSSESALLAKLGIRPFSYGLVITNVYDSGSVFSPEVLDLTEEDLMEKFASGVSMVASVSLAISYPTIAAAPHMFLNGYKNVLAVAVETEYSYPHADKIKEYLKDPSKFAVAAAVAAADSGAAAPAASKEEEKKEEPEEESDVRCRYVHQARLPILTVDFRLDGSGEEEAAAPLLLLPAAAAAAEERCPGCVQEQRKARRGGRIPYTELFFVAVTTLASFIAGEMDEMKGIDHEHALPITCLFPFLYFMVRDLQVAQTEEDIGNYAGFLGALNGLLAPIKVNTAWGLGLVVGPALGGYLAQ

SEQ ID NO: 6731 - protein, 138 aa, Oryza sativa
  Clone ID: PAT_MRT4530_31692C.1.pep
MAGKGGKGLLAAKTTAAKSADKDKDKKKAPVSRSSRAGLQFPVGRIHRQLKSRASAHGRVGATAAVYSAAILEYLTAEVLELAGNASKDLKVKRITPRHLQLAIRGDEELDTLIKGTIAGGGVIPHIHKSLINKTSKE

SEQ ID NO: 6732 - protein, 339 aa, Oryza sativa
  Clone ID: PAT_MRT4530_31733C.1.pep
MDHEADAYRTDLMTITRYVLNEQSRNPEARGDLTILLSHIVLGCKFVASAVNKAGLAKLIGLAGETNVQGEEQKKLDVLSNEVFVKALVSSGRTCVLVSEEDEEATFVDPALRGKYCVCFDPLDGSSNIDCGVSIGTIFGIYMIKDKENVTLEDVLQPGKNMVAAGYCMYGSSCTLVLSTGNGVNGFTLDPSLGEFILTHPDIKIPKKGKIYSVNEGNAKNWDEPTAKFVEKCKFPKDGSSPKSLRYIGSMVADVHRTLLYGGVFLYPADKKSPNGKLRVLYEVFPMSFLMEQAGGQSFTGKERALDLVPTKIHERSPIFLGSFEDVEEIKGLYAAQAK

SEQ ID NO: 6733 - protein, 359 aa, Oryza sativa
  Clone ID: PAT_MRT4530_31736C.1.pep
MDHEADAYRTDLMTITRYVLNEQSRNPEARGDLTILLSHIVLGCKFVASAVNKAGLAKLIGLAGETNVQASVPGNNCHLSQFLVSEIEIGEEQKKLDVLSNEVFVKALVSSGRTCVLVSEEDEEATFVDPALRGKYCVCFDPLDGSSNIDCGVSIGTIFGIYMIKDKENVTLEDVLQPGKNMVAAGYCMYGSSCTLVLSTGNGVNGFTLDPSLGEFILTHPDIKIPKKGKIYSVNEGNAKNWDEPTAKFVEKCKFPKDGSSPKSLRYIGSMVADVHRTLLYGGVFLYPADKKSPNGKLRVLYEVFPMSFLMEQAGGQSFTGKERALDLVPTKIHERSPIFLGSFEDVEEIKGLYAAQAK

SEQ ID NO: 6734 - protein, 355 aa, Oryza sativa
  Clone ID: PAT_MRT4530_32113C.1.pep
MENGGGGGGDGGKSDVPADANEHCPGTQSEEAGKADACAGCPNQQICATAPKGPDPDLVGIVERMATVKHKILVLSGKGGVGKSTFSAQLSFALAEMDCQVGLLDIDICGPSIPKMLGLEGQDIHQSNLGWSPVYVESNLGVMSIGFMLPNPDDAVIWRGPRKNGLIKQFLKDVDWGEIDYLVVDAPPGTSDEHISIVQYLQATGIDGAIIVTTPQQVSLIDVRKEINFCKKVGVPILGVVENMSGLRQVLSDFRFVKQGEGGEMDATEWALNYIKEKAPELLTMVACSEVFDSSKGGAEKMCNEMGVPFLGKVPMDPQLCKAAEEGRSCFVDQKCSASAPALKSIVKKLIENQD

SEQ ID NO: 6735 - protein, 174 aa, Oryza sativa
  Clone ID: PAT_MRT4530_32262C.1.pep
MSKARVYTDVNVLRPKEYSDYESLTLQWGDQDDYEVVRKVGRGKYSEVFEGINVNSNERCIIKILKPVKKKKIKREIKILQNICGGPNIVKLLDIVRDQHSKTPSLIFEYVNSTDFKVLYPTLTDYDIRYYIYELLKALDYCHSQGIMHRDVKPHNVMIDHELRKLRWIDWGLG

SEQ ID NO: 6736 - protein, 119 aa, Oryza sativa
  Clone ID: PAT_MRT4530_32410C.1.pep
MSTTRGVSSSSAAAALALLLLFALCFFSFHFAAAARAVPRDEHQENGGVKAVAAVAADQLVLQLEGDTGNGDEVSELMGAAEEEAAACEEGKNNDECVQRRLLSDAHLDYIYTQHKNKP

SEQ ID NO: 6737 - protein, 469 aa, Oryza sativa
  Clone ID: PAT_MRT4530_32481C.1.pep
MEVLLPLLLACSLLFTIATPIRDITDVCASQISDFQHLNSSGLHLTLHHPQSPCSPAPLPSDLPFSAVVTHDDARIAHLASRLANNHPTSPSSSSLLHGHRKKKAGGVGGSQASSSSVPLTPGASVAVGNYVTRLGLGTPATSYVMVVDTGSSLTWLQCSPCSVSCHRQAGPVFDPRASGTYAAVQCSSSECGELQAATLNPSACSVSNVCIYQASYGDSSYSVGYLSKDTVSFGSGSFPGFYYGCGQDNEGLFGRSAGLIGLAKNKLSLLYQLAPSLGYAFSYCLPTSSAAAGYLSIGSYNPGQYSYTPMASSSLDASLYFVTLSGISVAGAPLAVPPSEYRSLPTIIDSGTVITRLPPNVYTALSRAVAAAMASAAPRAPTYSILDTCFRGSAAGLRVPRVDMAFAGGATLALSPGNVLIDVDDSTTCLAFAPTGGTAIIGNTQQQTFSVVYDVAQSRIGFAAGGCS

SEQ ID NO: 6738 - protein, 700 aa, Oryza sativa
  unsure (1)..(700): unsure at all Xaa locations
  Clone ID: PAT_MRT4530_32658C.1.pep
MASETETFAFQAEINQLLSLIINTFYSNKEIFLRELISNSSDALDKIRFESLTDKSKLDAQPELFIHIVPDKASNTLSIIDSGVGMTKSDLVNNLGTIARSGTKEFMEALAAGADVSMIGQFGVGFYSAYLVAERVVVTTKHNDDEQYVWESQAGGSFTVTRDTSGEQLGRGTKITLYLKDDQLEYLEERRLKDLVKKHSEFISYPISLWTEKTTEKEISDDEDEEEKKDAEEGKVEDVDEEKEEKEKKKKKIKEVSHEWNVMNKQKPIWLRKPEEITKEEYAAFYKSLTNDWEEHLAVKHFSVEGQLEFKAILFVPKRAPFDLFDTRKKQNNIKLYVRRVFIMDNCEELIPEWLSFVKGIVDSEDLPLNISREMLQQNKILKVIRKNLVKKCVELFFEIAENKEDYNKFYEAFSKNLKLGIHEDSTNRTKIAELLRYHSTKSGDELTSLKDYVTRMKEGQSEIYYITGESXKKAVENSPFLEKLKKKGYEVLYMVDAIDEYAVGQLKEFEGKKLVSATKEGLKLDESEDEKKRQEELKEKFEGLCKVIKEVLGDKVEKVVVSDRVVDSPCCLVTGEYGWTANMERIMKAQALRDSSMAGYMSSKKTMEINPENAIMDELRKRADADKNDKSVKDLVMLLFETALLTSGFSLEDPNTFGTRIHRMLKLGLSIDEDESAEADADMPPLEDDAGESKMEEVD

SEQ ID NO: 6739 - protein, 87 aa, Oryza sativa
  unsure (1)..(87): unsure at all Xaa locations
  Clone ID: PAT_MRT4530_32862C.1.pep
KKEKNKPKPNQLLGKAGALPAGAFALYXKPKAKKAPENAPRPKITEEFAAPAAVGPGGYPFPEPPEKKKAPKSPEESPGKKKPPLLG

SEQ ID NO: 6740 - protein, 346 aa, Oryza sativa
  Clone ID: PAT_MRT4530_32961C.1.pep
MENGGGDVPENANDHCPGTQSEAAGKADACAGCPNQQICATAPKGPDPDLLAIIERMNTVKHKILVLSGKGGVGKSTFSAQLSFALAEMDHQVGLLDIDICGPSIPKMLGLEGQDIHQSNLGWSPVYVESNLGVMSIGFMLPNPDDAVIWRGPRKNGLIKQFLKDVDWGEIDYLVVDAPPGTSDEHISIVQYLQIAGIDGAIIVTTPQQVSLIDVKKEINFCKKVGVPVLGVVENMSGLRQAFSDMKFVKPSEAGETDATEWALNYIKEKAPELLSVVACSEVFDSSKGGAEKMCQEMEVPFLGKVPMDPQLCKAAEEGRSCFTDQKCSASAPALKSIIKKLVKTK

SEQ ID NO: 6741 - protein, 588 aa, Oryza sativa
  Clone ID: PAT_MRT4530_3350C.1.pep
MSSPPDSATTCNFLFSPPAAQMVAPSPGYYYVGGAYGDGTSTAGVYYSHLPVMPIKSDGSLCIMEGMMPSSSPKLEDFLGCGNGSGHDPATYYSQGQEAEDASRAAYQHHQLVPYNYQPLTEAEMLQEAAAAPMEDAMAAAKNFLVTSYGACYGNQEMPQPLSLSMSPGSQSSSCVSAAPQQHQQMAVVAAAAAAGDGQGSNSNDGGEQRVGKKRGPGKGGQKQPVHRKSIDTFGQRTSQYRGVTRHRWTGRYEAHLWDNSCKKDGQTRKGRQGGYDTEDKAARAYDLAALKYWGLSTHINFPLENYRDEIEEMERMTRQEYVAHLRRRSSGFSRGASIYRGVTRHHQHGRWQARIGRVAGNKDLYLGTFSTQEEAAEAYDIAAIKFRGLNAVTNFDITRHDVDKIMESSSLLPGEAARKVKAIEAAPDHVPIGRELGATEEASAATVTGTDWRMVLHGSQQQQAAACTEATADLQKGFMGDAHSALHGIVGFDVESAAADEIDVPGGKISGINFSNSSSLVTSLSNSREGSPERLGLAMLYAKHHPTAVSLAAMNPWMPMPAPAAAHVMRPPSAIAHLPVFAAWTDA

SEQ ID NO: 6742 - protein, 369 aa, Oryza sativa
  Clone ID: PAT_MRT4530_33578C.1.pep
MAMMVDPPNGMGNQGKHYYTMWQTLFEIDTKYVPIKPIGRGAYGIVCSSINRATNEKVAIKKINNVFDNRVDALRTLRELKLLRHLRHENVIALKDIMMPVHRRSFKDVYLVYELMDTDLHQIIKSSQPLSNDHCQYFLFQLLRGLKYLHSAGILHRDLKPGNLLVNANCDLKICDFGLARTNNTKGQFMTEYVVTRWYRAPELLLCCDNYGTSIDVWSVGCIFAELLGRKPIFPGTECLNQLKLIVNVLGTMSEADIEFIDNPKARKYIKTLPYTPGIPLTSMYPQAHPLAIDLLQKMLVFDPSKRISVTEALEHPYMSPLYDPSANPPAQVPIDLDIDENLGVDMIREMMWQEMLHYHPEVVAGVNM

SEQ ID NO: 6743 - protein, 369 aa, Oryza sativa; identical to SEQ ID NO: 6742
  Clone ID: PAT_MRT4530_33579C.1.pep

SEQ ID NO: 6744 - protein, 224 aa, Oryza sativa
  Clone ID: PAT_MRT4530_34086C.1.pep
MGRGKIEIKRIENATNRQVTYSKRRTGIMKKARELTVLCDAQVAIIMFSSTGKYHEFCSPSTDIKGIFDRYQQAIGTSLWIEQYENMQRTLSHLKDINRNLRTEIRQRMGEDLDGLEFDELRGLEQNVDAALKEVRHRKYHVITTQTETYKKKVKHSYEAYETLQQELGLREEPAFGFVDNTGGGWDGGAGAGAAADMFAFRVVPSQPNLHGMAYGGNHDLRLG

SEQ ID NO: 6745 - protein, 65 aa, Oryza sativa
  unsure (1)..(65): unsure at all Xaa locations
  Clone ID: PAT_MRT4530_34426C.1.pep
DPHDALLQPRGSCLRRRHRXQRRCHRAHGEFRPPAAAXAAAVVVEAEAGARGSPGAEMTARAAER

SEQ ID NO: 6746 - protein, 679 aa, Oryza sativa
  unsure (1)..(679): unsure at all Xaa locations
  Clone ID: PAT_MRT4530_34852C.1.pep
QGVARRGAAAGRGGALEIEKTPEAAEDMESEPALAAAREAERVPPWREQVTARGMVAALLIGVVYTVIVMKLSLTTGLIPTLNVSAALLAFLALRGWTHALDRLGIASRPFTRQENTVIQTCAVACYTIGYGGGFGSFLLGLNKKTYELSGASTPGNVPGSYKEPGIGWMTGFLLSTSFVGLLTLLPLRKVLVIDYKLTYPSGTATAVLINGFHTPQGDKNAKKQVRGFLRYFGISFLWSFFQWFYTGGDVCGFLQFPTFGLKAWKHTFFFDFSLTYVGAGMICSHLVNLSLLFGAILSWGIMWPLIGKQKGNWYSAKASESSMSGLFGYKSFICIALLVGDGFYNFVKVIVVTLKSVRERSRRRGLNNRVADADTMAIDDMQRNEVFNRDNIPXWMAYTGYTLLSVIAVVLIPVMFRQVKWYYVIIAYLLAPALGFCNAYGTGLTDMNMGYNYGKIALFIFAAWAGKDDGVVAGLVGCGLVKQLVLISADLMHDFKTGHLTLTSPRSMLVGQVVGTLMGCVVAPLTFFLFYKAFDVGDPNGYWKAPYALIYRNMAIIGVEGFSALPRHCLQLCAGFFAFAVLANLARDFLPRRYGRYMPLPMAMAVPFLVGASFAIDMCAGSLVVFLWHRFDGKRAALLVPAVASGLICGDGIWTFPSSLLALAKVKPPICMKFIPGN

SEQ ID NO: 6747 - protein, 782 aa, Oryza sativa
  unsure (1)..(782): unsure at all Xaa locations
  Clone ID: PAT_MRT4530_3553C.1.pep
MNPSARISQVAMAAILPDLATQVLVPAAAVVGIAFALVQWGLVXKVKMPAERRGGEGSPGAAAGKDGGAASEYLIEEEEGLNEHNVVEKCSEIQHAISEGATSFLFTEYKYVGLFMGIFAVLIFLFLGSVEGFSTKSQPCHYSKDRMCKPALANAIFSTVAFVLGAVTSLVSGFLGMKIATYANARTTLEARKGVGKAFITAFRSGAVMGFLLAASGLVVLYIAINLFGIYYGDDWEGLFEAITGYGLGGSSMALFGRVGGGIYTKAADVGADLVGKVERNIPEDDPRNPAVIADNVGDNVGDIAGMGSDLFGSYAESSCAALVVASISSFGINHEFTPMLYPLLISSVGIIACLITTLFATDFFEIKAVDEIEPALKKQLIISTVVMTVGIALVSWLGLPYSFTIFNFGAQKTVYNWQLFLCVAVGLWAGLIIGFVTEYYTSNAYSPVQDVADSCRTGAATNVIFGLALGYKSVIIPIFAIAFSIFLSFSLAAMYGVAVAALGMLSTIATGLAIDAYGPISDNAGGIAEMAGMSHRIRERTDALDAAGNTTAAIGKGFAIGSAALVSLALFGAFVSRAAISTVDVLTPKVFIGLIVGAMLPYWFSAMTMKSVGSAALKMVEEVRRQFNSIPGLMEGTTKPDYATCVKISTDASIKEMIPPGALVMLSPLIVGIFFGVETLSGLLAGALVSGVQIAISASNTGGAWDNAKKYIEAGASEHARTLGPKGSDCHKAAVIGDTIGDPLKDTSGPSLNILIKLMAVESLVFAPFFATHGGILFKWF

SEQ ID NO: 6748 - protein, 784 aa, Oryza sativa
  Clone ID: PAT_MRT4530_3554C.1.pep
MAAILPDLATQVLVPAAAVVGIAFAVVQWVLVSKVKMTAERRGGEGSPGAAAGKDGGAASEYLIEEEEGLNEHNVVEKCSEIQHAISEGATSFLFTEYKYVGLFMGIFAVLIFLFLGSVEGFSTKSQPCHYSKDRMCKPALANAIFSTVAFVLGAVTSLVSGFLGMKIATYANARTTLEARKGVGKAFITAFRSGAVMGFLLAASGLVVLYIAINLFGIYYGDDWEGLFEAITGYGLGGSSMALFGRVGGGIYTKAADVGADLVGKVERNIPEDDPRNPAVIADNVGDNVGDIAGMGSDLFGSYAESSCAALVVASISSFGINHEFTPMLYPLLISSVGIIACLITTLFATDFFEIKAVDEIEPALKKQLIISTVVMTVGIALVSWLGLPYSFTIFNFGAQKTVYNWQLFLCVAVGLWAGLIIGFVTEYYTSNAYSPSCPSHLEFPLSSPVQDVADSCRTGAATNVIFGLALGYKSVIIPIFAIAFSIFLSFSLAAMYGVAVAALGMLSTIATGLAIDAYGPISDNAGGIAEMAGMSHRIRERTDALDAAGNTTAAIGKGFAIGSAALVSLALFGAFVSRAAISTVDVLTPKVFIGLIVGAMLPYWFSAMTMKSVGSAALKMVEEVRRQFNSIPGLMEGTTKPDYATCVKISTDASIKEMIPPGALVMLSPLIVGIFFGVETLSGLLAGALVSGVQIAISASNTGGAWDNAKKYIEAGASEHARTLGPKGSDPHKAAVIGDTIGDPLKDTSGPSLNILIKLMAVESLVFAPFFATHGGILFKLF

SEQ ID NO: 6749 - protein, 110 aa, Oryza sativa
  unsure (1)..(110): unsure at all Xaa locations
  Clone ID: PAT_MRT4530_35991C.1.pep
HYAVRPRGPETVCLLASAPSSLYGKPTCRTEFLFRALPMMFSQCSPSPETEAQRLQXTRGVSSVHALPSXRSYHDDLSAXRISSVGLRCXSAASSIAXIVLLLCTVRSFH

SEQ ID NO: 6750 - protein, 187 aa, Oryza sativa
  Clone ID: PAT_MRT4530_36022C.1.pep
GGEIVAIKKMKKKYYSWEECGNLREVKSLRRMSHPNIVKLKEVIRENDTLFFVFEYMECNLYQLMKNRGKGFTEAEVRNWCFQVFHALAHMHQRGYFHRDLKPENLLVTKNVIKIADFGLAREVSSEPPYTEYVSTRWYRAPEVLLQATFYNSAVDMWAMGAIIAELFTLRPLFPGANEADEMYKIC

SEQ ID NO: 6751 - protein, 778 aa, Oryza sativa
  Clone ID: PAT_MRT4530_36922C.1.pep
METIPCLILFSSLQILAFSSASPEHTLGTGSFLSVEEYEKPFLISPSNTFSFGFYETGDNAFSLSIWFTNTVEKTVVWAANSESPVNGHGSKLSFTQEGSLVLSDEKGFVVWDSKTMLGQDSRVALLDTGNLVITDSKGSVVWQSFDSPTDTLLPLQLLTKDKRLVSGYYSLYYDTDNVLRLIYNGPEISSPYWPNPSESIFDFGRTNYNSSRIGVLDNTGHFTSSDGLNIIASDSGLGINRRLTIDQDGNLKLYSLNKVEKSWIVTWEAMPQHCDVHGLCGRNSICEYSPGPRCSCLPGYEMADLENWSKGCQPMFTNNYGQAIGQVIFVEMRHVEFYGYDTGFNISVSLEDCEEFCSQQRSCVAYSYHAGSGYCYTKGMLYNGRKTQSITGSTYFKLPKTCNISEVKQHGLTCRHSHSTYEMHRQHGKWLYFYTCAAIFGGLELFFTTTACLFLRSKQNIPKSVMDGYELMTEHFRKFSYRELKEATGNFKEELGRGGSGVVYRGVLDRKKVVTVKRLTNATEAEEEFQSEISVIGRINHVNLVRTWGYCSEGKHKLLVYDYVENESLDKHLFESIDAKKLLRWNQRFTIALGTARGLAYLHHECLEWVVHCDVKPENILLTQDFEVKIADFGLAKLSKRDCSCLQLSHMRGTVGYMAPEWALNLPINAKVDVFSYGIVLLEIVMGARISSQTTTEGEKLDLTQIVEALKQVVACGDVTHIVDAKLHGQFNHLQAMEMVKISLSCIGERTKRPTMDEITKALMACGDEDKYADCTE

SEQ ID NO: 6752 - protein, 330 aa, Oryza sativa
  Clone ID: PAT_MRT4530_36991C.1.pep
MADFRTSTHRERWIFQTNDLMDRWGAANQRATETLVQYGTTRLKVDPVDGSLSYPEPAPDHVVGSSGVKPLSCEEERLMRVFYEQKIQEVCSAFKFPHKIQATAIIYFKRFYLQWSVMEHHPKHIMLTCIYSSCKVEENHVSAEELGKGIQQDHQIILNNEMIVLKSLDFDLIVYAPYRSIEGFVDDMEDFCRAGNGEHQRLQDLRQTAISQVDKMMLTDAPLLYTPGQLALAALHKSNDMHKILNFERYLESVFSRQHSDCPIEQFVGSINMINYLVEQLKIPTPKDMRHIDRKLKHCLDPSSQDEHKKKEKKSKHKSKRAANEAQLDS

SEQ ID NO: 6753 - protein, 78 aa, Oryza sativa
  unsure (1)..(78): unsure at all Xaa locations
  Clone ID: PAT_MRT4530_37018C.1.pep
GELSTATTVHGPXRASSSSAPPEMASAVLPEXXXXKKKXNVQFAXGXXIXXSMTYILXXYDXGXMSXXXVYIXKDXNI

SEQ ID NO: 6754 - protein, 48 aa, Oryza sativa
  unsure (1)..(48): unsure at all Xaa locations
  Clone ID: PAT_MRT4530_37686C.1.pep
LLKDYRPISLVHSFSKLAAKVMAXRLSTKLDVLVPCSQTTFIKGRCIH

SEQ ID NO: 6755 - protein, 369 aa, Oryza sativa
  Clone ID: PAT_MRT4530_37832C.1.pep
MDGAPVAEFRPTMTHGGRYLLYDIFGNKFEVTNKYQPPIMPIGRGAYGIVCSVMNFETREMVAIKKIANAFNNDMDAKRTLREIKLLRHLDHENIIGIRDVIPPPIPQAFNDVYIATELMDTDLHHIIRSNQELSEEHCQYFLYQILRGLKYIHSANVIHRDLKPSNLLLNANCDLKICDFGLARPSSESDMMTEYVVTRWYRAPELLLNSTDYSAAIDVWSVGCIFMELINRQPLFPGRDHMHQMRLITEVIGTPTDDELGFIRNEDARKYMRHLPQYPRRTFASMFPRVQPAALDLIERMLTFNPLQRITVEEALDHPYLERLHDIADEPICLEPFSFDFEQKALNEDQMKQLIFNEAIEMNPNIRY

SEQ ID NO: 6756 - protein, 39 aa, Oryza sativa
  Clone ID: PAT_MRT4530_37978C.1.pep
GLAVVMGRHLLVFFNRAPVLGCLKMSWFQGASIFPFENV

SEQ ID NO: 6757 - protein, 729 aa, Oryza sativa
  Clone ID: PAT_MRT4530_38425C.1.pep
MVGIDLNTVEEEEDEEEGGATGTVTAPAEARAGGAVCLELWHACAGPVAPLPRKGSAVVYLPQGHLEHLGAAPGSGPGAAVPPHVFCRVVDVSLHADAATDEVYAQVSLVADNEEVERRMREGEDGAACDGEGEDAVKRPARIPHMFCKTLTASDTSTHGGFSVPRRAAEDCFPPLDYSLQRPFQELVAKDLHGTEWRFRHIYRGQPRRHLLTTGWSGFINKKKLVSGDAVLFLRGEDGELRLGVRRAAQLKNASPFPALHNQISNTSSLSEVAHAVAVKSIFHIYYNPRLSQSEFIIPYWKFMRSFSQPFSVGMRFKLRYESEDASERRRTGIIIGSREADPMWHGSKWKCLVVKWDDDVECRRPNGVSPWEIELSGSVSGSHLSTPHSKRLKSCFPQVNPDIVLPNGSVSSDFAESARFHKVLQGQELLGLKTRDGTVNTASQATEARNFQYTDERSCSINMSNNILGVPRLGVKTPSGNPGFSYHCSGFGESQRFQEVLQGQEVFRPYRGGTLSDACIRGSGFRQPDGNHAPGAAFKWLAPQGCDHHGITTSVLPQASSPSSVLMFPQTSSKMPGLEYIYGCLDRNENSRHFKIGPTQDMTRTDQTLRLWPHLISGKVLDECTRNEKLHSPVSGAEHESNNKCLNTNGCKIFGISLTEKAQAGDEVDCGNASYHSRLQSLKPQMPKSLGSSCATHFHRLCYRIQDDDRGNADDTRRMLVKFVVMHF

SEQ ID NO: 6758 - protein, 718 aa, Oryza sativa
  Clone ID: PAT_MRT4530_38426C.1.pep
MVGIDLNTVEEEEDEEEGGATGTVTAPAEARAGGAVCLELWHACAGPVAPLPRKGSAVVYLPQGHLEHLGAAPGSGPGAAVPPHVFCRVVDVSLHADAATDEVYAQVSLVADNEEVERRMREGEDGAACDGEGEDAVKRPARIPHMFCKTLTASDTSTHGGFSVPRRAAEDCFPPLDYSLQRPFQELVAKDLHGTEWRFRHIYRGQPRRHLLTTGWSGFINKKKLVSGDAVLFLRGEDGELRLGVRRAAQLKNASPFPALHNQISNTSSLSEVAHAVAVKSIFHIYYNPRLSQSEFIIPYWKFMRSFSQPFSVGMRFKLRYESEDASERRRTGIIIGSREADPMWHGSKWKCLVVKWDDDVECRRPNGVSPWEIELSGSVSGSHLSTPHSKRLKSCFPQVNPDIVLPNGSVSSDFAESARFHKVLQGQELLGLKTRDGTVNTASQATEARNFQYTDERSCSINMSNNILGVPRLGVKTPSGNPGFSYHCSGFGESQRFQEVLQGQEVFRPYRGGTLSDACIRGSGFRQPDGNHAPGAAFKWLAPQGCDHHGITTSVLPQASSPSSVLMFPQTSSKMPGLEYIYGCLDRNENSRHFKIGPTQDMTRTDQTLRLWPHLISGKVLDECTRNEKLHSPVSGAEHESNNKCLNTNGCKIFGISLTEKAQAGDEVDCGNASYHSRLQSLKPQMPKSLGSSCATVHEQRPVVGRVVDISAVNTMI

SEQ ID NO: 6759 - protein, 342 aa, Oryza sativa
  Clone ID: PAT_MRT4530_38784C.1.pep
MVGKSGVAEEGGAAAAAAVRRWVEAGGGRLVMDGGLATELEANGADLNDPLWSAKCLLSSPHLVRKVHLDYLEAGANIIITASYQATIQGFESKGFSKEQSEDLLAKSVEIAREARDMFLKEHSDRPIQHPILVAASIGSYGAYLADGSEYSGDYGEAGTLEFLKDFHKRRLEVLAEAGPDLIAFETIPNKLEAQAYVELLDECNISIPAWFSFNSKDGVHIVSGDSLIECATIANGCSKVGAVGINCTPPRFIHGLILSIRKVTDKPILIYPNSGERYDAEKKEWVESTGVSDGDFVSYVNEWCKDGAVLIGGCCRTTPNTIKAISRSLNQRHSSLHLPVA

SEQ ID NO: 6760 - protein, 214 aa, Oryza sativa
  Clone ID: PAT_MRT4530_38870C.1.pep
GGTVTTAPVPPPTASLRRELALSPNLPARGGVAGQPNAATREAPAAAVSSARRVVVVSPSLAGYLDEQFCQVEDLQDEASPNFVEEVVTLFFKDSGRLMSNIEQALEKYPRDFNRWDTYMQQLKGSCSSIGASRMKNECMSFRDSCGQGNVEGCMRSFQKVKREHAVLRQKLESYFQLLRQAGPAGAATRPVMAHIGHASGSVLPTLFLFSEAC

SEQ ID NO: 6761 - protein, 397 aa, Oryza sativa
  Clone ID: PAT_MRT4530_38906C.1.pep
MATTEGCLVASTNRGCKAIAESGGAVSVVLRDGMTRAPVARLPTARRAAELKAFLEDSVNFNTLSMVFNRSSRFARLQGVQCAMAGRNLYMRFSCCTGDAMGMNMVSKGVQNVLDYLQDDFPDMDVISISGNFCSDKKPAAVNWIEGRGKSVVCEAVIKEDVVKKVLKTNVQSLVELNVIKNLAGSAVAGALGGFNAHASNIVTAIFIATGQDPAQNVESSHCITMLEAVNDGRDLHISVTMPSIEVGTVGGGTQLASQAACLDLLGVKGANRESPGSNARLLATVVAGGVLAGELSLLSALAAGQLVKSHMKYNRSSKDMSKRSRAHQTKVKDSEVYGDIVMAADADTNSSCSEERAALAAASDPYRYVEKRKPIPDPQDTGLIYGKKKDPTKSDN

SEQ ID NO: 6762 - protein, 226 aa, Oryza sativa
  Clone ID: PAT_MRT4530_39157C.1.pep
MAAAAQRLLAASTKIVGVGRNFVAHAKELGNPVPKEPVLFLKPTSSFLHAGVAGAAIEVPEPVESLHHEVELAVVISQRARDVPEASAMDFVGGYALALDMTARELQSAAKSAGLPWTLGKAQDTFTPISAVIPKSDVANPDDLELWLKVDDELRQKGSTSDMIFKIPSLISYISSIMTLMEGDVILTGTPEGVGPVRPGQKIKAGITGLIDVEFDVQKRKRSFST

SEQ ID NO: 6763 - protein, 213 aa, Oryza sativa
  Clone ID: PAT_MRT4530_39492C.1.pep
CPVTNMSTGGGDLSRSSNAPVASGSPSNSVSKSTGGSPPASGSAKGVPPAVQLPSPQQQSAKNPASTSGAKSAPTNHYSSMPMPSILGQQPNVPPGSNSGSKQQSHMMKQQPFPQGGHFFISNAYTPQAPGAAGGVALGLYQKRSADKTQQQQQPHQQSAMSAAASNNMKTHHPPAGSFMHLAAASQSSRRCASLSYVSGTIDFWGPNVNVCK

SEQ ID NO: 6764 - protein, 648 aa, Oryza sativa
  Clone ID: PAT_MRT4530_39564C.1.pep
MATAVLRRPLLAAAAAAAAVSSTSSSFRPSRFHLRRCRYPPPVFAVSSDSPKPVTSSSTGGDNPDEEPVLPLLQELADCLVLPPKFLSQLPRDLRLDLNDAAFDLSNGPVLDEAWEMADTSTSNNLVKQLPSMEPYLTGTFGKRLMSAGRRFTSMGQYGKGELKKIAETMSKTGKLLSKRPVVQSEVEAMKVKRKLKFLELEFELTAEKANIGAAVGLVFGFLSWQLARGIQNIPDGSMQYANDNALQMAKSLKVSLLVLGYTSTALSVFPSFSPPYLPQSVQGGGVKMASSTQGQVITCKAAVAWEANKPMTIEDVQVAPPQAGEVRVKILFTALCHTDHYTWSGKDPEGLFPCILGHEAAGIVESVGEGVTEVQPGDHVIPCYQAECRECKFCKSGKTNLCVKVRAATGVGVISKCSQCTFFNNGNAAKINPEAPLDKVCLLGCGVSTGLGAVWNTAKVEAGSIVAIFGLGTVGLAVAEGAKSAGASRIIGIDIDSKKFDVAKNFGVTEFVNPKDHDKPIQQVIVDLTDGGVDYSFECIGNVSVMRSALECCHKGWGTSVIVGVAASGQEISTRPFQLVTGRVWKGTAFGGFKSRSQVPWLVEKYLNKEIKVDEYVTHSMNLTDINKAFDLLHEGGCLRCVLATDK

SEQ ID NO: 6765 - protein, 257 aa, Oryza sativa
  unsure (1)..(257): unsure at all Xaa locations
  Clone ID: PAT_MRT4530_39566C.1.pep
MASSTQGQVITCKAAVAWEANRPMTIEDVQVAPPQAGEVRVKILFTALCHTDHYTWSGKDPEGLFPCILGHEAAGIVESVGEGVTEVQPGDHVIPCYQAECRECKFCKSGKTNLCGKVRAATGVGVMMNDRKSRFSINGKPIYHFMGTSTFSQYTVVHDVSVAKINPQAPLDKVCLLGCGVSTGLGAVWNTAKVEAGSIVAIFGLGTVGLAVAEGAKSAGASRIIGIDIDSXKKXDVAKDFGXLQXFVNPKXDHDKP

SEQ ID NO: 6766 - protein, 87 aa, Oryza sativa
  Clone ID: PAT_MRT4530_39601C.1.pep
GFADRGAPRLGFGWGVPARWPLRRRSRRWWGWGWIHRRAPSLGMASRSLSGSNSLVAIWTRMHQVLMEHLRLAGAPLSLAHCRRSVT

SEQ ID NO: 6767 - protein, 61 aa, Oryza sativa
  Clone ID: PAT_MRT4530_39942C.1.pep
RHEARAEQADQAAAAIAAAATTYSHLLPATTRQQAVASLQCGLYLYRRQPGRLAGGSSAPS

SEQ ID NO: 6768 - protein, 530 aa, Oryza sativa
  Clone ID: PAT_MRT4530_39949C.1.pep
MAAAPPPKADELQPHPPKEQLASVSFCITSPPPWPEAIILGFQHFIVMLGTTVIIPSALVPQMGGGNDEKARVIQTLLFVAGINTLFQTFFGSRLPVVMGGSYTFVAPTISIILAGRYNNEADPREKFLRTMRGTQGALIIASTIQMILGFSGLWRNVVRLLSPLSAVPLISLVGFGLYELGFPGVAKCVEIGLPELILLVAFSQYLPQVLHFGKPIFGRFGVLFTVSIVWLYAYILTISGAYKNAPPKTQVHCRVDRSGLISGAPWIRVPYPFQWGAPTFDAGEAFAMMMTSFIALVETTGAFIAASRYASATMIPPSIISRGIGWQGISILIDSFFGTANGTSVSVENVGLLALTHVGSRRVVQISAGFMIFFAILGKFGALFASIPLPIFAGMYCIFFAYVGACGLSFLQFCNLNSFRTKFILGFAFFMGISVPQYFNEYTAVAGYGPVHTGARWFNDMINVPFSSKPFVAGLVAYFLDNTIETHNNTVRKDRGYHWWDKFRSFKKDARSEEFYSLPFNLNKFFPAV

SEQ ID NO: 6769 - protein, 349 aa, Oryza sativa
  Clone ID: PAT_MRT4530_40043C.1.pep
MASASLSLRLPTPSTAPSSGASSSFLSLPPTLLRQARGGAAASSALVARAASGGSPNPLFNPRADPFLSTLAAASPEELQAAAAGGGRRGDDHLPFLEIFQNAKLMASPAQVERSSSSYSQHRPRRPPPDLPSLLLHGRIVYIGMPLVPAVTELVVAQLMYLEWMNSKEPVYIYINSTGTARDDGEPVGMESEGFAIYDAMMRMKTEKIRIHTLCIGAAAGHACLVLAAGKKGKRYMFPHAKDSIMPAMIQQPRIPSYGMMQASDVVIRAKEVVHNRNTLVRLLARHTGNPPEKIDKVMRGPFYMDSLKAKEFGVIDKILWRGQEKYMADMLSPEEWDKVAGVRRPDIM

SEQ ID NO: 6770 - protein, 176 aa, Oryza sativa
  Clone ID: PAT_MRT4530_40136C.1.pep
MSGRGRGDPLVLGRVVGDVVDPFVRRVALRVAYGAREVANGCELRPSAVADQPRVAVGGPDMRTFYTLVMVDPDAPSPSDPNLREYLHWLVTDIPATTGVSFGTEVVCYESPRPVLGIHRLVFLLFEQLGRQTVYAPGWRQNFSTRDFAELYNLGLPVAAVYFNCQRESGTGGRRM

SEQ ID NO: 6771 - protein, 342 aa, Oryza sativa
  Clone ID: PAT_MRT4530_41010C.1.pep
MVSLMKLLFSALHGCHFCPILFFKWSAILGEHLFEMLYDPLRDKWITLPVMPSQIRNIARFGVASVAGKLYVIGGGSDRVDPLTGDHDRIFASNEVWSYDPLCRLWVQRAPMLVARAMFACCALDGNIIVAGGFTNCRKSISKAEIYNPEADTWEPLPDLRQAHSSACSGLVIKGKMHVLHKGLPTVQILEDGNAWAVEDYSWLQGPMAMVRGELYVLSNSCIMKQRGVNFPDKMVSCASEFQSRIGFGMIGLGDNIYLVGGVIGPGPRNQCIKPLSDVDILNVTSVVNCHEKWFIMQKPFSCISVLVYMLHAMEQRRLCLATNMDQRLASDQILKEKDVSY

SEQ ID NO: 6772 - protein, 69 aa, Oryza sativa
  Clone ID: PAT_MRT4530_41055C.1.pep
KHQAGCKSANELLPPSASFVKLSDMSPKQWSAFLDKLQELLPGALSARKHAAGVVGQRSMPRLGTPCQF

SEQ ID NO: 6773 - protein, 54 aa, Oryza sativa
  unsure (1)..(54): unsure at all Xaa locations
  Clone ID: PAT_MRT4530_41126C.1.pep
FFFFFFFFFFFFFLKXKXKLAXIDQKLFXNRGAAKINTDEHNXPMQFVTTXNXX

SEQ ID NO: 6774 - protein, 893 aa, Oryza sativa
  Clone ID: PAT_MRT4530_41131C.1.pep
MRSLRRVLLQLVLLAGVAFRGVRFDDAADAAAAAQGSSDLFELPSPSPTLALPGGGDEGASTEIIAAPWPGRHGLFTPPRSTSQPARAVVQPAADFGSQLQFYDNGTIQLVDLLSKLPRWQFSTGPPLSKHITTSKPDLNYVIYLDGSETSDLIEVHNGSGVRLPWKLEEFIAETPYIRDSFVTIGSKVSTTFVVNADSGEIIYKHSLPVALNEVGGPLVEEIPSKLDAARSGTSANIIVVVRTDYSISASDLGEHLFNWTRTSFTANYYARYGHQDMLAQSSCLRGNIPCIRTEGPPIKLYLPDSSSDNAIVLRPVNEVSAVDALEPLLPPKKLPQPAGESNVALDSAQNQTADIALGHFVPADTELTNSVTKFSYRWLFPTFLMLLIMACLVKLADASKYCRQFVIRFLKPFMRDEKLMDPRGKSEGTSKRRKARKKDGLINSTQIFSASDKEGNGTGGSTEAQSNKAHDSTNVELPNGLNGRQIGKLCVYSKEIGKGSNGTVVFEGSYGGREVAVKRLLRSHNDIASKEIENLIASDQDPNIVRMYGFEQDNDFVYISLERCRCSLADLIQLHSVPPFSNTKGTDIELWRQDGLPSAQLLKLMRDVVAGIVHLHSLGIIHRDLKPQNVLISKEGPLRAKLSDMGISKRLQEDMTSVSHHGTGFGSSGWQAPEQLRHGRQTRAIDLFSLGCLIFYCITKGKHPFGEYYERDMKIINNQFDLFIVDHIPEAVHLISQLLDPDPEKRPTAVYVMHHPFFWSPELCLSFLRDTSDRIEKTSETDLIDALEGINVEAFGKNWGEKLDAALLADMGRYRKYSFESTRDLLRLIRNKSGHYREFSDDLKELLGSLPEGFVQYFSSRFPKLLIKVYEVMSEHCKDEEAFSKYFLGSSA

SEQ ID NO: 6775 - protein, 390 aa, Oryza sativa
  Clone ID: PAT_MRT4530_41161C.1.pep
MSVLTCVLDNMGSSCSRSHSLSEAETTKNAKSADIDRRILQETKAEQHIHKLLLLGAGESGKSTIFKQIKLLFQTGFDEAELRSYTSVIHANVYQTIKILYEGAKELSQVESDSSKYVISPDNQEIGEKLSDIDGRLDYPLLNKELVLDVKRLWQDPAIQETYLRGSILQLPDCAQYFMENLDRLAEAGYVPTKEDVLYARVRTNGVVQIQFSPVGENKRGGEVYRLYDVGGQRNERRKWIHLFEGVNAVIFCAAISEYDQMLFEDETKNRMMETKELFDWVLKQRCFEKTSFILFLNKFDIFEKKIQKVPLSVCEWFKDYQPIAPGKQEVEHAYEFVKKKFEELYFQSSKPDRVDRVFKIYRTTALDQKLVKKTFKLIDESMRRSREGT

SEQ ID NO: 6776 - protein, 399 aa, Oryza sativa
  Clone ID: PAT_MRT4530_41323C.1.pep
MAAAADAPPPPPEVAPPAPAPAPAPAPYQPPRLAVADGAGGGGGGGGKPCRHHAYSRKQKSLGLLCTNFVALYDREDVESVGLDDAARRLGVERRRIYDIVNVLESIGEMSLRAVSSVASPSLDETSAANVSDDEDDDKLDDAEGDAESEKLSLSQSIDNPSDKPDAPPCKLRSEHRKEKSLGLLTQNFVKLFLTMEIETISLDEAAKRLLGEGHAANNMRTKVRRLYDIANVLSSLNLIEKTQQADSRKPAFRWLGQAKRNEGVTVALPPTKTLPNKRAFGTDLTNIDNKRGKLDSTMENRGKPTQDGGNLFNNLQRQLGQENRSDFVYGPFHPAVARKQEHGNRTVQEKERKSIQDWENLASSFRPQYQNPGLNDLFGHYMEAWRSWYSDLRRDRAS

SEQ ID NO: 6777 - protein, 587 aa, Oryza sativa
  Clone ID: PAT_MRT4530_41649C.1.pep
MSYDRVTTFEDSEKAGEYGYVRKVSGPVVVADGMGGAAMYELVRVGNDNLIGEIIRLEGDSATIQVYEETAGLMVNDPVLRTRKPLSVELGPGILGNIFDGIQRPLKTIAIKSGDVYIPRGVSVPALDKDQLWDFEPKKLGVGDAITGGDLYATVFENTLMKHHVALPPGSMGKISYIAPAGQYSLQTWPVRSPRPVSSKLAADTPLLTGQRVLDALFPSVLGGTCAIPGAFGCGKTVISQALSKYSNSEAVVYVGCGERGNEMAEVLMDFPQLTMTLPDGREESVMKRTTLVANTSNMPVAAREASIYTGITIAEYFRDMGYNVSMMADSTSRWAEALREISGRLAEMPADSGYPAYLAARLASFYERAGKVKCLGSPDRTGSVTIVGAVSPPGGDFSDPVTSATLSIVQVFWGLDKKLAQRKHFPSVNWLISYSKYSKALESFYEKFDQDFIDIRTKSSLVGKDALAESDKITLETAKLLREDYLAQNAFTPYDKFCPFYKSVWMMRNIIHFNTLANQAVERAANADGQKITYSVIKHRMGDLFYRLVSQKFEDPAEGEDVLVAKFQKLYDDLTTGFRNLEDEAR

SEQ ID NO: 6778 - protein, 222 aa, Oryza sativa
  Clone ID: PAT_MRT4530_41651C.1.pep
MSYDRVTTFEDSEKESEYGYVRKVWGPVVVADGMGGAAMYELVRVGNDNLIGEIIRLEGDSATIQVYEETAGLMVNDPVLRTRKPLSVELGPGILGNIFDGIQRPLKTIAIKSGDVYIPRGVSVPALDKDQLWDFEPKKLGVGDAITGGDLYATVFENTLMKHHVALPPGSMGKIRYIAPAGQYSLQDTALELGFQGLKKQFTMLQTWPVRSPRPVSSKLAA

SEQ ID NO: 6779 - protein, 91 aa, Oryza sativa
  Clone ID: PAT_MRT4530_41696C.1.pep
MESTELKVEMVALHEKRVRKCLSKVKGVERVEVEGSLQKVVVTGYANRSKILKALRRVGLRAEPWSPRNELLSAYAAGSLMAANNYYHTFF

SEQ ID NO: 6780 - protein, 442 aa, Oryza sativa
  Clone ID: PAT_MRT4530_41750C.1.pep
MDSAARASQSAAPPPPGAGVRVRAPLVESVSCYCRLDTGLKTVVDARKFVPGAKMCMQPDVKPNKCKSRGSRKERSRTQAPLLPGLPDDLAIACLIRVPRVEHPNLRIVCKRWNRLLSGNYYYSLRKRNGMAEEWVYVFKRDREGKISWHAFDPLHQLWKSLPPVPAEYSEALGFGCAVLSGCYLYLFGGKDPLRGSMRRVVFYNARTNKWHRAPDMLRKRHFFGSCVINNCLYVAGGECEGIQRTLPSAEVYDPNRNRWACVAEMNNGMVPFIGVVYDGKWFLKGLDSHRQVTSEVYLPSSNLWSTIDDEMVTGWRNPSITFNGKLYSSDCRDGCKLRVYDPNTGTWAKFMDSKHHLGSSRAFEAAALVTLNGKLCIVRNNMSITLVDISDPTMSIETDSARMWETVARKGQHRSFVANLWSTIAGRNLKSHIIHCQVLQV

SEQ ID NO: 6781 - protein, 636 aa, Oryza sativa
  Clone ID: PAT_MRT4530_42077C.1.pep
MDGCDCIEPLWPTDELLIKYQYISDFFIALAYFSIPLELIYFVKKSSFFPYRWVLIQFGAFIVLCGATHLINLWTFTTHTKTVAMVMTVAKVSTAVVSCATALMLVHIIPDLLSVKTRELFLKNKAEQLDREMGLIRTQEETGRHVRMLTHEIRSTLDRHTILKTTLVELGGTLGLEECALWMPSRSGSSLQLSHTLRHQITVGSTVSINLPVVNQVFSSNRAIIIPHTSPLARIRPLAGRYVPPEVAAVRVPLLHLSNFQINDWPELSAKSYAIMVLMLPSDSARKWHVHELELVEVVADQVAVALSHAAILEESMRARDLLMEQNVALDLARREAEMAIRARNDFLAVMNHEMRTPMNAIIALSSLLLETELTPEQRLMVETVLKSSNLLATLINDVLDLSKLEDGSLELEIKAFNLHAVFKEVMSFIKPIAAIKRLSVSVMLAPDLPLCAIGDEKRLMQTILNISGNAVKFTKEGHITLVASVVKADSLREFRTPDFHPTASDDNFYLKVQIKDTGCGISPQDLPQVFTKFAQSQPGGNRGYSGSGLGLAICKRFVTLMGGHIWLDSEGTGRGCTVTFVIQLGICDNTNAYQQKLIPLVWPSSGDADFVGPVPNAPNEEKGQASLKSRYQRSI

SEQ ID NO: 6782 - protein, 972 aa, Oryza sativa
  Clone ID: PAT_MRT4530_42120C.1.pep
MYGNDNWINSYLDAILDAGKGAAASASASAVGGGGGAGDRPSLLLRERGHFSPARYFVEEVITGYDETDLYKTWLRANAMRSPQEKNTRLENMTWRIWNLARKKKELEKEEANRLLKRRLETERPRVETTSDMSEDLFEGEKGEDAGDPSVAYGDSTTGNTPRISSVDKLYIVLISLHGLVRGENMELGRDSDTGGQVKYVVELAKALSSCPGVYRVDLFTRQILAPNFDRSYGEPVEPLASTSFKNFKQERGENSGAYIIRIPFGPKDKYLAKEHLWPFIQEFVDGALSHIVKMSRAIGEEISCGHPAWPAVIHGHYASAGVAAALLSGALNVPMVFTGHFLGKDKLEELLKQGRQTREQINMTYKIMCRIEAEELALDASEIVIASTRQEIEEQWNLYDGFEVILARKLRARVKRGANCYGRYMARTVVVSASVIAGTRMDVEEQGNLSDCSEDLLARKIMGFFKNPRKSLVLAMARMYPETHITTFGHAFGECRTLREHANLTLIMGNREAISKMHNMSAAVLTSVLTLIDEYDLYGQVAYPKRHKHSEVPDIYRLAVRTKGAFVNVPYFEQFGVTLIEAAMHGLPVIATKNGAPVEIHQVLDNGLLVDPHDQHAIADALYKLLSEKQLWSKCRENGLKNIHQFSWPEHCKNYLSRISTLGPRHPAFASNEDRIKAPIKGRKHVTVIAVDSVSKEDLIRIVRNSIEAARKENLSGSTGFVLSTSLTIGEIHSLLMSAGMLPTDFDAFICNSGSDLYYPSCTGDTPSNSRVTFALDRSYQSHIEYHWGGEGLRKYLVKWASSVVERRGRIEKQVIFEDPEHSSTYCLAFKVVNPNHLPPLKELQKLMRIQSLRCHALYNHGATRLSVIPIHASRSKALRYLSVRWGIELQNVVVLVGETGDSDYEELFGGLHKTVILKGEFNTSANRIHSVRRYPLQDVVALDSPNIIGIEGYGTDDMRSALKQLDIRAQ

SEQ ID NO: 6783 - protein, 200 aa, Oryza sativa
  Clone ID: PAT_MRT4530_42195C.1.pep
MASHQDQASYRAGETKAHTEEKAGQVMGASKDKASEAKDRASEAAGHAAGKGQDTKEATKEKAQAAKERASETAQAAKDKTSSTSQAARDKAAESKDQTGGFLGEKTEQAKQKAAETAGAAKQKTAETAQYTKDSAIAGKDKTGSVLQQASEQVKSTVVGAKDAVMSTLGMTEDEAGTDDGANKDTSATAAATETTARDH

SEQ ID NO: 6784 - protein, 1120 aa, Oryza sativa
  Clone ID: PAT_MRT4530_4273C.1.pep
MVVVVVVGGAAWICASSSRAMLAESDLGENVVELMQRYFPTDMIRRIRMLSGNLIKKVVMPPGAISLDDVDIDQVSVDYVLNCAKKGEALDLGDAIRLFHDSLDYPYVNNSGTVEEFFLLTKPEYSGPAPAREPPPVPAIAPSPVVIPAPIVDPPPVAVHSPVSTTNLSKSQSFDSPTEKELTIDDIEDFEDEEDEFDSRRASRRHQSDANDLSLRLPLFETGITDDDLRETAYEILVAAAGASGGLIVPQKEKKKEKRNKLMRKLGRSKSESTQSQTQRQPGLVGLLETMRAQLEITESMDIRTRQGLLNAMVGKVGKRMDNLLIPLELLCCISRAEFSDMKAYLRWQKRQLNMLEEGLINHPVVGFGELGRKVNELRNLFRKIEESESLQPSAVEVQRTECLRSLREVATSLSERPARGDLTGEIHYQLQEVEEILELLKSTWRILGITETIHDTCYAWVLFRQFVFTGEQGLLKVVIEHLRKIPLKEQRGPQERLHLKSLRSSVDAEDSFQDFTFFQSFLSPVQKWVDKKLNDYHLHFSEGPSMMADIVTVAMLIRRILGEENNKGMESPDRDQIDRYITSSVKSAFVKMAHSVEAKADTSHEHVLASLAEETKKLLKKDTTVFSSVLSKWHPQSAVVSASLLHKLYGSKLKPFLEHAEHLTEDVVSVFPAADALEQYIMSVMASVVGDDGLDSICRQKLAPYQIESKSGTLILRWVNGQLERIETWVKRAAEQETWDPISPQQRHGASIVEVYRIIEEVPMRTGELNSLCRGFDKAFQVYTQLVTGPIVDREDLIPPVPVLTRYKKELGIKAFVKKEIHEVRTVDERKASEIIQLTMPKLCVRLNSLYYGISQLSKLEDSINERWARRKSESINIRRSMSEKSKSAVSSQKNQFDGSRKEINAAIDRICEFTGLKVIFWDLQQPFIDNLYKNNVSQARLDAIMEVLDTVLNQLCNVIVEQLRDRVVTGLLQASLDGLLRVILDGGPTRVFSPSDATLLEEDLEILKEFFISGGDGLPRGTVENLVSRVRPVIDLIKQETRVLIDDLREVTQGAKTNGMRLGLATWKSCPVSAPLLPFAIVPHSNQLFKVLPSLTRSKVSAVFIKQYRVRYDLLAPD

SEQ ID NO: 6785 - protein, 1107 aa, Oryza sativa
  Clone ID: PAT_MRT4530_4275C.1.pep
MLSGNLIKKVVMPPGAISLDDVDIDQVSVDYVLNCAKKGEALDLGDAIRLFHDSLDYPYVNNSGTVEEFFLLTKPEYSGPAPAREPPPVPAIAPSPVVIPAPIVDPPPVAVHSPVSTTNLSKSQSFDSPTEKELTIDDIEDFEDEEDEFDSRRASRRHQSDANDLSLRLPLFETGNSDDCYVIMKSSCWYGYIHWVKKVIDNGNCAVFPGITDDDLRETAYEILVAAAGASGGLIVPQKEKKKEKRNKLMRKLGRSKSESTQSQTQRQPGLVGLLETMRAQLEITESMDIRTRQGLLNAMVGKVGKRMDNLLIPLELLCCISRAEFSDMKAYLRWQKRQLNMLEEGLINHPVVGFGELGRKVNELRNLFRKIEESESLQPSAVEVQRTECLRSLREVATSLSERPARGDLTGEIHYQLQEVEEILELLKSTWRILGITETIHDTCYAWVLFRQFVFTGEQGLLKVVIEHLRKIPLKEQRGPQERLHLKSLRSSVDAEDSFQDFTFFQSFLSPVQKWVDKKLNDYHLHFSEGPSMMADIVTVAMLIRRILGEENNKGMESPDRDQIDRYITSSVKSAFVKMAHSVEAKADTSHEHVLASLAEETKKLLKKDTTVFSSVLSKWHPQSAVVSASLLHKLYGSKLKPFLEHAEHLTEDVVSVFPAADALEQYIMSVMASVVGDDGLDSICRQKLAPYQIESKSGTLILRWVNGQLERIETWVKRAAEQETWDPISPQQRHGASIVEVYRIIEEVPMRTGELNSLCRGFDKAFQVYTQLVTGPIVDREDLIPPVPVLTRYKKELGIKAFVKKEIHEVRTVDERKASEIIQLTMPKLCVRLNSLYYGISQLSKLEDSINERWARRKSESINIRRSMSEKSKSAVSSQKNQFDGSRKEINAAIDRICEFTGLKVIFWDLQQPFIDNLYKNNVSQARLDAIMEVLDTVLNQLCNVIVEQLRDRVVTGLLQASLDGLLRVILDGGPTRVFSPSDATLLEEDLEILKEFFISGGDGLPRGTVENLVSRVRPVIDLIKQETRVLIDDLREVTQGAKTNGMRLGLATWKSCPVSAPLLPFAIVPHSNQLFKVLPSLTRSKVSAVFIKQYRVRYDLLAPD

SEQ ID NO: 6786 - protein, 397 aa, Oryza sativa
  Clone ID: PAT_MRT4530_4336C.1.pep
MAAPKPIARLISHVILDLDGTLLNTDCVVSQVLKPFLVKNGKKWDSKKAHKLVGKTPYEAAAVVLEDYGLPYSTEEFLSMLTPMFNEQWCNIKALPGANRLIKHLKSNGVPAALASNSPRSNIDAKISCHQGWKESFSAIVGGDEVEKGKPSPDIFLEAAKRMNTNPPNCLVIEDSLPGVAAGKAAGMHVIAVPSVPKRTAEFSSADEVINSLLDVKPEKWGLPPFSDWIDDTLPIEPWFIGGPVIKGFGRGSKVLGIPTANLPAENFSDVLSEHTSGVYFGWAGLSTRGIFKMVMSIGWNPYFDNTEKTIEPWLLHDFGEDFYGEELRLVIVGYIRPEANFPSLESLIERIHEDARISDKALNLPLYAKYKDSPYLRNSLKEDNSANGNQSVIDSK

SEQ ID NO: 6787 - protein, 210 aa, Oryza sativa
  Clone ID: PAT_MRT4530_43475C.1.pep
MRTICDVCESAPAVLFCVADEAALCRSCDEKVHMCNKLARRHVRVGLADPNKVQRCDICENAPAFFYCEIDGTSLCLSCDMTVHVGGKRTHGRYLLLRQRVEVGDKPGHMDDVAMQQKDPENRTDQKKAPHSVTKEQMANHHNVSDDPASDGNCDDQGNIDSKMIDLNMRPVRTHGQGSNSQTQGVDVSVNNHDSPGVVPTCNFEREANK

SEQ ID NO: 6788 - protein, 1873 aa, Oryza sativa
  Clone ID: PAT_MRT4530_43893C.1.pep
MAADPAVASAVAAISAVMDWRSSPDARSAAFAYLESVKTGDVRALANTSFLLVRKDQSSEVRLHGFKMLQHLVRLRWEELSVAERNEFANLTVNLIPEVVGPHEEWALKSQTAALVAEVVRREGVALWNTLLPSIVSLSNNGPIEAELVAMILRWLPEDITVHNEDLEGDRRRALLRGLTESLPQILPLLYSLLEKHFVAALSAHTNQQMELAKQHVGTITAVLNAANAYAEWAPVTDLAKYGLIHGSCILADVARTLHFLQQMLEYYQHYKITLHFQSLLFWLVVLREPSKAKSVARVSSDTPAAGNSASTGGGSTEREKKGVSVLITDEMYSTILDVTFKRMLKKSTSASSGLLELWSEELEGKSDFCNYRAKLLDLIKVIASQRPGITATSIVQRINIVFGDANEATKSSQDLDAMEGAQLGLEAVVSAIFDGSSDYSKIDQDTKFQIHRIFEGLLQQLLSLKWSQPNLAVIHGHYLDSLGPFLRHYPDAVACIVNKLFEILTSLPITIQDPSNNFRQARLQICSSFIRISRAADKALLPHMKCNSVNFFMTIVKTFKCKQVVTTWYQSHSPWLPILSEFFVSWVANVYMNKNIADTMAYLQGEGRLLRAEHNHLCEAFLVMASSAGIQQQQEVLAWLLEPINKMWTQVEWQNAYLSDPSGLTHMFADSQFMWSIYHNITLFEKALKRGGSKKSASAPQALATTVLLRCIHMLWAEPFSQSLAGEVKAAKSMTVAEQTSLLGETNKLTKGQVASADGLLDVQREGESKENTIRNWLRGIRDSGYNVIGLSASLGDPFFRCIEGSSITAALMENVQAMEFRHLRQLIHLVIIPLVKYCPPELWRMWISNLLQPLFVHCQQALDFSWSSLLREGRAKVPDNFGNLSGSDLKVEVMEEKLLRDLTREVCSVLWVLASPGLNSGLPSLEQLGPANRINSSLKDLELFVSSSITGFLMLNVSTAVPALRITVEVFSWTDSEAVTKIIPFCGALIHLAVATNRAELSQFVAKDLFSSILHGLSVELNSITSSELVGLCREIYIYLSDRDPAPRQNTTGREEEDKKVTGIGTSKSNLCPARHPSAELVLGTEVPPLMVIFRTLPSSAKPATKQKVAPKKTDVRAILRPLTVINCQKKDIQLRFSTDNMKRVDMASAILLSIAIMAQLSSISAQPAPGCQSHCGDMEIPYPFGIGTECAIEPGFVIYCNKTADGSMKPFLINVEVLNISLLHGQTRALNALSTYCYNDVTKSMESSRWSLDFSTWPYRFSNLHNKFVVIGCNTLSYIYNGEYTTACASVCAKAPTNDSCDGVGCCQNNIAKGLNSYNVTFFTVYNDSSNLQSNPCSYAALVETDTFRFKTEYVTTMKFNETYNGQQPVVLDWAIGKVGCKEANMTSYACRSKHSECVDSINGPGYLCNCTLGYHGNPYITDGCIDVNECEQNQSPCPKGATCRNTEGWYHCSCPVGRKLAKETNTCNPDISLIIGVSIGSIVLVIIIFFVRIIFERRKLTDVKKKYIQEHGGLLLFEKMKSDQGLAFKVFTQAELEQATNKFEKSQILGHGGHGTVYKGITKDNITVAIKKCALIDDRHKKEFGKEMLILSQINHKNIVKLLGCCLEVDVPMLVYEFIPNGTLFDLIHGKNRTLHIPFSSLLRIVNEAAEGLAFLHSYANPPILHGDVKTSNILLDENYMAKVSDFGASILAPNDEAQFVTMVQGTCGYLDPEYLQTCQLTEKSDVYSFGVVILEILTGQMPLKLEGSELQKSLSSSFLLAMKENNLEAMLDSQIKGHESMELLSGLAELAKQCLDMCSENRPSMKDVAEEISRLRKLSKHPWIQRDSETEGYLSGPSTSNFEIEQSTEYTRKDEQMPINPSTSYFIR

SEQ ID NO: 6789 - protein, 102 aa, Oryza sativa
  Clone ID: PAT_MRT4530_44272C.1.pep
MRPTGRRSSPPVAAALALLLLLVLFFFSHCASAARPLPASAAAELVLQDGATGNGDEVSELMGAAEEEAAGLCEEGNEECVERRMLRDAHLDYIYTQKRNRP

SEQ ID NO: 6790 - protein, 336 aa, Oryza sativa
  Clone ID: PAT_MRT4530_44581C.1.pep
MAGMDPGGGGAGAGSSRYFHHLLRPQQPSPLSPLSPTSHVKMEHSKMSPDKSPVGEGDHAGGSGSGGVGGDHQPSSSAMVPVEGGSGSAGGSGSGGPTRRPRGRPPGSKNKPKPPIIVTRDSPNALHSHVLEVAGGADVVDCVAEYARRRGRGVCVLSGGGAVVNVALRQPGASPPGSMVATLRGRFEILSLTGTVLPPPAPPGASGLTVFLSGGQGQVIGGSVVGPLVAAGPVVLMAASFANAVYERLPLEGEEEEVAAPAAGGEAQDQVAQSAGPPGQQPAASQSSGVTGGDGTGGAGGMSLYNLAGNVGGYQLPGDNFGGWSGAGAGGVRPPF

SEQ ID NO: 6791 - protein, 232 aa, Oryza sativa
  unsure (1)..(232): unsure at all Xaa locations
  Clone ID: PAT_MRT4530_44878C.1.pep
TSPLSSFLSAPPPPKGSSLGRRTTREGETRPIRTNAYHKRYRAXLKRRRHGKTDYRTSTKLTIRDNIIVNTPRFRFAVRFTHQEHITAHMGYATIAGDMGMAGAYFHELXAYGLEAGLTNYAAAYCTGLAXARRVLKLLGXDQEFKGYMDAAGEDYXVEPADERRTFRALLDGGLIKTATGHRVFGALTGATDGGLDISHSDKRDAGFKMDEKQLDVCFHRMNIYSGHVADY

SEQ ID NO: 6792 - protein, 850 aa, Oryza sativa
  unsure (1)..(850): unsure at all Xaa locations
  Clone ID: PAT_MRT4530_44906C.1.pep
MVSRSYSNLLDLATGAADQAPAPAALGALRRRLPRVVTTAGLIDDSPLSPSTPSPSPXARTIVVANHLPIRAHRPASPSEPWTFXWDEDFLLRHLQHSCSSPAMEFIYIGCLRDDIPLADQDAVAQALLESYNCVPAFLPPDIXERYYHGFCKQHLWPLFHYMLPLSPDLGGRFDRALWQSYVSANKIFADKVLEVINPDDDFVWVHDYHLMVLPTFLRKRFNRIKLGFFLHSPFPSSEIYKTLPVREELLRALLNSDLIGFHTFDYARHFLSCCGRMLGLSYESKRGHICLEYYGRTVSIKILPVGVNMGQLKTVLALPETEAKVAELMATYSGKGRVVMLGVDDMDIFKGISLKLLAMEELLRQHPEWRGKLVLVQDVDEVKGETYAMVRRINEAYGAPGYEPVVLIDEPLQFYERVAYYVVAEVCLVTGVRDGMNLIPYEYIVSRQGNEALDRMLQPSKPEEKKSMLVVSEFIGCSPSLSGAVRVNPWNIEAVADAMESALVLPEKEKRMRHDKHYRYVDTHDVGYWATSFLQDLERTCKDHAQRRCWGIGFGLRFRVVSLDLSFRKLAMEHIVMAYRRAKTRAILLDYDGTLMPQAINKSPSANSVETLTSLCRDKSNKVFLCSGFEKGTLHDWFPCENLGLAAEHGYFLRSSRDAEWEISIPPADCSWKQIAEPVMCLYRETTDGSIIENRETVLVWNYEDADPDFGSCQAKELVDHLESVLANEPVSVKSTGHSVEVKPQGVSKGLVARRLLASMQERGMCTDFVLCIGDDRSDEEMFQMITSSTCGESLAATAEVFACTVGRKPSKAKYYLDDTAEVVRLMQGLASVSNELARAASPPEDDDE

SEQ ID NO: 6793 - protein, 860 aa, Oryza sativa
  Clone ID: PAT_MRT4530_44907C.1.pep
MVSRSYSNLLDLATGAADQAPAPAALGALRRRLPRVVTTAGLIDDSPLSPSTPSPSPRPRTIVVANHLPIRAHRPASPSEPWTFSWDEDSLLRHLQHSSSSPAMEFIYIGCLRDDIPLADQDAVAQALLESYNCVPAFLPPDIAERYYHGFCKQHLWPLFHYMLPLSPDLGGRFDRALWQSYVSANKIFADKVLEVINPDDDFVWVHDYHLMVLPTFLRKRFNRIKLGFFLHSPFPSSEIYKTLPVREELLRALLNSDLIGFHTFDYARHFLSCCGRMLGLSYESKRGHICLEYYGRTVSIKILPVGVNMGQLKTVLALPETEAKVAELMATYSGKGRVVMLGVDDMDIFKGISLKLLAMEELLRQHPEWRGKLVLVQVANPARGRGKDVDEVKGETYAMVRRINEAYGAPGYEPVVLIDEPLQFYERVAYYVVAEVCLVTAVRDGMNLIPYEYIVSRQGNEALDRMLQPSKPEEKKSMLVVSEFIGCSPSLSGAVRVNPWNIEAVADAMESALVLPEKEKRMRHDKHYRYVDTHDVGYWATSFLQDLERTCKDHAQRRCWGIGFGLRFRVVSLDLSFRKLAMEHIVMAYRRAKTRAILLDYDGTLMPQAINKSPSANSVETLTSLCRDKSNKVFLCSGFEKGTLHDWFPCENLGLAAEHGYFLRSSRDAEWEISIPPADCSWKQIAEPVMCLYRETTDGSIIENRETVLVWNYEDADPDFGSCQAKELVDHLESVLANEPVSVKSTGHSVEVKPQGVSKGLVARRLLASMQERGMCTDFVLCIGDDRSDEEMFQMITSSTCGESLAATAEVFACTVGRKPSKAKYYLDDTAEVVRLMQGLASVSNELARAASPPEDDDE

SEQ ID NO: 6794 - protein, 143 aa, Oryza sativa
  Clone ID: PAT_MRT4530_44970C.1.pep
GMAVAYITPSDYLFWFRSHTAKEIKWGGAKHHPEDKDDGQRMHPRSSFKAFLEVVKSRSLPWENAEMDAIHSLQLILRDSFRDSAEGTSNSKAIVNGQVQLEELELRGIDELSSVAKEMVRLIETATVPIFAVDTDGCINGWN

SEQ ID NO: 6795 - protein, 161 aa, Oryza sativa
  Clone ID: PAT_MRT4530_45342C.1.pep
MTSSSSPSRKALSKIACNRLQKELAEWQVSPPSGFKYRVSDNLQRWVIEVTGAAGTLYAGETYQLQVDFPEHYPMEAPQVIFLNPAPMHPHIYSNGHICLDILYDSWSPAMTVSSVCISILSMLSSSPAKQRPQDNDRYVRNCRNGRSPKETRWWFHDDKV

SEQ ID NO: 6796 - protein, 293 aa, Oryza sativa
  Clone ID: PAT_MRT4530_45422C.1.pep
MAAAARSLALLSTASASLGLGVARSSARPRSPFGRGLALRGLSSSSSSFAATAAVMGKAGTAEAADAGMDAVQQRLMFEDECILVDEQDNVIGHDSKYNCHLMEKINSGHVLHRAFSVFLFNSKYELLLQQRSATKVTFPLVWTNTCCSHPLYRESELIEDKSLGVRNAAQRKLFDELGIQAEELPVDQFIPLGRMLYKAPSDGKWGEHELDYLLFMVRDVELSPNPEEVADVKYVNRDELKELLKKADAGEGGIKLSPWFRLVVDNFLMRWWDHVEQGTLEEAIDMKTIHKL

SEQ ID NO: 6797 - protein, 1172 aa, Oryza sativa
  Clone ID: PAT_MRT4530_4549C.1.pep
MADNGNAKPGGGGSGAYTINLDNFSKRLKVFYDHWKEHNSDLWGSSNAIAIATPPPSEDLRYLKSSALDVWLLGYEFPETIIVFMHKQIHFLCSQKKANLIGTLKKASNDAVGADIVLHVKAKNDSGVGLMEDIVRAVCAQSKSDDPIVGHIAKEAPEEKVIDEERKVTHSSLMDETEKAILDPLKVKVKLKAENVDICYPPVFQSGGKFDLKPGASSNDDYLYYDSASVIICAIGARYGNYCSNMARTFLIDATPAQSKAYETLMKAHEAALEALKPGNRMSAVYQAAVDVIEKNAPELLPNLTKSAGTGIGLEFRESGLNLNPKNDRIIKAGMVFNVSLGLLNLQAETKSEKTKQYSLLLADTCLVPLENLTASCSKLLKDVAYSFNDEDEVLPVKKVEVNAKEALPPTKATLRSDNQEMSKEELRRQHQAELARQKNEETARRLAGVGSGSGDGRGPSRSSNELVAYKNVNDVPYARELVIQVDQKNEAVLLPIHGSMVPFHVSTVKSVTSHQDNRTCTIRIFFNVPGMPFSNDSNLKSQGAIYLKEITFRSKDPRHSSEVVPQIKTLRRQVASRESERAERATLVTQEKLQLASNRNKPVRLSDVWIRPAFGGRGRKLTGTLESHVNGFRYSTSRADERVDIMYGNVKHAFFQPAEKEIITLLHFHLHNHIMVGNKKTKDVQFYVEVMDVVQTLGGNRRSALDPDEIEEEQRERDRKNRINMDFQNFVNKVNDHWSQPQFKGLDLEFDVPLRELGFHARRRRRRLPVRRCDVCHFDLRTCCALPPATLENDMFEVSAFAFLAEPPAAPAAAGGRICDACGDGVRGFVYHSDDPRPRPPPMLRVPAQARRGAGRPPLRAPQARAAAPACAARGAAAAATSGRTGPTTTTANPCTCTSRASRTDTAGGARRRCGGEIVLVSSSPAMDGVLQSVPRRRTPRSGGFERFCKIVNVVVSVIIAVIFGSPMAMISAVAGPDGRSRAAASAPSSSSSPVVVVGAVVIVVARRGRGRGGSRRRADVGRGGELAARGRRRRRGGSRPAAEVGSQRRADVGEEGAGWWRMDVGRGGEPASRSSSSPAHGGGVAVVVVVGGGGGKPVARGRWRGGSRPAARGRRERRGAGRRRGVAASRSSSSPAAEVGSRGGSQPQRSQTWGTDIYGYTYFGTEIISP

SEQ ID NO: 6798 - protein, 997 aa, Oryza sativa
  Clone ID: PAT_MRT4530_4550C.1.pep
MADNGNAKPGGGGSGAYTINLDNFSKRLKVFYDHWKEHNSDLWGSSNAIAIATPPPSEDLRYLKSSALDVWLLGYEFPETIIVFMHKQIHFLCSQKKANLIGTLKKAANDAVGADIVLHVKAKNDSGVGLMEDIVRAVCAQSKSDDPIVGHIAKEAPEEKVIDEGRKVTPSSSMHETEKTIRDPVKVEVKLKAENVAICYPPVFQSGGKFDLKPGASSNDDYLYYDSASVIICAIGARYGNYCSNMARTFLIDATPTQIKAYETLMKAHEAALEALKPGNRMSAVYQAAVDVIEKNAPELLRNLTKSAGTGIGLEFRESGLNLNPKNDRIIKAGMVFNVSLGLHNLQAEKKSEKTKQYSLLLADTCLVLLENLTASCSKLVKDVAYSFNDEDEVLPVKKVEVNAKEALPPTKATLRSDNQEMSKEELRRQHQAELARQKNEETARRLAGVGSGSGDGRGPSRSSNELVAYKNVNDVPYARELVIQVDQKNEAVLLPIYGSMVPFHVSTVKSVTSHQDNRTCTIRIFFNVPGMPFSNDSNLKSQGAIYLKEITFRSKDPRHSSEVVQQIKTLRRQVASRESERAERATLVTQEKLQLTSNRNKPVRLSDVWIRPAFGGRGRKLTGTLESHVNGFRYSTSRADERVDIMYGNVKHAFFQPAEKEMITLLHFHLHNHIMVGNKKTKDVQFYVEVMDVVQTLGGNRRSALDPDEIEEEQRERDRKNRINMDFQNFVNKVNDHWSQPQFKGLDLEFDVPLRELGFHGVPYKASAFIIPTSTCLVELIETPFLVVTLSEIEIVNLERVGFGTKNFDMAIVFKDFKKDVLRIDSIPSTSLDAIKEWLDTTDLKYYESRLNLNWRPILKTIIDDPQKFIDDGGWEFLNMEASDSETEETEESDQGYEPSDAEPESESEDEDSDSESLVESDEDDEDDSEEDSEEEKGKTWEELEREASNADRENGAESDSEEERRRRKVKTFSKSRPPPERSSFKGGPSKKPKFR

SEQ ID NO: 6799 - protein, 404 aa, Oryza sativa
  Clone ID: PAT_MRT4530_45989C.1.pep
MKLHFVLRFLFGPVPVYFSALAILILLTNAQYFGLVGVTVPRATKLASSAPVVSVMKYCDIFRGEWVPDSDAPYYNHKTCYMIQEHQNCLKYGRPDLEFLKWRWRPSGCELPRFDPVQFLQFNRHKSLAFVGDSLARNHMQSLLCLLSQVAYPKDMSANPTTQNKVYHYRGYNFTVSMFWSPFLVKAREPDHDGPAHTGHWSLYLDEPDQSWVSEISRFDYVLVSAANWFSRPSLFYEKRRLVGCSFCSRQYGVPDLTLYYSQRRAWRVALKAINDLESLRGRVIVRMLSPMSHFENGTWDQGGNCKRTQPLRSNETVMEGRDLHFYTAQMEEYRAAEKVAEAKGRRMMLMDATAAMLMRPDGHPSRYGHLPNQKVQLYNDCIHWCLPGPIDIWNDMLFQMLLV

SEQ ID NO: 6800 - protein, 496 aa, Oryza sativa
  Clone ID: PAT_MRT4530_45999C.1.pep
MGENGVVASKLCYPAAAMEVVAAELGHTAGSKLYDDDGRLKRTGTMWTASAHIITAVIGSGVLSLGWAIAQLGWVAGPAVMLLFSFVTYYTSALLADCYRSGDESTGKRNYTYMDAVNANLSGIKVQVCGFLQYANIVGVAIGYTIAASISMLAIKRANCFHVEGHGDPCNISSTPYMIIFGVAEIFFSQIPDFDQISWLSILAAVMSFTYSTIGLGLGVVQVVANGGVKGSLTGISIGVVTPMDKVWRSLQAFGDIAFAYSYSLILIEIQDTIRAPPPSESRVMRRATVVSVAVTTLFYMLCGCTGYAAFGDAAPGNLLTGFGFYEPFWLLDVANAAIVVHLVGAYQVYCQPLFAFVEKWAQQRWPKSWYITKDIDVPLSLSGGGGGGGRCYKLNLFRLTWRSAFVVATTVVSMLLPFFNDVVGFLGAVGFWPLTVYFPVEMYIVQKRIPRWSTRWVCLQLLSLACLAITVASAAGSIAGILSDLKVYKPFATTY

SEQ ID NO: 6801 - protein, 216 aa, Oryza sativa
  Clone ID: PAT_MRT4530_46101C.1.pep
MALVYSESSLTGIQLIICKAARPGDQAQPNRKLPRNSSNLKTPKEFHATDPWGHMVRVYQLLLKGRDALMKLGITGKKYTQPARCYMIAFVLVYTNTINHLWLMPLALELPLPTAHWAKWCGCLRIDPLEYAVEMESVVAGAPDERAIVAGELTIRAAAVECHPAYTTGFILGVPCPRSHRMPLKNLDLHLWSGCLRIDPTSVCSGDGKRGCRSPR

SEQ ID NO: 6802 - protein, 262 aa, Oryza sativa
  Clone ID: PAT_MRT4530_46195C.1.pep
MSAQAELSREENVYMAKLAEQAERYEEMVEFMEKVAKTVDSEELTVEERNLLSVAYKNVIGARRASWRIISSIEQKEESRGNEDRVTLIKDYRGKIETELTKICDGILKLLESHLVPSSTAPESKVFYLKMKGDYYRYLAEFKTGAERKDAAENTMVAYKAAQDIALAELPPTHPIRLGLALNFSVFYYEILNSPDRACNLAKQAFDEAISELDTLSEESYKDSTLIMQLLRDNLTLWTSDISEDTAEEIREAPKRDSSEGQ

SEQ ID NO: 6803 - protein, 109 aa, Oryza sativa
  unsure (1)..(109): unsure at all Xaa locations
  Clone ID: PAT_MRT4530_46419C.1.pep
LDRPAIETAAGDRYTRGGGTRSTACCADRSMXSSNYRPKAWRPSSTFYGKSWRVNTGRCAACGRHCKEASRTGLAPEXEIWDSMEEFLTKETPDNNLIRLLISMGEAMR

SEQ ID NO: 6804 - protein, 73 aa, Oryza sativa
  Clone ID: PAT_MRT4530_4653C.1.pep
GFLFLTRVSGLGQLKADRWGREFSLGCLIFFAALPFGGPNKWGGWPSPGHGPMDFFLGFGQVEQYLWNLGFFR

SEQ ID NO: 6805 - protein, 762 aa, Oryza sativa
  Clone ID: PAT_MRT4530_46959C.1.pep
MAILSDVATEVLIPIAAIIGIGFSIAQWVLVARVKLAPSQPGASRSKDGYGDSLIEEEEGLNDHNVVAKCAEIQNAIAEGATSFLFTEYQYVGVFMSIFAVVIFLFLGSVEGFSTKTHPCTYSKDKECKPALFNALFSTVSFLLGAITSVVSGFLGMKIATYANARTTLEARKGVGKAFITAFRSGAVMGFLLASNGLLVLYIAINLFKMYYGDDWEGLFESITGYGLGGSSMALFGRVGGGIYTKAADVGADLVGKVERNIPEDDPRNPAVIADNVGDNVGDIAGMGSDLFGSYAESSCAALVVASISSFGINHDFTGMCYPLLVSSMGIIVCLITTLFATDFFEIKAVKEIEPSLKKQLIISTALMTVGIALVSWLALPYKFTIFNFGEQKEVTNWGLFLCVSIGLWAGLIIGYVTEYYTSNAYSPVQDVADACRTGAATNVIFGLALGYKSVIIPIFAIALGIYVSFTIAAMYGIAVAALGMLSTIATGLSIDAYGPISDNAGGIAEMAGMSHRIRERTDALDAAGNTTAAIGKGFAIGSAALVSLALFGAFVSRAGVKVVDVLSPKVIIGLIVGAMLPYWFSAMTMKSVGSAALKMVEEVRRQFNTIPGLMEGTGKPDYANCVKISTDASIKQMIPPGALVMLTPLIVGTLFGVQTLSGVLAGALVSGVQVAISASNTGGAWDNAKKYIEAGASEHARSLGPKGSDCHKAAVIGDTIGDPLKDTSGPSLNILIKLMAVESLVFAPFFATHGGILFKLF

SEQ ID NO: 6806 - protein, 256 aa, Oryza sativa
  Clone ID: PAT_MRT4530_47006C.1.pep
MKLAVVAVAALLLAAGVASADEFDFFYLVQQWPGSFCDTQAGCCFPDTGKPAAEFGIHGLWPNYAKCRPAAGAVADDDDGVVEMVVDGGAAVERHHRRRQKCWPEYCDDGNKLRPWEIKDLVAELDANWPTLSCKGGKSFEFWSYEWKKHGTCSGMGQHGYFAAALELKKRHDLAAVLAGAGIVPSDDESYSLGSIRDAIAAATGAVPNLECNRDAAGETQLFQVYQCVDRSGKKLVDCQLPMQGKCRDKVKLPTF

SEQ ID NO: 6807 - protein, 131 aa, Oryza sativa
  Clone ID: PAT_MRT4530_47125C.1.pep
SARAFGENMVMSELVECCKELDEVHHALAGHKKEAAWRLSRVELQLESEKAGRRREKMEEIEAKIKALREEQTAALDRIEAEYREQLAGLRRDAESKEQKLAEQWAAKHLRLTKFLEQVGCRSRLTEPNGR

SEQ ID NO: 6808 - protein, 135 aa, Oryza sativa
  Clone ID: PAT_MRT4530_47568C.1.pep
MAGRGKAIGSGAAKKAMSRSSKAGLQFPVGRIARFLKAGKYAERVGAGAPVYLAAVLEYLAAEVLELAGNAARDNKKTRIVPRHIQLAVRNDEELSRLLGTVTIASGGVMPNIHNLLLPKKAGGSAKAAAGDDDN

SEQ ID NO: 6809 - protein, 67 aa, Oryza sativa
  Clone ID: PAT_MRT4530_47854C.1.pep
QWFYSLPFKLLVQKQVGVCGTRPGWGWGSLLNCLVALPVFLFAFLLVFIVMVKKKKKKKKKKKKKQQ

SEQ ID NO: 6810 - protein, 892 aa, Oryza sativa
  Clone ID: PAT_MRT4530_47879C.1.pep
MAAAALRLAVLAVAIGALVASSSAAVCPHANHTAPFAADFTMLQHQLRGTVRLADDDSCALRLTRFDLLAASPSARFWAARGDSLADLAAGRAFSPHPLNSTFRNATLLLPFSAPLPPLLALFDPDTSSDLGHVFLPVSASASASNATDDSGVASPSPSPEPVPTMFDNCLPLAENKYRLRWTLNASAGTVEIGLEAAVGSEYYMAFGWADPKANSPAMIHSDVAVAGFTEEGMPFAEDYYITDYSECTLGTDESPVSGVCPDKVYDEGKNDSLLVYGHRRDGVSFVRYQRKLDTGDTKYDVLVSATEEMAVVWAIGKLRPPDTLRPHYLPQNHGGPRDTTYGFARVNLSETVDSCNGPLDADNKEDQERIIADAKTPLVVTSAPAVRYPNPPNPDKVIYINKKEAPLLKVERGVPVKFSVQAGHDVALYITSDPIGGNATLRNKTEVIYAGSRDAHGVPATPTELLWLPDRNTPDLVYYQSLYEPKMGWKVQVVDGGLSDMYNSSVLLDDQQVTLFWTLSHDSISIAARGEKKSGYLAVGFGSGMLNSYAYVGWVGNDGVGRVKSYWIDGKSAAGIHPTSENLTYVRCRSENGIITFEFTRPLRPSCSGRVECKNIIDPTTPLKVVWAMGASWSGNSLTDSNMHSITSSRPIRVLLLRGSAEAEQDLRPVLAVHGFMMFVAWGILLPGGILAARYLKNLKGDGWYQIHVYLQYSGIAIMFLGVLFAAAELRGFYVSSVHVKFGVTALLLAGLQPLNAYFRPKRPANGEASSWNRVLWEYLHVITGRSAIIVGIVALFTGMKHLGHRYDSENVEELTWALMLWVLSAIVITLYLEYKEVKRRSGDTSSRGHWVLGNTEEDDSVDLLHPDSTDRNSESSPSGVMEVQLEPLAR

SEQ ID NO: 6811 - protein, 206 aa, Oryza sativa
  Clone ID: PAT_MRT4530_48062C.1.pep
MAEVEAAPIAAAETPEVAAAEGAAAAKAPHKLHRQWAFWYDIQSKPKPGAAWGTSLRKAYTFDTVEEFWGLYDQIFRPSKVTVNADFHLFKAGVEPKWEDPECANGGKWTVPCSRKTTLENMWLETLMALIGEQFDESEEICGVVASVRQRGDKLALWTRTASNEAVQVNIGKKWKEIVDYNDKMVYSFHDDAKREKPSRGGRYNV

SEQ ID NO: 6812 - protein, 303 aa, Oryza sativa
  Clone ID: PAT_MRT4530_48097C.1.pep
MATASSINKRFSLAGATALVTGGSKGIGRAIVEELASFGATVHTCARNQAELSRCQEEWTAKGLAVTVSVCDVAVRADREALAGRVSAMFDGKLSILVNNAGTAYLKPAADLTPEETSRLMTTNFESCFHLSQLFYPLLKDSGRGSIVNISSVASVLAFHSLPIYSAAKGAMNQVTRNLACEWASDGIRVNSVAPGYIQAPLLAAFVAGNDFAQVEFNRLPLGRLGKPEDISSLVAFLCMPAASYITGQIICVDGGRLPAVTLKYSKQPQTRTKITCTNLVDGIKIEPVRMKPIGRASTGDHK

SEQ ID NO: 6813 - protein, 135 aa, Oryza sativa
  Clone ID: PAT_MRT4530_48394C.1.pep
MAGRGKAIGAGAAKKATSRSSKAGLQFPVGRIARFLKAGKYAERVGAGAPVYLAAVLEYLAAEVLELAGNAARDNKKTRIVPRHIQLAVRNDEELTKLLGGATIASGGVMPNIHQHLLPKKAGSSKASHADDDDN

SEQ ID NO: 6814 - protein, 194 aa, Oryza sativa
  Clone ID: PAT_MRT4530_49221C.1.pep
MDSAGFFTFVVARRKEVDALRAELPDALKRCVDPARFAMDAVSEVFPIDKRAVRSPTDLAWACVLILEAVVPSLADPDPEIGAARPMVPQAARERARGMAREWKDAAEKKGGVEGAKPPDAHAFLQHVATFAVAEKEDKELYRRIVVSFSWRRQMPRLAITLGLEDEMDDIIEELITKGQQLDAVNFAYEAGLQ

SEQ ID NO: 6815 - protein, 369 aa, Oryza sativa
  unsure (1)..(369): unsure at all Xaa locations
  Clone ID: PAT_MRT4530_49446C.1.pep
SARACRRDRRAIISKEXEGTLLGMGNPLLDISAVVDEDFLKKYDITSNNAILAEDKHKPMYQELAEKYNVEYIAGGATQNSIKVAQWMLQVPGATSYMGGIGKDKFGEEMKKNSKLAGVNVHYYEDETTPTGTCAVCIVGGERSLVANLAAANCYKSDHLKRPENWALVEKAKYIYIAGFFLTVSPDSIQLVAEHSAANNKIFSMNLSAPFICEFFRDVQEKALPYTDFVFGNETEARTFSKVHGWETDNVEEIAVKISQWPKASGTHKRITVITQGADPICVAEDGKVKKFPVKLLPKEKLVDTNGAGDAFVGGFLSQLVQEKPIEECVRAGCYAAXCYHPKGLACTVPRRTPDFLLRCFSSVSCSPL

SEQ ID NO: 6816 - protein, 99 aa, Oryza sativa
  Clone ID: PAT_MRT4530_49943C.1.pep
RHEGSRGETKSVAGDSSTHNTVEGERKKSAAAKYPGDSQQHSLSFSRQDNKSYVPPFLSGSTNDSSSRTLSLVGSEASNGFSLGGKSGNTSAPAATSAA

SEQ ID NO: 6817 - protein, 351 aa, Oryza sativa
  Clone ID: PAT_MRT4530_49986C.1.pep
MARIHADPVLEADQFDRLPDSLVLVILNNVEDVRSLGRCSAVSKRFYGLVPLVHDVYVKIDRVVTVDGEAEDALNLSSPKPRNILSHFLKMMLFTIIKPFHSMRGPNGAGRPLFPQLAQHSPAQVLRNFTHIRNLRVELPSGDVGTEEGVLLKWRAEYGSTLQNCVILGGTQVDRKPVGAEHELYSEDNGSMPESFYTNGGLKLRVVWTISSLIAASTRHYLLRSIIKDHPTLTSLVLTDADGQGTLSMGAEQLKEFRENQLSASACSNRTQVPACNMKLKYAPYLELPGGIALQGATLVAIKPSPEGSNGGHTSRKETDAFVSGAFDGPFKFAVKALMKRRTYLLEMNGF

SEQ ID NO: 6818 - protein, 173 aa, Oryza sativa
  Clone ID: PAT_MRT4530_50367C.1.pep
MMRPPAARGERKRKVMASVDTHDHGNTELPDSNENADESLRSPENGERLASGSGCVDSNGDVEKKKMPLASCSSGSKKQKRRVEATSPAEHGEDAPSAPKLVENSSSSKKKGKKKPAAPEAVTDAVVVDEPAPVLPEVNVVVVEPEKPKKKYVPITPTIHTGFSFSIVHLLTA

SEQ ID NO: 6819 - protein, 527 aa, Oryza sativa
  Clone ID: PAT_MRT4530_50542C.1.pep
MICAISGEVPDEPVVSKKSGLLFERRLVERYIEDHGKCPVTKEELTMDDIVAVKTNKVVKPRQLQAASIPGLLGMFQNEWDAIMLSSFALEQQLHTARQELSHALYQHDAACRVIARLKKERDEARALLAQAERQIPASMAGAAPTAVVSNGKRAFEDEVGPDGKKIRPGINPVMIDELTECNTMLSAHRKKRQVPPTLASIDAIERYTQISSHPLHKTNKPGILSMDIHPSKDIIATGGIDTNAVLFDRPSGQILCTLTGHSKKITSLKFVPRDELFVTGSADKTVKIWQGSEEGNYNCIHTLKDHTAEVEAVTVHATQKYFVTASKDNTWCFYDIPSGSCLTQVGESSGQEGYTSASFHPDGLILGTGTTEAVVKIWDVKTQSNVAKFEGHVGPVTAMSFSENGYFLATAALDGVKLWDLRKLRNFRTISPYDSDTPTNSVEFDFSGSYLAVGGSDTRVYQVANVKLEWNLVKTLPDLSGTGKVTNVKFGTDAKYIAVGSMDRNLRIFGHPGEDDQMDDAKPSEE

SEQ ID NO: 6820 - protein, 110 aa, Oryza sativa
  unsure (1)..(110): unsure at all Xaa locations
  Clone ID: PAT_MRT4530_5060C.1.pep
MGMGEVAEDIYTXDGTVDLKGGPGTRMNTGTWHACRYILCNECCKRLGYYGMSTNLVIYMKTRVGQESAIVDNNVTNWSVTRYMTRLDSALLADAYMGRLWTIASSMSIY

SEQ ID NO: 6821 - protein, 260 aa, Oryza sativa
  Clone ID: PAT_MRT4530_50714C.1.pep
MSPAEASREENVYMAKLAEQAERYEEMVEFMEKVAKTTDVGELTVEERNLLSVAYKNVIGARRASWRIISSIEQKEESRGNEAYVASIKEYRSRIETELSKICDGILKLLDSHLVPSATAAESKVFYLKMKGDYHRYLAEFKSGAERKEAAENTLVAYKSAQDIALADLPTTHPIRLGLALNFSVFYYEILNSPDRACNLAKQAFDDAIAELDTLGEESYKDSTLIMQLLRDNLTLWTSDNAEDGGDEIKEAAKPEGEGH

SEQ ID NO: 6822 - protein, 394 aa, Oryza sativa
  Clone ID: PAT_MRT4530_50741C.1.pep
MDRPPPDQQRQKQAPLFSPYQMPRFRLNHRVVLAPMTRCRAIGGVPGPALAEYYAQRTTQGGLLISEGTVVSPAGPGFPHVPGIYNQEQTDAWKKVVDAVHAKGGIFFCQLWHVGRASHQVYQPNGAAPISSTDKPISARWRILMPDGSYGKYPKPRRLAASEIPEIVEQYRQAAINAIEAGFDGIEIHGAHGYIIDQFLKDGINDRTDEYGGSLSNRCRFLLEVTRAVVSAIGADRVAVRISPAIDHLDAYDSDPIKLGMAVVERLNALQQQSGRLAYLHVTQPRYTAYGQTESGQHGSAEEESRLMRTLRGTYQGTFMCSGGYTRELGLEAVESGDADLVSYGRLFISNPDLVERFRLNAGLNKYVRKTFYTPDPVVGYTDYPFLGQPKSRM

SEQ ID NO: 6823 - protein, 414 aa, Oryza sativa
  Clone ID: PAT_MRT4530_50815C.1.pep
MSQLFFHCCPRVRSFADSLSSPSLSSLARSSSAARAPATRRVGPADNRREGEAPSPWGAPMTSCGCLVLEKVEDHGGEAAGRGRGRLAQGGGGGGGGCGSCAGEWRSRSETMFPIYVMGSSRASSAAAARGIVDAAGDPIWEAVKSEAKSEAEKEPILSSFLYASVLSHDCLERALSFVLANRLEDPTLLATQLIDIFNDVMMNNKDIRRSIRLDAQAFKDRDPACAQYSWALLYLKGYHSVQSYRIAHVLWNQGRKVLALALQSRISEVFAVDIHPAARIGEGILLDHGTGLVIGETAIVGNWVSLMQGVTLGGTGKENGDRHPKIGQGALLGAGATILGNINVGEGAMIAAGSLVLKDVPPHSMAVGNPAKVVGYKDKEDPSLTMKHDARRDYFEHVAVSFSDDKANGSVVK

SEQ ID NO: 6824 - protein, 55 aa, Oryza sativa
  Clone ID: PAT_MRT4530_5101C.1.pep
PRVRHQAVAYTTYYVTEEEKEGVAKKLDEAKAWVKPWMVFKELHEFTPANACANA

SEQ ID NO: 6825 - protein, 86 aa, Oryza sativa
  Clone ID: PAT_MRT4530_51172C.1.pep
PVVSLGGEQQRIAIWSKNAATAAAQMSLCKQWQPFLDHTHSIAFLVHCHATVTQFDLSTPVQISNKVVYPHAGWVFCYAVVFVIRM

SEQ ID NO: 6826 - protein, 176 aa, Oryza sativa
  unsure (1)..(176): unsure at all Xaa locations
  Clone ID: PAT_MRT4530_513C.1.pep
SPGREHIAPPLLSRASVRRLVSVKNRRLPPSASAAALPNSGDDYSQGXQWKCKQFLWKDRKGIHLLNGIKASSLLEPSCWPXKLFISGLQHLNGVSVLPMLRTLLSLLKRYPILSKSLWLALESFGLATVWLSHRKTGIFSALMLQWLVQACISFLVKXRKDYFSDEKDAAASLEG

SEQ ID NO: 6827 - protein, 392 aa, Oryza sativa
  Clone ID: PAT_MRT4530_51503C.1.pep
METVAAASYTRGAATRSPACCAAMSFSQSYRPKAARPPSTFYGESLRVNTARSLPSGRQSKAASRAALSTRCEIGDSLEEFLTKATPDKNLIRLLICMGEAMRTISFKVRTASCGGTACVNSFGDEQLAVDMLADKLLFEALEYSHVCKYACSEEVPELQDMGGPVDGGFSVAFDPLDGSSIVDTNFTVGTIFGVWPGDKLTGVTGGDQVAAAMGIYGPRTTYIIALKDCPGTHEFLLLDEGKWQHVKDTTTIGEGKMFSPGNLRATFDNPEYDKLINYYVKEKYTLRYTGGMVPDVNQIIVKEKGIFTNVTSPTAKAKLRLLFEVAPLGFLIEKAGGYSSDGKQSVLDKVINNLDERTQVAYGSKNEIIRFEETLYGSSRLTAGATVGAAA

SEQ ID NO: 6828 - protein, 356 aa, Oryza sativa
  Clone ID: PAT_MRT4530_51616C.1.pep
MWRLKVAQGGGALLRSTNGFAGRAVWEFDPDHGTPEDRANVERVRRDFTDHRLRRPESADLLMRMQFARENNHQRRGDRIPPAVNKLGEKEQVTEETVMASLRRALDEFSSLQADDGHWPGDLSGAIFIMPVLIFSLYATGSLDTVISSEHRREICRYIYNHQNEDGGWGMLILGSSTMFATCLNYVTLRLIGEEPSNEQLARGHAWIISHGGATLVPQWGKICLSFIIRGKFWGPTRVVYVPMAYLYGKKFVGPITPTILALREEIYTDPYHTIDWAQACNACSKEDLVCPRTLLQNVVWTSLYKWVEPVLGSRPMNKLRERALDRLMEHIHYEDENSQYLCLCPVNKGKKWRQR

SEQ ID NO: 6829 - protein, 273 aa, Oryza sativa
  Clone ID: PAT_MRT4530_51694C.1.pep
MSPAADSAASKRQAELLKQEGNAFFKKDRISAAIDAYTGAIALCPKVAVYWTNRALCYKRRNEWVRAEEDCRTAIQLDSHSVKAHYMLGLALLNKDELAEGIKELEKSLELGRGAHPASYMVEEIWQELSKAKYIEWENLSSERVRQLHKLKEACKEALRNYNSLDNPPAYVPEEQLNELEEVFRNARKSDIPTEVPDHLCCKITLDIFRDPVITPSGITYERAVILDHLHRVGKFDPVTRETLEPHQLVPNLAIKEAVHAFLSEHGWAYRMR

SEQ ID NO: 6830 - protein, 259 aa, Oryza sativa
  Clone ID: PAT_MRT4530_51807C.1.pep
MVSPDTIRTAIGVVGNGTALVLFLSPVPTFIRIWKKGSVEQYSAVPYVATLLNCMMWVLYGLPAVHPHSMLVITINGTGMAIELTYIALFLAFSLGAVRRRVLLLLAAEVAFVAAVAALVLNLAHTHERRSMIVGILCVLFGTGMYAAPLSVMKMVIQTKSVEYMPLFLSLASLVNGICWTAYALIRFDLYITIPNGLGVMFAVAQLILYAIYYKSTQQIIEARKRKEADHVAMTDVVVDSAKNNPSSGAAAAAANGRY

SEQ ID NO: 6831 - protein, 346 aa, Oryza sativa
  Clone ID: PAT_MRT4530_51828C.1.pep
GHHDCSPGLSDNSMSKEDAMSTGDSTESLDIDCLDDGDSEVVSSLQHLADDKLHISDNRDVAGVASKWTKHGCNSVEIDYIVDIDNNHEDPQLCATLAFDIYKHLRVAEQTKKRPSTDFVETIQKNIDTSMRAVLIDWLVEVTEEYRLVPETLYLTVNYIDRKYEEICPPQVEELCYISDNTYTKDEVLKMEASVLKYLKFEMTAPTTKCFLRRFLRAAQVCHEAPVLHLEFLANYIAELSLLEYSLICYVPSLIAASSIFLAKFILKPTENPWNSTLSFYTQYKPSDLCNCAKGLHRLFLVGPGGNLRAVREKYSQHKYKFVPKKYSPPSIPSEFFEDPSSYKPD

SEQ ID NO: 6832 - protein, 506 aa, Oryza sativa
  unsure (1)..(506): unsure at all Xaa locations
  Clone ID: PAT_MRT4530_52012C.1.pep
MALNLAQSAAAAACFATAGDARRAASVVAMPSSSSSATTSLRMKRQAACEPVACRAVARHVAAAAASSRRNGVPVFVMMPLDTVSKCGSALNRRKAVAASLAALKSAGVEGIMVDVWWGIVESEGPGRYNFDGYVELMEMARKTGLKVQAVMSFHQCGGNVGDSVNIPLPRWVVEEMEKDNDLAYTDQWGRRNFEYISLGCDAMPVFKGRTPVECYTDFMRAFRDHFASFLGDTIVEIQVGMGPAGELRYPSYPESNGTWRFPGIGAFQCNDRYMRSSLKAAAEARGKPEWGHGGPTDAGGYNNWPEDTVFFRGDCGGWSTEYGEFFLSWYSQMLLEHGERVLSGATSVFGDGAGAKISVKVAGIHWHYGTRSHAPELTAGYYNTRHRDGYLPIARMLARHGAVLNFTCVEMRDHEQPQEAQCMPEALVRQVAAXAARAAGVGLAGENALPRYDGTAYEQVVAAAADRAAGDRMVAVTYSVMLPDRXEPQNQLRFRAFNYGGRGGD

SEQ ID NO: 6833 - protein, 461 aa, Oryza sativa
  Clone ID: PAT_MRT4530_52053C.1.pep
MAFFRGLTAVSRLRSRVAQEATTLGGVRWLQMQSASDLDLKSQLQELIPEQQDRLKKLKSEHGKVQLGNITVDMVLGGMRGMTGMLWETSLLDPDEGIRFRGLSIPECQKVLPTAVKDGEPLPEGLLWLLLTGKVPTKEQVDALSKELASRSSVPGHVYEAIDALPVTAHPMTQFTTGVMALQVESEFQKAYDKGMSKSKFWEPTYEDCLNLIARLPAVASNVYRRISRGMKANFSHMLGFDDPKTLVSLPVYSQWTTDHEGGNVSAHTGHLVGSALSDPYLSFAAALNGLAGPLHGLANQEVLLWIKSVIGETGSDVTTDQLREYVWKTLKSGKVVPGFGHGVLRKTDPRYTCQREFALKYLPEDPLFQLVSKLYEVVPPILTELGKVKNPWPNVDAHSGVLLNHFGLSEARYYTVLFGVSRSIGIGSQLIWDRALGLPLERPKSVTMEWLENHCKKVAA

SEQ ID NO: 6834 - protein, 167 aa, Oryza sativa
  Clone ID: PAT_MRT4530_52055C.1.pep
KVPTKEQVDALSKELASRSSVPGHVYEAIDALPVTAHPMTQFTTGVMALQVESEFQKAYDKGMSKSKFWEPTYEDCLNLIARLPAVASYVYRRIFKGGKTIAADNALDYAANFSHMLGFDDPKMLELMRLYITIHTDHEGGNVSAHTAHLVGSALSDPYLSFAAALN

SEQ ID NO: 6835 - protein, 471 aa, Oryza sativa
  Clone ID: PAT_MRT4530_52057C.1.pep
MAFFRGLTAVSRIRSRMAQEATTLGGVRWLQMQSPSDLDLKSQLQELIPEQQDRLKKLKSEHGKVQLGNITVDMVLGGMRGMIGMLWETSLLDPEEGIRFRGLSIPECQKVLPTAIKGGEPLPEGLLWLLLTGKVPTKEQVDALSKELVTRSSVPGHVYKAIDALPVTAHPMTQFTTGVMALQVESEFQKAYDKGMSKSKFWEPTYEDCLNLIARLPAVASYVYRRIFKGGKTIAADNALDYAANFSHMLGFDDPKMLELMRLYITIHTDHEGGNVSAHTGHLENPGVSVWPFNALGKVGSALSDPYLSFAAALNGLAGPLHGLANQEVLLWIKSVIGETGSDVTTDQLKEYVWKTLKSGKIVCHDTFIRRLFLALVMEFYVSKLYEVVPPILTELGKVKNPWPNVDAHSGVLLNHFGLSEARYYTVLFGVSRSIGIGSQLIWDRALGLPLERPKSVTMEWLENHCKKAAA

SEQ ID NO: 6836 - protein, 324 aa, Oryza sativa
  Clone ID: PAT_MRT4530_52242C.1.pep
MAFTVKASSPSSPAASSSSSSAPAKLGAAPGRVAVRKLTAAATSLRLDRAPAAPATERGLSSVSRTMSRLMEKGKTAFIPYITAGDPDMGTTAEALRLLDACGADVIELGVPFSDPYNDGPVIQASAARALSAGATMDGIMSMLAEVTPELSCPVVLFSYLGPIVRRGPANFTAAAKEAGVQGLIVPDLPYLEACSFRSEVIKNNLELVLLTTPTTPPDRMKAITAASGGFVYLVSVNGVTGSRQDVNPRVEHLLQEIKQVTDKAVCVGYGISTPDHVRQIAEWGADGVIIGSAMVRQLGEAASPKQGLKRLEKYARSLKNALP

SEQ ID NO: 6837 - protein, 391 aa, Oryza sativa
  unsure (1)..(391): unsure at all Xaa locations
  Clone ID: PAT_MRT4530_52965C.1.pep
MDPNDAFSAAHPFRWDLGPPAPAPVPPPPPPPPPPPPANVPRELEELVAGYGVRMSTVARISELGFTASTLLAMTERELDDMMAALAGLFRWDLLLGERFGLRAALRAERGRLMSLGGRHHGHQSGSTVDGASQEVLSDEHDMAGSGGMGDDDNGRRMVTGKKQAKKGSAARKGKKARRKKVDDLRLDMQEDEMDCCDEDGGGGSESTESSAGGGGGERQREHPFVVTEPGEVARAKKNGLDYLFHLYEQCRLFLLQVQSMAKLHGHKSPTKVTNQVFRYAKKVGASYINKPKMRHYVHCYAXLHCLHEEASDALPRPYQAXAAKNVGPWSQACYAPLVDISARHGFDIDAVFAAHPRLAIWYVPTRLRQLCHQARSSHAAAAAALPPPLF

SEQ ID NO: 6838 - protein, 103 aa, Oryza sativa; identical to SEQ ID NO: 3555
  Clone ID: PAT_MRT4530_53245C.1.pep

SEQ ID NO: 6839 - protein, 139 aa, Oryza sativa
  Clone ID: PAT_MRT4530_53246C.1.pep
HSYGRLGPSRPAGTSKIPKSSRSSSSSTSSSYASSAMSGRGKGGKGLGKGGAKRHRKVLRDNIQGITKPAIRRLARRGGVKRISGLIYEETRGVLKIFLENVIRDAVTYTEHARRKTVTAMDVVYALKRQGRTLYGFGG

SEQ ID NO: 6840 - protein, 276 aa, Oryza sativa
  Clone ID: PAT_MRT4530_53248C.1.pep
MPQVLPGGSLLYRSLVRVRLFPSVDFVKDFLSVRGKYPYARGEKNLSKAKRQVPTPIVPWPRRRPNLAAPAGQNFELAASQTTKIPTIPPNHRSAPHATSTIRSSPRDPDPHRPFPPPSNGSRLPTPSSRPLLKPPPLSSPNPTPITTTSSPIPLAFLSLSCVEPPESSSSAAMSGRGKGGKGLGKGGAKRHRKVLRDNIQGITKPAIRRLARRGGVKRISGLIYEETRGVLKIFLENVIRDAVTYTEHARRKTVTAMDVVYALKRQGRTLYGFGG

SEQ ID NO: 6841 - protein, 407 aa, Oryza sativa
  unsure (1)..(407): unsure at all Xaa locations
  Clone ID: PAT_MRT4530_53359C.1.pep
LRDATTVSECLHTFCRKCIYEKLNDEEVESCPVCKIDLGCTPVEKLRADHNLQDVRSKIFPFKRKKISADEVAAPVLLPSKRKERSISSLVVDTPTVTPTGLTGRRTRAVTRKAAALRGLGPGIDDPVKKEIDNGEKHAQNSSLPTNLGKVPQTRRQMSSNAEASNHSSNKDTEGDRKDLADKTDELWRPLNCLVEAANRTKSSRSSSQSPFVKREQLSDSPGSTSVNKTKSREYMQKSKIEDDKKDVPLLKRKNQRTGRRRELHAQSDSKPEAAATQNEKKFSSIWFSLVASFEQEGDPPLPQIPSHYLRIKDGNIPASSIQKYLMQKLGLPNEAEIMETFIELSQLHXVEINCCGQPVNPTQPLCNLVEVWLRGRSTQTTQTMIGSPAKEFVMVLTYGRPKAITP

SEQ ID NO: 6842 - protein, 813 aa, Oryza sativa
  Clone ID: PAT_MRT4530_53617C.1.pep
MACSFLCKPWLPLTESAKPARSPAPSSRARTVVQQLAVLLLLLGGVGGGGGALLAAAASTTDTILPGESITGNQTLVSKNGEFELGFFNPGVGIHYFLGVRLRKLAAYSPTFWIGDRVYVVDLPRAALELFGDSLYIKEDGASLWWSSPSSSSSSSGGGRGGGAAVAVLLDTGDLVVRDQRNSSLVLWRSFDYPGDALLPGGRLGLDVATGENVSLTFEGFTHNGSLRADASRRNGFVLTTDGRDTRGAFPDWMVTTQDNGGSLVLNHPDATNSTEFLQLKVGQVSLVRWSGADAGWVPRWTFPSGCKSGGGFFCGDFGVCTTATGGECRCVDGFAPSDTKEWGLGYFVTGCSRSLPLSCDANGQTEHGDSFAILDNLQGLPYNAQDEPATTDEDCREACLNKCYCVAYSTETGCKLWYYDLYNLSSADKPPYSKIYVRLGSKLKSKRGLATRWMVLLVVGSVAVASAMLAVLLLCRYRRDLFGSSKFVVEGSLVVYSYAQIKKATENFSDKLGEGGFGSVFRGTLPGSTTVVAVKNLKGLGYAEKQFRAEVQTVGMIRHTNLVRLLGFCVKGNRKLLVYEYMPNGSLDAHIFSQKSSPLSWQVRYQIAIGIARGLAYLHEECEHCIIHCDIKPENILLDEEFRPKIADFGMAKLLGREFNAALTTIRGTRGYLAPEWLYGQPITKKADVYSFGIVLFEMISGIRSTVTMKFGSHRYYPSYAAAQMHEGDVLCLLDSRLEGNANVEELDITCRVACWCIQDREGDRPSMGHVVRMLEGVVDTEMPPIPASFQNLVDGDDSDIYEENWRLRTQD

SEQ ID NO: 6843 - protein, 399 aa, Oryza sativa
  unsure (1)..(399): unsure at all Xaa locations
  Clone ID: PAT_MRT4530_53892C.1.pep
MMMTSGRPSGGAGGGRYPXFTAWQWQERERQALIYKYMASGTPIPSDLTLXPLRRSFLLDSALATSPSLAFPPQPSLGWGCFGMGFGRKAEDPEPGRCRRTDGKKWRCSKEAYPDSKYCEKHMHRGKNRSRKPVEMSLATPPPPSSSATSAASNTSAGVAPTTTTTSSPAPSYSRPAPHDAAPYQALYGGPYAAATARTPAAAAYHAQVSPFHLQLDTTHPHPPPSYYSMDHKEYAYGHATKEVHGEHAFFSDGTEREHHHAAAGHGQWQFKQLGMEPKQSTTPLFPGAGYGHTAASPYAIDLSKEDDDEKERRQQQQQQQQQHCFLLGADLRLEKPAGHDHAAAAQKPLRHFFDEWPHEKNSKGSWMGLEGETQLSMSIPMAANDLPITTTSRYHNDD

SEQ ID NO: 6844 - protein, 775 aa, Oryza sativa
  Clone ID: PAT_MRT4530_53979C.1.pep
MWHLGSGSCSFSSPLSPFVLTRRDRRGVKMSGAALVAIAASIGNLLQGWDNATIAGAVLYIKKEFKLESEPTVEGLIVAMSLIGATIITTFSGPVSDWIGRRPMLILSSILYFLSSLIMLWSPNVYVLLLARLIDGFGIGLAVTLVPLYISETAPSEIRGLLNTLPQFSGSGGMFLSYCMVFGMSLLPSPDWRIMLGVLAIPSLFFFGLTIFYLPESPRWLVSKGRMAEAKKVLQKLRGREDVSGEMALLVEGLEVGADTSIEEYIIGPAIEPADEHVVDGDKDQITLYGPEEGQSWIARPSKGPSILGSVLSLTSRHGSMVNQSVPLMDPIVTLFGSVHENMPHAGGSMRSTLFPNFGSMFSVTDQHPKVDQWDEENLHRDDEEYASDGAGGDYEDNVHSPLLSRQTTSAEGKDIAHHAHRGSALSMRRRSLLEEGGEAVSSTGIGGGWQLAWKWSEREGEDGKKEGGFKRIYLHQEEVPGSRRGSVISLPGGGDAPEGSEFIHAAALVSQPALYSKDIIEQRMSGPAMIHPSEAAAKGSSWKDLFEPGVRRALLVGVGIQILQQFAGINGVLYYTPQILEQAGVAVLLSNLGLSSASASILISSLTTLLMLPSIGLAMRLMDISGRRFLLLGTIPVLIASLVVLVVSNVIDLGTVAHAALSTISVIIYFCCFVMGFGPIPNILCAEIFPTRVRGICIAICALTFWIGDIIVTYSLPVMLNAIGLAGVFGIYAVVCSIAFVFVFLKVPETKGMPLEVITEFFAVGAKQMQATKA

SEQ ID NO: 6845 - protein, 398 aa, Oryza sativa
  Clone ID: PAT_MRT4530_54020C.1.pep
MDAGAQPPDTEMAEAGGGQQPPAAAAAAGAGAGAGMMENIQATLSHGGRFIQYNIFGNVFEVTAKYKPPILPIGKGAYGIVCSALNSETGEQVAIKKIANAFDNKIDAKRTLREIKLLRHMDHENIVAIRDIIPPPQRNSFNDVYIAYELMDTDLHQIIRSNQALSEEHCQYFLYQILRGLKYIHSANVLHRDLKPSNLLLNANCDLKICDFGLARTTSETDFMTEYVVTRWYRAPELLLNSSEYTAAIDVWSVGCIFMELMDRKPLFPGRDHVHQLRLLMELIGTPNEADLDFVNENARRYIRQLPRHARQSFPEKFPHVHPLAIDLVEKMLTFDPRQRITVEGALAHPYLASLHDISDEPVCSSPFSFDFEQHALSEEQMKDLIYQEGLAFNPDYQ

SEQ ID NO: 6846 - protein, 245 aa, Oryza sativa
  Clone ID: PAT_MRT4530_54118C.1.pep
MAAAGGRRRRRRRGLEASVRAVLQPPARLLVGFGAEAVRRRRVRAPTPIDFIPPPGTLVAGSRLSHPLAHPPPTTSVGFWGRLEMSDSEEHHFESKADAGASKTYPQQAGTIRKNGHIVIKNRPCKVVEVSTSKTGKHGHAKCHFVAIDIFNGKKLEDIVPSSHNCDVPHVNRTDYQLIDISEDGFVSLLTESGGTKDDLRLPSDEALLTQIKDGFAEGKDLIVTVMSAMGEEQICALKDIGPKN

SEQ ID NO: 6847 - protein, 659 aa, Oryza sativa
  Clone ID: PAT_MRT4530_54608C.1.pep
MLHLASISAQPNPWCKKQCGDVKIPYPFGIGTGCAIGEGFEIICNRNADGIDQPFTGNIEVLDISVVYGRSRVLGSITTNCYNSSTGSANVNSWWMDLSTSPYRFSDAYNTFVVIGCNTLAYIYNGLNRTSYTTACASVCGGPEDLTNGSCLGVGCCQNANAIPKGLTRQDIYLYTIYNTSESDSWKFNPCSYAALVETESFSFSTEYITTMRFNDTYEGQQPLVLDWAIGDVSCEVAKNMTSYACHSGNSICIGSVALVITIFFMRLMFERRKLTDVKKKYFQQHGGLILFDKMKSDQGLAFKVFTQAELEHATNKFEKSQILGHGGHGTVYKGITKDNITVAVKKCALIDDRHKKEFGKEMLILSQINHKNIVKLLGCCLEVDIPMLVYEFIPNGTLFDLIHGKNRTFHIPFSSLLRIVNEAAEGLAFLHSYANPPILHGDVKTSNILLDENYMAKVSDFGASILALSDEDQFVTMVQGTCGYLDPEYLQTCRLTDKSDVYSFGVVLLEVMTGQMPLKFEGPEIQKSLSSSFLLAMKENNLEAMLDSQIKDHESMELLSGLADIAKKCLDMCSDNRPSMKEVSEELSRLRKFSKHPWIQRDTEIESFLSGPSTSNLETEHSYLSGPSTSNFEIEHNTEYRRKDEEMPINPSTSYFIR

SEQ ID NO: 6848 - protein, 291 aa, Oryza sativa
  Clone ID: PAT_MRT4530_54679C.1.pep
MAAPVVDAEYLRQVDRARRHLRALISSKGCAPIMLRLAWHDAGTYDVNTKTGGANGSIRYEEEYTHGSNAGLKIAIDLLEPIKAKSPKITYADLYQLAGVVAVEVTGGPTVEFIPGRRDSSVCPREGRLPDAKKGALHLRDIFYRMGLSDKDIVALSGGHTLGRAHPERSGFEGAWTQEPLKFDNSYFLELLKGESEGLLKLPTDKALLEDPSFRRYVDLYARDEDTFFKDYAESHKKLSELGFTPRSSGPASTKSDLSTGAVLAQSAVGVAVAAAVVIVSYLYEASKKSK

SEQ ID NO: 6849 - protein, 267 aa, Oryza sativa
  Clone ID: PAT_MRT4530_54995C.1.pep
MDPKLVEVTQLFSRFKAAFARNDFDTCVDLLSQLKVRLTKFPSLPPSFQQTPNAVEELKIARDIYEHAVVLSVKIEDQDAFERDFCQLKPYYMDTCGIIPPSPQEYPILGLNLLRLLVQNRIAEFHTELELLPVTALENPCIKHAVELEQSFMEGAYNRVLSARQAVPHETYVYFMDLLAKTVRDELAGCSEKGYDYMSIAEARQVLMFSSDKELHQYIAEEHPEWEVKDGSVFFQKAKETQPCKEIPSLQVINQTLSYARELERIV

SEQ ID NO: 6850 - protein, 1367 aa, Oryza sativa
  Clone ID: PAT_MRT4530_55252C.1.pep
MYRVKSESDCEMIHQEQMDSPVADDGSSGGSPHRGGGPPLKKGPWTSAEDAILVDYVKKHGEGNWNAVQKNTGLFRCGKSCRLRWANHLRPNLKKGAFTAEEERLIIQLHSKMGNKWARMAAHLPGRTDNEIKNYWNTRIKRCQRAGLPIYPTSVCNQSSNEDQQCSSDFDCGENLSNDLLNANGLYLPDFTCDNFIANSEALPYAPHLSAVSISNLLGQSFASKSCSFMDQVNQTGMLKQSDGVLPGLSDTINGVISSVDQFSNDSEKLKQAVGFDYLHEANSTSKIIAPFGGALNGSHAFLNGNFSASRPTSGPLKMELPSLQDTESDPNSWLKYTVAPALQPTELVDPYLQSPAATPSVKSECASPRNSGLLEELIHEAQTLRSGKNQQTSVISSSSSVGTPCNTTVLSPEFDMCQEYWEEQHPGPFLNDCAPFSGNSFTESTPPVSAASPDIFQLSKVSPAQSTSMGSGEQVMGPKYEPGDTSPHPENFRPDALFSGNTADPSVFNNAIAMLLGNDLSIDCRPVLGDGIMFNSSSWSNMPHACEILQTCVTSGSDDARIGQVSGHTEIGVVILQQAESSSPDASMTDIAPILDEIDPLLGASSTHPDTIPKDDSDTDSHVSSQDHQTDDDSNDETDNNDAKENGEEKNKEQGKEAAFIWTADDEKNLMDLGYSEMERNRRLELLMARRRSRKNIRRSGNSGSAPSVLHTRKNPFDLPLDQSNDGDVSADNNEDHKDLDEKDLPNEHGSPALQRQDSDLADVGSECSDGINSVDVELDNSDIDDREIALQHFVFERSQEREAYLSSTKGKGPEDDYLLSSVGNSKTLHPVADLFSWEDGNGESSLGVNSSHNMSVEFSDWVSSPKPIAEHDSGPENLQEFLNTEVASSSKTIVLGARNPAENNGNVDSISYSNNEMPSDNLGHGSMEFPSEFCNESLPVISRDLHPIPEERVVENFNVQEKHEAEETAAGYPLDSDDDADKIYPEPMEDNVIDESFLSELDAVGDFRVEATRSDQQMPDVDSHIDNNTSNGVAESSLISPQISSNIFSNMKYASMLEHEENSPLVDDLNGTGPEFGWSLGASYDDPEQTVYNPRRRILGASRFEETNTEMKPLFDETEASFVNAPIEANLVVGPSKVDVANESELTKTDTNMIVLDANSLEDIETAFKQASNGVVESTVDNETPQEHTTAAMNSSFEENEDKHGCGDTVKFTMHDELPEGTHIEGNTVGDGKEPEPMGITSSMDVIDAKSIDDIYAALKKQSSAAANSSFEQNEGKNGCGDTVTFTTHDELPEGTHIEDRDNTVEDGKEPEPIGTTSSMDTIEVKTIDDIDAVFKKLSDGGTKSAAQAVDCENTCEASDESEQH

SEQ ID NO: 6851 - protein, 215 aa, Oryza sativa
  Clone ID: PAT_MRT4530_55374C.1.pep
MASQQERASYHAGETKARAEEKTGRMMGTAQEKAREAKDTASDAAGRAMGRGHGAKEATKEKAYETKDATKEKAYEAKDAASDATGRAMDKGRGAAGATRDKAYDAKDRAADTAQSAADRARDGAGQTGSYIGQTAEAAKQKAAGAAQYAKETAIAGKDKTGAVLQQAGEQVKSVAVGAKDAVMYTLGMSGDNKNNAAAGKDTSTYKPGTGSDYQ

SEQ ID NO: 6852 - protein, 299 aa, Oryza sativa
  unsure (1)..(299): unsure at all Xaa locations
  Clone ID: PAT_MRT4530_5542C.1.pep
GYIFFRESCFHQSGDSKRKVNPTHYREPRFYTKVFKECQALDQDGNSFELSVLTCKCVGAYVKSKKNQNQICWLWQKVDSTEDRGFQRFLDNVQYKASGILRYERIFGEGFVSTGGIETTKEFVDRLDLKPGQNVLDVGCGIGGGDFYMADKYDVHVVGIDLSINMVSFALERAIGRKCSVEFEVADCTKKTYPDNTFDVIYSRDTILHIQDKPSLFKSFFKWLKPGGKVLISDYCKCPGKPSEEFAAYIKQRGYDLHDVRAYGQMLENAGFHDVIGEDRTDQFLXVLERDLVKLKDQN

SEQ ID NO: 6853 - protein, 448 aa, Oryza sativa
  Clone ID: PAT_MRT4530_55761C.1.pep
MEVESPPRPAEEEGEGSPTRREIVLGRNVHTASFAVKEPDADDEETGEREAAMASVLALYRRNLVERTKHHLGYPYNLDFDYGALGQLQHFSINNLGDPFIESNYGVHSRQFEVGVLDWFARIWELEKNEYWGYITNCGTEGNLHGILVGREVFPDGILYASRESHYSVFKAARMYRMDCVKVDTLISGEIDCEDFQRKLLLNRDKPAIINVNIGTTVKGAVDDLDLVIKTLEEGGFKDRFYIHCDGALFGLMIPFVKKAPKVSFKKPIGSVSVSGHKFVGCPMPCGVQITRLEHINRLSSNVEYLASRDATIMGSRNGHAPIFLWYTLNRKGYRGFQKEVQKCLRNAHYLKDRLKEAGIGAMLNELSSTVVFERPKDEEFVRRWQLACEGNIAHVVVMPSVTIDKLDYFLNELTEKRATWYQDGSCQPPCLAKDVGEENCLCSIHKK

SEQ ID NO: 6854 - protein, 93 aa, Oryza sativa
  unsure (1)..(93): unsure at all Xaa locations
  Clone ID: PAT_MRT4530_56041C.1.pep
GGRHHHLFHHKKDDXPATGVYSYGGGVYTSETVTTEVVAGGHDEYXRYKKGEKHHMHKQHLGEGGSLAGWAFSLYEKHDANNDPENAHRHKIT

SEQ ID NO: 6855 - protein, 333 aa, Oryza sativa
  Clone ID: PAT_MRT4530_56399C.1.pep
MSKARVYTDVNVLRPKEYWDYEALTVQWGEQDDYEVVRKVGRGKYSEVFEGINVNNNEKCIIKILKPVKKKKIKREIKILQNLCGGPNIVKLLDIVRDQHSKTPSLIFEYVNNTDFKVLYPTLTDYDIRYYIYELLKALDYCHSQGIMHRDVKPHNVMIDHELRKLRLIDWGLAEFYHPGKEYNVRVASRYFKGPELLVDLQDYDYSLDMWSLGCMFAGMIFRKEPFFYGHDNHDQLVKIAKVLGTDSLNSYLNKYRIELDPQLEALVGRHSRKPWSKFINADNQHLVSPEAIDFLDKLLRYDHQDRLTAREAMAHPYFLQVRAAENSRPRAQ

SEQ ID NO: 6856 - protein, 68 aa, Oryza sativa
  unsure (1)..(68): unsure at all Xaa locations
  Clone ID: PAT_MRT4530_5639C.1.pep
LLILIRNKSXHYRXFGGGLKGVGGXXXXGFXQYFSSRFPKVVIKGCGGMSEHWKGEEAFSKYFLGSSA

SEQ ID NO: 6857 - protein, 428 aa, Oryza sativa
  Clone ID: PAT_MRT4530_56655C.1.pep
MSLKSIVRELREMRDGIGSMSRRAADGRAGGGRGGSRHSWPVLWSEQQQPPQQQQLQRQEHQQQQGRWANLPPELLLDVIQRVEASEATWPARRQVVACAAVCRSWREVTKEVVKTLEECGRITFPISLKQPGPREHPVQCFVRRDRATSTYLLYLGLSPSLHGENDKLLLAARKIRRATRTSFVISLVSNDFSLSSSTYVGKLKPNFLGTKFTIFDSQPPCDAVVLPNNRPSKRHFKQVSPRLPLGNYNVATVSYELTVLRNRGPRRMQCTMHSIPALCIQEGGKAPTPTGIIHSLDEQVPALSTSKGKEPAIEFSSTSLSADLSGPVCTNEVPLVLKNKAPRWHEQLQCWCLNFRGRVTVASVKNFQLVASVDPSLGIPAAEQEKVILQFGKIGKDIFTMDYRYPLSAFQAFAICLTSFDTKPACE

SEQ ID NO: 6858 - protein, 385 aa, Oryza sativa
  unsure (1)..(385): unsure at all Xaa locations
  Clone ID: PAT_MRT4530_56936C.1.pep
MEYGAATRGALLAATLLAGARRSRLPLSPPPSPPSIQIQNRLYSMSSLPLKARGVRRCEASLASDYTKASEVADFDWENLGFGIVQTDYMYITKCGQDGNFSEGEMIPFGPIALNPSSGENALRMRTGAERMCMPAPSVEQFVDAVKQTVLANKRWVPPTGKGSLYIRPLLMGSGAVLGLAPAPEYTFIIFVSPVGNYFKEGLAPINLIVEDKFHRATPDXIGSFRAYGFFSEKIKKKPMAQKIAKEKGYSDVLYLDAVHKKYLEEVSSCNIFVVKGNVISTPAVKGTILPGITRKSIIDVALSKGFQVEERLVSVDELLEADEVFCTGTAVVVSPVGSITYQGKRVEYAGNKGVGVVSQQLYTSLTSLQMGQAEDWLGWTVQLS

SEQ ID NO: 6859 - protein, 635 aa, Oryza sativa
  Clone ID: PAT_MRT4530_5736C.1.pep
MDGSCDCIEPLWQADDLLVKYQYISDFFIALAYFSIPLELIYFVKKSAFFPYRWVLIQFGAFIVLCGATHLINLWTFAIYTKTIAVVLTVAKAATAVVSCITALMLVHIIPDLLNVKLRERFLKDKADELDREMGIIRTQEETGRHVHMLTHEIRSTLDRHTILRTTLVELGRTLALAECALWMPTRSGSALQLSHTIYNSAAIGSVVPINLPIVSKVFNSNRVVKIPHTSPLASITADKSRYVPPEVVAIRVPLLHLTNFQINDWPELSAKSFAVMVLMLPPDSAREWRPHERELVEVVADQVAVALSHAAILEESMRARDLLMEQNIALDAARREAEMAICARNDFLAVMNHEMRTPMRAIVSLSSLLLETNLSAEQRLMVETILKSSDLLATLTNDVLDVSKLENGSLELEIAPFNLHSTFTDVVNLIKPVAACKRLSVMVTLAPELPLHAIGDQKRLMQIILNVAGNSIKFTKEGHVSITASMARPDALRGPHEPDYHPVVSDGFFYLAVQVKDTGCGISPQDMPHTFRKFAHPENAGKWNSGSGLGLALSRRFVSLMEGNIWLESEGVGKGCTAMFFVKLGMPEKPNANLRRMAPHPLQPNQGAGGPDALSISIMDSNPRVPRVRYQSSV

SEQ ID NO: 6860 - protein, 312 aa, Oryza sativa
  Clone ID: PAT_MRT4530_57465C.1.pep
AKLMIVLHSAIGGQDCPTRPFSFFDKNGKYVQALLTANTRSRMDGEAIGAFCFLQIASPELQQAFEIQRHHEKKCYARMKELAYIYQEIKNPLNGIRFTNSLLEMTDLKDDQRQFLETSTACEKQMSKIVKDASLQSIEDGSLVLEKGEFSLGSVMNAVVSQVMIQLRERDLQLIRDIPDEIKEASAYGDQYRIQQVLCDFLLSMVRFAPAENGWVEIQVRPNIKQNSDGTDTMLFLFRFACPGEGLPPEIVQDMFSNSRWTTQEGIGLSICRKILKLMGGEVQYIRESERSFFHIVLELPQPQQAASRGTS

SEQ ID NO: 6861 - protein, 261 aa, Oryza sativa
  Clone ID: PAT_MRT4530_57804C.1.pep
MCQNGHTLCSTCKARVHNRCPTCRQELGDIRCLALEKVAESLELPCKYCSLGCPEIFPYYSKIKHEAQCMFRPYNCPYAGSECAVVGDIPYLVAHLRDDHKVDMHSGCTFNHRYVKSNPREVENATWMLTKYWHIESLSGEEVFHCFGQYLCVHFEAFQLGMAPVYMAFLRFMGDENEARNYSYSLEVGANGRKMVWEGTPRSVRDSHRKVRDSHDGLIIQRNMALFFSGGDRKELKLRITGRIWKEQQTPDGACIPNLCS

SEQ ID NO: 6862 - protein, 622 aa, Oryza sativa
  Clone ID: PAT_MRT4530_57841C.1.pep
MKSMRLSYIPPAASAAPQSPSYGRKKNASAAPPSAAASTTVLTSPPVTTTRTPKQTGQEDEQLVAKTKTTRTVIATTNGRAAPSQSRPRRRPAPAAAASAASLPMTFCNALEEVINTFIDPPALRPAVDPRNVLTSNFVPVDELPPTPCPVVRGAIPRCLAGGAYIRNGPNPQHLPRGPHHLFDGDGMLHSLLLPSPASSGDDPVLCSRYVQTYKYLVERDAGAPVLPNVFSGFHGVAGMARGAVVAARVLTGQMNPLEGVGLANTSLAYFAGRLYALGESDLPYAVRVHPDTGEVTTHGRCDFGGRLVMGMTAHPKKDPVTGELFAFRYGPVPPFVTYFRFDPAGNKGADVPIFSVQQPSFLHDFAITERYAIFPEIQIVMKPMDMVVGGGSPVGSDPGKVPRLGVIPRYATDESEMRWFEVPGFNIMHSVNAWEEAGGEELVLVAPNVLSIEHALEHMELVHSCVEKVRINLRTGVVTRTPLAAGNFDFPVINPAFLGRRNRYGYFGVGDPAPKIGGVAKLDFDRAGEGDCTVAQRDFGPGCFAGEPFFVADDVEGNGNEDDGYLVCYVHDEATGENRFVVMDARSPDLEIVAEVQLPGRVPYGFHGLFVTQAELQSQHQ

SEQ ID NO: 6863 - protein, 492 aa, Oryza sativa
  Clone ID: PAT_MRT4530_5803C.1.pep
MDPYKHRPSSGSNSTFWTTNSGAPVWNNNSALTVGERGPILLEDYHLIEKLAQFDRERIPERVVHARGASAKGFFEVTHDISHLTCADFLRAPGVQTPVIVRFSTVVHERGSPETLRDPRGFAVKFYTREGNFDLVGNNMPVFFIRDGMKFPDMVHAFKPSPKTNMQENWRIVDFFSHHPESLHMFSFLFDDVGIPLNYRHMEGFGVNTYTLINKDGKPHLVKFHWKPTCGVKCLLDDEAVTVGGTCHSHATKDLTDSIAAGNYPEWKLYIQTIDPDHEDRFDFDPLDVTKTWPEDIIPLQPVGRMVLNKNIDNFFAENEQLAFCPAIIVPGIHYSDDKLLQTRIFSYADTQRHRLGPNYLMLPVNAPKCAYHNNHHDGSMNFMHRDEEVNYFPSRFDAARHAEKVPIPPRVLTGCREKCVIDKENNFQQAGERYRSFDPARQDRFLQRWVDALSDPRITHELRGIWISYWSQCDASLGQKLASRLNLKPNM

SEQ ID NO: 6864 - protein, 420 aa, Oryza sativa
  Clone ID: PAT_MRT4530_58916C.1.pep
MDRASENRRLAAVGKPVPGIGEMGNRRPLRDINNLVGAPPHPSAIAKKPMLEKSGKEEQKPALVVSHRPMTRNFAASLTRKEQLDHQVSVADAAVVCTDPQKNPIPDGTVDDDVESCESNDYIAVDECNDTDEDESMMDIDSADSGNPLAATEYVEELYKFYRENEEMSCVQPDYMSSQGDINEKMRAILIDWLIEVHHKFELMDETLFLTVNIVDRFLEKQVVPRKKLQLVGVTAMLLACKYEEVAVPVVEDLVLISDRAYTKGQILEMEKLILNTLQFNMSVPTPYVFMRRFLKAAQSDKQLQLLSFFILELSLVEYQMLKYRPSLLSAAAVYTAQCALTRCQQWTKTCELHSRYTGEQLLECSRMMVDFHQKAGAGKLTGVHRKYSTFKFGCAAKTEPALFLLESGAGGYNLQKQPC

SEQ ID NO: 6865 - protein, 1175 aa, Oryza sativa
  unsure (1)..(1175): unsure at all Xaa locations
  Clone ID: PAT_MRT4530_59607C.1.pep
MASGRPLLDASPRPTQQPPASSLLPPPQPEPPLRADRLAFSLEVPDPFRREPDPSSAASQRGEEEGGGEEESRAVVVGEPSSSEAAAGFAGNGVRTAKYSVLTFLPRNLFEQFRRLSYVYFLAITVLNQLPQVAVFGRGASVLPLAFVLFVTAVKDAYEDLRRHRSDRQENNRLARVLLAPPAAGEFAPKKWKHIRVGDVVRVASSETLPADMVLLATSDPSGVAHVQTVNLDGETNLKTRYAKQETQLRFSQDGGIGGVLHCERPNRNIYGFQANLEIDGKRVSLGPSNIVLRGCELKNTTWAIGVVVYAGKETKVMLNSSGAPSKRSRLETQLNRETVILSIMLIGMCTTASVLAGIWILNHRGDLEFTQFFREKDYTTGKNYNYYGMGMQIFITFLMAVIVYQVIIPISLYISMELVRLGQAYFMGADRDLYDESSRSKFQCRALNINEDLGQIKYVFSDKTGTLTENKMEFQCASIRGVDYCSGKDSCGYSVVVDDLLWTPKMAVKIDHRLLKLLRGGGTDEETKLVLEFFLALAACNTIVPLVLDTRDSKQKLIDYQGESPDEQALVYAAASYGIVLVERTSGYVVIDVLGDRQRFDILGLHEFDSDRKRMSVIVGCPDKTVKLYVKGADSSLFGITKNSLDLDIVRATEAHLHKYSSFGLRTLVIGMRELSQPEFEEWQLAYENASTSVLGRGNLLRSVAANIENNIRILGATGIEDKLQDGVPETIESLRQADIKVWILTGDKQETAISIGYSCKLLTNDMTQIVINNNSKESCKRSLEEAHATIKKLRIASTGTQSPELASESAGVTLALIVDGNSLVYILETELQEELFKVARECSVVLCCRVAPLQKAGIVALIKNRTDDMTLAIGDGANDVSMIQMADVGVGISGQEGRQAVMASDFAMGQFRFLVPLLLVHGHWNYQRMSYMILYNFYKNATFVLVLFWYVLYTAFTLTTAITEWSSLLYTVLYTSLPTIVVGILDKDLSKETLLAYPKLYGSGQRDEKYNVNLFVLNMLEALWQSLVVFYMPYFAYRQSTIDMSSLGDLWALAPVIVVNMLLAMDIFRWNWIVHAFVWGTIAATTICLFVIDSIWFLPGYGYPRKXMGTGLFWLLLLIIVVAAMVPHFVIKAFTEYFTPSDIQVAREIEKFENVNQVNRSEVPMTRLHDPRR

SEQ ID NO: 6866 - protein, 197 aa, Oryza sativa
  Clone ID: PAT_MRT4530_59646C.1.pep
MAATAMDHDGGEVVTPGELLGNSSLLAGLGAYADGRCVRASITGHRRLVPPPPGSTDQRSTVEVVGHKAHGAVPQPGSVVIARVTKVMARMASADIMCVDSKAVKEKFTGMIRQQDVRATEIDKVDMFQSYRPGDIVRALVLSLGDARAYYLSTAQNELGVVSAQSITGGTLVPISWTEMQCELTGQIEQRKVAKVE

SEQ ID NO: 6867 - protein, 500 aa, Oryza sativa
  Clone ID: PAT_MRT4530_59818C.1.pep
MAGSGRPPAAQKKILQSLRPPLPFAASSRSPFAAPNDYHRFPAGGAAAAAASGSGGIGAGGAGGGGDIEEGLVIRTPTRDADRYGKNLIHAVVGAKQKRKAPEESDVAESSDCMITSPGFAVSPMLTPVSGKAVKTSKSKTKNNKAGPQTPTSNVGSPLNPPTPVGTCRYDSSLGLLTKKFINLLKQAPDGILDLNNAAETLEVQKRRIYDITNVLEGIGLIEKTLKNRIRWKGLDDSGVELDNGLSALQAEVENLSLKEQALDERISDMREKLRGLTEDENNQRWLYVTEDDIKGLPCFQNETLIAIKAPHGTTLEVPDPDEAGDYLQRRYRIVLRSTMGPIDVYLVSQFDEKFEDLGGGATPSGHANVPKHQPTEVFNTTNAGVGQCSNSVAVDNNIQHSQTIPQDPSASHDFGGMTRIIPSDIDTDADYWLISEGDVSITDMWKTALLNMETADVQWDESLDTDVFLSEDVRTPSSHNQQPSAVGGPQMQVSDMHKP

SEQ ID NO: 6868 - protein, 406 aa, Oryza sativa
  Clone ID: PAT_MRT4530_59856C.1.pep
MSFRSVIQEVKGEIGAISRRGFRSRPGRVRRVAAAAEEPPDESSAAALVMRESCWTQLPPELLREVLARVEESEGWWPRRRDVVACAGVCRSWRGIVREIVRTPEASGNLTFPISLKQPGPRDAPMKCFIVRNRTTQTYYLYIGLTDALTDDGKFLLAARKCRRTTCTEYLISLDMNDISKRTDSYVGKLRSNFLGTKFTIYDAHPPYAGDVISKGQSARVIGSNHLSPRIPAGNYPVSHISYELNVLGSRGPRRMHCAMDSIPVSAIEQGGTAPTQTEFPLSYHESFTSIPFFKSKSVRANNSTASLLTQNGSKLVLKNKSPRWHEHLQCWCLNFHGRVTVASVKNFQLVASDESNPTNQEHDDVILQFGKVGKDMFTMDYRYPISAFQAFAICLSSFDTKIACE

SEQ ID NO: 6869 - protein, 425 aa, Oryza sativa
  Clone ID: PAT_MRT4530_59858C.1.pep
MSFRSVIQEVKGEIGAISRRGFRSRPGRVRRVAAAAEEPPDESSAAALVMRESCWTQLPPELLREVLARVEESEGWWPRRRDVVACAGVCRSWRGIVREIVRTPEASGNLTFPISLKQTGGQMAQLVLKADKMQLYSPGPRDAPMKCFIVRNRTTQTYYLYIGLTDALTDDGKFLLAARKCRRTTCTEYLISLDMNDISKRTDSYVGKLRSNFLGTKFTIYDAHPPYAGDVISKGQSARVIGSNHLSPRIPAGNYPVSHISYELNVLGSRGPRRMHCAMDSIPVSAIEQGGTAPTQTEFPLSYHESFTSIPFFKSKSVRANNSTASLLTQNGSKLVLKNKSPRWHEHLQCWCLNFHGRVTVASVKNFQLVASDESNPTNQEHDDVILQFGKVGKDMFTMDYRYPISAFQAFAICLSSFDTKIACE

SEQ ID NO: 6870 - protein, 1578 aa, Oryza sativa
  Clone ID: PAT_MRT4530_60150C.1.pep
MITLKSSDGEPVEVTEASARISKVIGDKIDAGRGGEAIPLPHVDKKTLKKVIEYCDEHANENSDTDEQKEELKNWDKAFIDELDEDDGSFLFLVLLASSYLKIDGLLDLTYQRVADNSKAKTTEEIRKTFSTIEIELSDKEEEEQQQEEEIRPENMKKKTATAMMIVTPRPTVTTVPVAGEEVAGGTTTTTPGLIKTGDAGIETTTIGMNGDETLGVAAANNVRLIKTTAVNAHAPRASATGEGTVTMAAGVITLVPPTWTTSPILSTPSHTWQRSLCLPASRSFTPRKSRRDQLLRLALVADKAMAAPPPTAMEDLAIRSSTGTEAWFSGTAWKPVPVARVFGRIREALPATPAVETPTTYQQIEEALMRLELAAAAARTPGDDTLLPQPMSPAPLAASPPRRLEDLASDAVADKILPAPLPGALLPQEMTHMPATPPLSALEPGSLPERASSPCAIAGLFTSPPPAIIASPLRSTLPCLRPVVLTRKVKLRPRQHSQAIRRSEHLAKQPARPMMERCQRILFRRLGILHDEEDASVERVLSQYMAMFDGPLPPHAIAALTAIFGLDDDDECAMDASLLPLVGEGITDVADELACRRWPACRLPSISMEPQLLEHMSMSHSLDFISWNVRGLNSPAHCNTVHEMMLDTKCNLACLQETKLQNIYDGLARFLGGYKLDSFAFKPATGTRGGILILWNSAVLVLQDIRIGRFSISAQVTVPLTGATFLMTGVYGPTRHRLKDGFLRHIRRLKPNAGEGWLLFGDFNMIYRARDKNNGNLNLARMRRFRATIDRCELREIPLQNRRFTWSNERQRPTLVKLDRCFCNENWDLAFHHHVLHALPTGPSDHCPLVLSNPAAPRKPRPFRFENFWTRIPGFKDMVKASWTQPSPHTEPMHRLNYKLQRTASCIKTWAKSLFTEVKIQFHMALDVIQRLDVAQEHRDLSGPELRLRAALKRKTLTLATIERARKRHASRLTHIREGEANIKFFHLRVNARRRKNSIQRPSKENGWAVTHDEKEMTILDHFAHLMGRPGPRPNELNWEALDIQPFDLSTLEEPFLEQEIHQAIKEMPVDKAPGPNGYTGIFFKICWDIVKEDVSLVFNSIFNLRYASLGLLNSANIVLIPKKEGAESVSDYRPINLIHSIAKIFSKLLALWLRPHMHSLVSINQSAFIKGRSIHDNFLFVRNMARRFHRTNRPMLLFKLDITKAFDSIRWDYLMALLQRLGFPVKWRDWLDDAAIFVNPTRGDVQALTEILQRFGTATGLVTNFQKSQVAAIKCNNIDLDDVLEGVPAAGTGDITGGKCKVNWTKTCLPIRQGGLEVLNLERFMRALRLRWLWHEWKDPNKPWVGLEIPCDEVDKSLFAASTKITIGDGNIARFWDTAWIDGRRPKDLMPLVYAISKKRKKNLRQGKENDAWVGDLALETNPVITVALVEQLVALWTAVCNVQLEEEESDQIAWKFTPHGHYSASSAYKAQYTRRIWNLVATWVGFHQLEPRRWGVAQSVKDWWEMLASVSGVPKKGLRTLILLIVWEVWKERNRRIFDHKEATTSYLLSKIKEEAGMWALAGAKRLGEIISQFV

SEQ ID NO: 6871 - protein, 527 aa, Oryza sativa
  Clone ID: PAT_MRT4530_60372C.1.pep
MHSTNLLLEEPIRMASILEPSKPSFFPAMTKIVGTLGPKSRSVDTISSCLKAGMSVARFDFSWGDAEYHQETLENLKVAIKSTKKLCAVMLDTVGPELQVVNKSEASISLEENGTVILTPDQGQEASSQVLPINFAGLAKAVKPGDTIFVGQYLFTGSETTSVWLEVSQIKGDDVVCVIKNTATLAGSLFTLHCSQIHIDLPTLSDEDKEVIRKWGAPNKIDFLSLSYTRHVEDVRQAREFLSKLGDLSQTQIFAKIENVEGLNNFDEILQEADGIILSRGNLGIDLPPEKVFLFQKSALHKCNMAGKPAVVTRVVDSMTDNLRPTRAEATDVANAVLDGSDAILLGAETLRGLYPVETISIVGKICAEAEKVFNQDLYFKRTVKHVGEPMTHLESIASSAVRAAIKVKASVIICFTSSGRAARLIAKYRPTMPVLSVVIPRLKTNQLRWSFTGAFEARQSLIVRGLFPMLADPRHPAESTNATNESVLKVALDHGKVSGVIKSHDRVVVCQKVGDSSVVKIIELDD

SEQ ID NO: 6872 - protein, 1013 aa, Oryza sativa
  Clone ID: PAT_MRT4530_60464C.1.pep
MGVGGGGGGGGGEAAAAVAVEGDEAGKGRRWWRVKVKLSTVAVVAWVLASAALWAGLHWRFRRAALHKAEEALVCMCEERARMLQDQFAVSVNHVHALAILVATFHYDKHPPALDQDTFAVYAARTSFERPLLSGVAYAQRVVHADRESFERQQGWIIKTMKHEPSPAQDEYAPVIYSQETISYIEGLDVMSGEEDRENILRARATGKAVLTRPFRLMSNHLGVVLTFPVYLVDLPNDTAVEDRVAATAGYLGGAFDVESLVENLLRQLAGNQELVVNVYDVTNHSNPLVMYGSEVPLGIPSPSHTYTLDFGDPLRKHQMVCRYRNKLHVSWSAITTPSGVFVICMLVGYIIYAAWSRYDNVKEDCRKMEALKKRAEAADIAKSQFLATVSHEIRTPMNGVLGMLDMLLDTELKSTQRDYAQTAQVCGKALISLINEVLDRAKIEAGKIDLESVPFDLRSILDDVISLFSSKSREKGIELAVYVSERVPEILLGDPGRFRQIITNLVGNSIKITIFTLSQFTERGHIFVQVHLADHSNLATEAKIEPVVNGMNGHKDEAIAIPTSGSHNTLSGFEAADSRNNWENFKLLLSYEKNEMPYESDSDKVTLVVSVEDTGIGIPLHAQGRVFTPFMQADSSTSRNYGGTGIGLSISKCLVEIMGGQINFVSRPLVGSTFTFTAVLRRCDKNAISDSKTVALHPLPSSFKGLSALLVDKRPVRATVTKYHLQRLGITSEVVGTIDPTFGVLSGRNGSSLTSIGKKQPCMLLIESDSWGPQMDVSLHARLQEMKQSDRIHVLPKVFLLSAAESDKVKKIHAVDSVIPKPLKASALAACLFQALGITQPSHEKRDDSGSLHGRDGSGSLHGLLLGKNILVVDDNKVNLRVAAGTLKKYGAKVECVESGKDALSLLQVPHKFDLCLMDIQMPEMDGFEATRQIRAMEGKANEQADDSESGSEIAAKTAKWHLPILAMTADVIQATHEECTKCGMDGYVSKPFEEKQLFQAVQKFLGPCVSS

SEQ ID NO: 6873 - protein, 667 aa, Oryza sativa
  Clone ID: PAT_MRT4530_60549C.1.pep
MIMSAELLLLFQRKFKDGIEVSEKFRDKRLQHDKENGSAEEYNLLQVYHCWSLKLNGFIGESRDAGANHHRLRVPPWRGTTTSGVTPWRPAPAAAATTIRSGDGDDDDARRKPAATGVLRATASLAAPAGLGQSRDLHRLHAISAHRAATSPRRWSQPAEAAASPHRRSQLAESRPPYRRPELARRVAASLPLGHCLSLPREPAHRVATSRPPVRRLSARPELADRITAGACPLGRRLSAPPELANRIATACDCDLWPLVAVAVTSSQPGARALNPAGAQQQWRARAGHPSQAAQGRSGERERRSTRGVPSAGGKIQANPMDDNSIQQSLLADNPNVLQRKPSEGVNRFRRCRSTPSTDPLQGPPEKGSSVKAKELFKEMRPSFRLVGLLLFIYLLVGVLAFYAVMDEISGKRTNRVLDALYFCVVTMTTVGYGDLVPNNDTTKLLACAFVFMGMAVVALFVSKVADYLVEKQEVLFFKALHTNLKGGETKMLRAIETNRIKYKFYTNALLLVLSIISGTVFLWKVEKLSLVDSFYCVCATITTLGYGDKSFSSKLGRVFAVFWIITSTIIMAQFFMYLAEIYTERRQKMLANWVLTRKMTKMDLEAADLDDDRQVGAAEFVVYKLKELGKINQEEISSFLEEFEKLDVDHSGTLSPYDLTLAQSAQ

SEQ ID NO: 6874 - protein, 574 aa, Oryza sativa
  Clone ID: PAT_MRT4530_6072C.1.pep
MAEVTVVRAEREEESTLEQGLLAIPEESNQLTYTGDGSVDFSGNPVVKERTGRWRACPFILGNECCERLAYYGISTNLVTYLTKKLHDGNASAASNVTAWQGTCYLTPLIGAILADAYWGRYWTIATFSTIYFIGMAVLTLSASVPTFMPPPCEGSFCPPANPLQYTVFFLGLYLIALGTGGIKPCVSSFGADQFDDTDPVERIQKGSFFNWFYFSINIGALISSSFLVWVQDNIGWGIGFGIPTIFMGLAIISFFSGTSLYRFQKPGGSPITRVCQVVVASFRKWNVHVPEDSSRLYELPDGASAIEGSRQLEHTDELRCLDKAATITDLDVKADSFTNPWRICTVTQVEELKILMSTMFVEQGMMLDTSVGPFKIPPASLSTFDVVSVIIWVPLYDSILVPIARRFTGNPRGFTELQRMGIGLVISIFSMAAAAVLEIKRLDIARAEHLVDQNVPVPLNICWQIPQYFLVGASEVFTFVGSLEFFYDQSPDAMRSLCSALQLVTTALGNYLSAFILTLVAYFTTRGGNPGWIPDNLNQGHLDYFFWLLAGLSFLNFVIYVICANKYKSKKAA

SEQ ID NO: 6875 - protein, 593 aa, Oryza sativa
  Clone ID: PAT_MRT4530_6073C.1.pep
MAEVTVVRAEREEESTLEQGLLAIPEESNQLTYTGDGSVDFSGNPVVKERTGRWRACPFILGNECCERLAYYGISTNLVTYLTKKLHDGNASAASNVTAWQGTCYLTPLIGAILADAYWGRYWTIATFSTIYFIGMAVLTLSASVPTFMPPPCEGSFCPPANPLQYTVFFLGLYLIALGTGGIKPCVSSFGADQFDDTDPVEGIRKGSFFNWFYFSINMGALISSSCLVWVQDNIGWGIGFGIPTIFMGLAIISFFSGTSLYRFQKPGGSPITRVCQVVVASFRKWNVHVPEDSSRLYELPDGASAIEGSRQLEHTDELRCLDKAATITDLDVKADSFTNPWRICTVTQVEELKILVRMFPVWATTIVFSAVYAQMSTMFVEQGMMLDTSVGPFKIPPASLSTFDVVSVIIWVPLYDSILVPIARRFTGNPRGFTELQRMGIGLVISIFSMAAAAVLEIKRLDIARAEHLVDQNVPVPLNICWQIPQYFLVGASEVFTFVGSLEFFYDQSPDAMRSLCSALQLVTTALGNYLSAFILTLVAYFTTRGGNPGWIPDNLNQGHLDYFFWLLAGLSFLNFVIYVICANKYKSKKAA

SEQ ID NO: 6876 - protein, 770 aa, Oryza sativa
  Clone ID: PAT_MRT4530_60906C.1.pep
MAAAAILPELAAQVVIPVAAAVGIAFAVLQWALVSKVKLTAEPRRGEAGGAAGGKSGPSDYLIEEEEGLNDHNVVSKCAEIQTAISEGATSFLFTEYKYVGLFMSIFAVLIFLFLGSVEGFSTKSQPCHYSKDKTCKPALANAIFSTIAFVLGAVTSLVSGFLGMKIATYANARTTLEARKGVGKAFITAFRSGAVMGFLLAASGLLVLYIAINLFGIYYGDDWEGLFEAITGYGLGGSSMALFGRVGGGIYTKAADVGADLVGKVERNIPEDDPRNPAVIADNVGDNVGDIAGMGSDLFGSYAESSCAALVVASISSFGINHEFTPMVYPLLVSSVGIIACLITTLFATDFFEIKAVSEIEPALKKQLIISTAFMTVGIALVSWLGLPYTFTIFNFGAQKTVQSWQLFLCVAVGLWAGLIIGFVTEYYTSNAYSPVQDVADSCRTGAATNVIFGLALGYKSVIIPIFAIAFSIFLSFSLAAMYGVAVAALGMLSTIATGLAIDAYGPISDNAGGIAEMAGMSHRIRERTDALDAAGNTTAAIGKGFAIGSAALVSLALFGAFVSRAAISTVDVLTPKVFIGLIVGAMLPYWFSAMTMKSVGSAALKMVEEVRRQFNTIPGLMEGTTKPDYATCVKISTDASIKEMIPPGALVMLTPLIVGILFGVETLSGVLAGALVSGVQIAISASNTGGAWDNAKKYIEAGASEHARTLGPKGSDPHKAAVIGDTIGDPLKDTSGPSLNILIKLMAVESLVFAPFFATHGGILFKLF

SEQ ID NO: 6877 - protein, 236 aa, Oryza sativa
  unsure (1)..(236): unsure at all Xaa locations
  Clone ID: PAT_MRT4530_60938C.1.pep
FVLFNATQNFDGANFSSGEILXFIGNFLYLFATSTFLGVAAGLLSAYIIKKLYFSRHSTDREVSIMMLMAYLSYMLAELLDFKGILTVFFCGIVMSHYTWHNVTESSRVTTKHAFATLSFIAETFLFLYVGMDALDMEKWKIVGETFSPMKSIALSSTILFLVLVARAAFVFPLSFLANLTKKTEEGKISIKQQVIIWWAGLMRGAVSIALAYNKFTRSGHTQLPSNAIMITSTIT

SEQ ID NO: 6878 - protein, 1080 aa, Oryza sativa
  Clone ID: PAT_MRT4530_60954C.1.pep
MANSKRLPYSTAGGGGGGRRGVVAPLVVVVFLFVLAPSIFFVACNGGHVGSGSGGGGDWGVMCSGLISDVVVCLPADPMDMEGTQETEWQKQLPTNNLKSILSKEMFDALASSQQEAGALSVDFFIKRASPSWKTDDLVNDLSNASLDIDDKVCKKINFLSVQMNIKSTRLQKMFEGIWRKENENENSDLTVRLMRDQIIMARVYSVLAKSKNKNDLYQELQTRIKESQRAVGEATADSDLHHSAPEKVRVMGQLLSKAREDVYDCKAVTQRLRAMLQSADEQVRSLKKQSTFLSQLAAKTIPNSIHCLSMRLTIDYYLLPLEKRKFPRSENLENPELYHYALFSDNVLAASVVNSTIMNAKEPEKHVFHLVTDKLNFGAMNMWFLLNPPGKATIHVENVDEFKWLNSSYCPVLRQLESAAMKEYYFKADRPTTLSAGSSNLKYRNPKYLSMLNHLRFYLPQVYPKLDKIFFLDDDIVVQKDLTGLWDVDLNGKVTGAVETCGESFHRFDKYLNFSNPHIARNFDPNACGWAYGMNIFDLNEWKKKDITGIYHRWQNMNEDRVLWKLGTLPHGLLTFFKLTHPLDKSWHVLGLGYNPSIDRSEIDNAAVVDYNGNMKPWLELAMTKYDQVQTILDKFVGLTVCIILIFGQLTEKIMTGKLTDFTSAYAYKCRLFFIRILSAWPAGSIDCCEEMINRCFCCVTGGDSDPEPAATSSRRRTNPARASKNRTSVDYPWETYTLKELLQATGNFSESNKLGEGGFGTVYWGRTSKGVEIAVKRLKAMTAKAEMEFAVEVEILGRVRHRNLLSLRGFYAGGDERLIVYDYMPNHSLLTHLHPHRGTPSSHHHVPLEWPRRVAIAVGAAEGLSYLHHEASPHIIHRDIKASNVLLDAEFVPKVADFGFAKLIPDGVSHLTTRVKGTLGYLAPEYAMWGKVSESCDVYSFGVLLLELVSARRPLEKLPGGVKREIVQWAAPLVERRRWERLADPRLAGRFDAAQLRAVVETAMLCTQSSAESRPAMAEVVDMLRFSGGERRTKEIVPVAATVAGSSDEITMTTDQDDVTAGSSEPLDRRNWKLTRLR

SEQ ID NO: 6879 - protein, 250 aa, Oryza sativa
  Clone ID: PAT_MRT4530_61243C.1.pep
MRVAATTRPASSSAAAPLPLFLLLAVAAAAAALFLVGSASLAMAGHVLGGAHDAPSAANSVETDALARFAVDEHNKRENALLEFVRVVEAKEQVVAGTLHHLTLEALEAGRKKVYEAKVWVKPWLDFKELQEFRNTGDATTFTNADLGAKKGGHEPGWRDVPVHDPVVKDAADHAVKSIQQRSNSLFPYELLEIVRAKAEVVEDFAKFDILMKLKRGNKEEKFKAEVHKNLEGAFVLNQMQQEHDESSSQ

SEQ ID NO: 6880 - protein, 226 aa, Oryza sativa
  Clone ID: PAT_MRT4530_61245C.1.pep
MAGHVLGGAHDAPSAANSVETDALARFAVDEHNKRENALLEFVRVVEAKEQVVAGTLHHLTLEALEAGRKKVYEAKVWVKPWLDFKELQEFRNTGDATTFTNADLGAKKVTHSCLVEFVICALLNLKGGHEPGWRDVPVHDPVVKDAADHAVKSIQQRSNSLFPYELLEIVRAKAEVVEDFAKFDILMKLKRGNKEEKFKAEVHKNLEGAFVLNQMQQEHDESSSQ

SEQ ID NO: 6881 - protein, 459 aa, Oryza sativa
  Clone ID: PAT_MRT4530_61496C.1.pep
MDVYLPRTQGDVDDDGKERRTGTVWTATAHIITAVIGSGVLSLAWAMAQLGWVAGPITLLLFAAITFYTCGLLSDCYRVGDPATGKRNYTYTDAVKSYLGGWHVWFCGFCQYVNMFGTGIGYTITASISAAAINKSNCYHWRGHGTDCSQNTSAYIIGFGVLQALFCQLPNFHQLWWLSIIAAVMSFSYAAIAVGLSLAQTIMDPLGRTTLTGTVVGVDVDATQKVWLTFQALGNVAFAYSYAIILIEIQDTLRSPPPENATMRRATAAGISTTTGFYLLCGCLGYSAFGNAAPGNILTGFGFYEPYWLVDVANACIVVHLVGGFQVFCQPLFAAVEGGVARRCPGLLGGGAGRASGVNVFRLVWRTAFVAVITLLAILMPFFNSILGILGSIAFWPLTVFFPVEMYIRQRQLPRFSAKWVALQSLSLVCFLVTVAACAASIQGVLDSLKTYVPFKTRS

SEQ ID NO: 6882 - protein, 192 aa, Oryza sativa
  Clone ID: PAT_MRT4530_61692C.1.pep
MANSRASRFKMSNLSEPSKEAASADDSSAVQKTGAWSNTLNILLQQASVYGVAAGYCLSASLLSIINKWAVMKFPYPGALTALQYFTSVVGVLLCGQLKLIEHDGLNLRTMWKFLPAAVMFYISIFTNNELLLHANVDTFIVFRSAVPIFVAIGETLYLHQPWPSLKTWLSLSTILGGSVIYVFTDNQVTVT

SEQ ID NO: 6883 - protein, 353 aa, Oryza sativa
  Clone ID: PAT_MRT4530_62143C.1.pep
VYRGPRYHAAAAFILGFWLLDFSNNTVQGPARALMADLSGRHGPSAANAIFCSWMALGNILGYSSGSTNDWHKSVFLGLSTAVTMVFAREVALDPVAAAKRNEGEASGLLAVFKGMKNLPVGMPSVLIVTGLTWLSWFPFILFDTDWMGREIYHGRPDGSPAEVTAFQEGVRQGAFGLLLNSIVLGISSFLIEPMCRRLGARAVWVMSSAVVCVAMAAVSVLSAWSLGDFGGSVQDAARAPAEEGGVRASALALFVFLGLPFAVLCSVPFAVTAQLAASRGGGQGLCTGVLNISIVVPQMAIALGAGPWDELFGEGNIPAFAMASVFAAAAAAAGVVLLPKVSVRSVSMAGGH

SEQ ID NO: 6884 - protein, 506 aa, Oryza sativa
  Clone ID: PAT_MRT4530_62144C.1.pep
MAVDMELDGGGDGKGKAPPQISLSGLFLACMVAGGVQYGWALQLSLLTPYVQTLGIPHALTSVMWLCGPIAGLIVQPCVGLYSDKCTSSLGRRRPFILTGCIIICISVIVIGFSSDIGYALGDTTEDCKVYRGPRYHAAAAFILGFWLLDFSNNTVQGPARALMADLSGRHGPSAANAIFCSWMALGNILGYSSGSTNDWHKWFPFLMTRACCEACANLKAAFLVAVVFLGLSTAVTMVFAREVALDPVAAAKRNEGEASGLLAVFKGMKNLPVGMPSVLIVTGLTWLSWFPFILFDTDWMGREIYHGRPDGSPAEVTAFQEGVRQGAFGLLLNSIVLGISSFLIEPMCRRLGARAVWVMSSAVVCVAMAAVSVLSAWSLGDFGGSVQDAARAPAEEGGVRASALALFVFLGLPFAVLCSVPFAVTAQLAASRGGGQGLCTGVLNISIVVPQMAIALGAGPWDELFGEGNIPAFAMASVFAAAAAAAGVVLLPKVSVRSVSMAGGH

SEQ ID NO: 6885 - protein, 1020 aa, Oryza sativa
  Clone ID: PAT_MRT4530_62177C.1.pep
MRGGEEEERRLGEEEEVVEKSWKALWKINAPGKMKINLWRAVQDCLPTGFQLRRRHIDSNDGYVFWKQGTMQEMGLAPCILGAWLRSERVNNIVLPEMAEALAIRRALVLATEEGFQQVLVASDCIFPGAAVSSLFSHHGAIASTPVRLPPQRGCRIQPAVPRPPSHRDSRGAIGLAAAAAGHPGCQTRCGDVDIPFPFGIGDHCAIHEGFRLECDNATKGTSNQKPFWGDFEVIKISMEDGKVWVKAYMSRQCYDQSTGGMSYSDASANLSGSSFWLSDTDNKITVIGCKTLAYMTTDSANVPKSIQYYQGYFNEGYNTTKIWMSSPCSYMAVMETAAFNFSTSYLTSSVFYDTYKGGVPVVYDWAITSKTCTESRRNKTSYACISNNSQCIDNLTNAQGYRCKCSNGYEGNPYIKDGCKDIDECLNNATYPCKGICTNTLGNFTCSCSPGSYMMNGDCASIISVVLEATNRFNEQQILGQGGHGTVYKGLLKGNMEVAVKRCMTINEHQKKEFGKEMLILSQINHKNIVKLLGCCLEVEVPMLVYEFIPNGTLFDLIHGNHGQQISLATRLQIAHESAEALTYLHSCASPPILHGDIKSSNILLDRNLIAKVSDFGASILAPTDESQFVTLVQGTCGYLDPEYMQLCQLTDKSDVYSFGVVLVELLTCQKAFNLNAPEHEKSLSMRFLNAMKNNKLADILDDQIKNSENMPFLEEIAELAAQCLEMSGVNRPSMKHIADNLDRLRKVMQHPWAEQNSEELESLLGESSMVSSRLSVATFQFQLFQGFSPVLQAGFSVVKGYHEGFPCTHHRFLRLLRHRRALGFVLQDVLAPLLEVAALRSGPFIWPAPDTVAFLTPGDGADRGGGGAKGGGERFMGFRSDGDRKAMRAAGREAEVVDGGTGDDVDFKLHTCCHHRSLVHTGMTLVVCEKSWHGRGRVRGWGRKQSLPFHLFLTGQRSTGPSGPPGWDGADSRDVGKRKGPAATLHRNRCSSSVPHYHLVKLRSSSIAGLSTSGAPRG

SEQ ID NO: 6886 - protein, 122 aa, Oryza sativa
  Clone ID: PAT_MRT4530_62336C.1.pep
MAGVWVFKDGIVRRVENPGSEESSSAGDGGGGGRRKVLVHVPSGEVVASYEVLERRLRELGWERYLTDPCLLQFHQRSTVHLISVPRDFSKFKLVHMYDIVVKTRNVFEVRDAAAPAVSPAT

SEQ ID NO: 6887 - protein, 264 aa, Oryza sativa
  Clone ID: PAT_MRT4530_62420C.1.pep
MAAAAGGGTREEMVYMAKLAEQAERYEEMVEFMEKVVTAAAAGGGGELTVEERNLLSVAYKNVIGARRASWRIVSSIEQKEEGRGAAGHAAAARSYRARVEAELSNICAGILRLLDERLVPAAAAVDAKVFYLKMKGDYHRYLAEFKTGAERKDAADATLAAYQAAQDIAMKELSPTHPIRLGLALNFSVFYYEILNSPDRACTLAKQAFDEAISELDTLGEESYKDSTLIMQLLRDNLTLWTSDMQDDGGDEMRDATKPEDEH

SEQ ID NO: 6888 - protein, 370 aa, Oryza sativa
  unsure (1)..(370): unsure at all Xaa locations
  Clone ID: PAT_MRT4530_62783C.1.pep
MEQEAAMVVFSCNSGSGGSSSTTDSKQEEEEEEELAAMEEDELIHVVQAAELRLPSSTTATRPSSRYKGVVPQPNGRWGAQIYERHARVWLGTFPDEEAAARAYDVAALRFRGRDAVTNRAPAAEGASAGELAFLAAHSKAEVVDMLRKHTYDDELQQGLRRGSRAQPTPRWAREPLFEKAVTPSDVGKLNRLVVPKQQAERHFPFPLRRHSSDAAGKGVLLNFEDGDGKVWRFRYSYWNSSQSYVLTKGWSRFVREKGLRPGDTVAFSGSGXYGPDKLLFIDCKKNKHGGRPPATRSQITSRRSNTASVRLFRHGHHRRRRQIARKRERQVEMGQEAVLDEEAMQWFISSTPALGAPAVITSNQFIYTS

SEQ ID NO: 6889 - protein, 52 aa, Oryza sativa
  unsure (1)..(52): unsure at all Xaa locations
  Clone ID: PAT_MRT4530_62821C.1.pep
TITINTXKKGDRKTGSATKQFKRLPHPQPVLAPQTPTCFATSSLNAKLHNHL

SEQ ID NO: 6890 - protein, 750 aa, Oryza sativa
  Clone ID: PAT_MRT4530_63568C.1.pep
MGVCGMNTQNIKDFTFFQRHLLETPSFKSYIIKGFGFSTPRFLEIRFLRGLFGSARQWLYSRSAAVVLVQIYLVDPVGVAAAQPLLALPNTAIIKDFVGFCHIATTSSSPKTGQGHEPTTCFRPVLLAPSPLCLTRGPHTITHQIEAPQADHVEDSVSSPKYVKPAVAKQNGEVVSRATKSDAPVSKPKVDPSVPASKAEADGNAQAVESKAALDKKEDVGVAEPLEAKADAGGDAGAVSSADDSENKESGPLAGPNVMNVIVVASECSPFCKTGGLGDVVGALPKALARRGHRVMVVIPRYGEYAEAKDLGVRKRYRVAGQDSEVSYFHAFIDGVDFVFLEAPPFRHRHNDIYGGERFDVLKRMILFCKAAVEVPWFAPCGGSIYGDGNLVFIANDWHTALLPVYLKAYYRDNGMMQYTRSVLVIHNIAYQGRGPVDEFPYMELPEHYLDHFKLYDPVGGEHANIFGAGLKMADRVVTVSPGYLWELKTTEGGWGLHDIIRENDWKMNGIVNGIDLGEWNPEVDVHLQSDGYANYTVASLDSSKTRCKEALQRQLGLEVRDDVPLIGFIGRLDHQKGVDIIGDAMPWIAGQDVQVVMLGTGRPDLEEMLRRFESEHNDKVRGWVGFSVQLAHRITAGADVLLMPSRFEPCGLNQLYAMAYGTVPVVHAVGGLRDTVSAFDPFEDTGLGWTFDRAEPHKLIEALGHCLETYRKYKESWRGLQVRGMSQDLSWDHAAELYEEVLVKAKYQW

SEQ ID NO: 6891 - protein, 694 aa, Oryza sativa
  Clone ID: PAT_MRT4530_63570C.1.pep
MSGAIASSPAATLFLAGSSSSSPRRRRSRVSGVWWHLYGGTGLRLHWERRGLVRDGAVVCSASAAGGEDGVAKAKTKSAGSSKAVAVQGSTAKADHVEDSVSSPKYVKPAVAKQNGEVVSRATKSDAPVSKPKVDPSVPASKAEADGNAQAVESKAALDKKEDVGVAEPLEAKADAGGDAGAVSSADDSENKESGPLAGPNVMNVIVVASECSPFCKTGGLGDVVGALPKALARRGHRVMVVIPRYGEYAEAKDLGVRKRYRVAGQDSEVSYFHAFIDGVDFVFLEAPPFRHRHNDIYGGERFDVLKRMILFCKAAVEVPWFAPCGGSIYGDGNLVFIANDWHTALLPVCLKAYYRDNGLMQYTRSVLVIHNIAHQGRGPVDDFATMDLPEHYIDHFRLYDPVGGEHSNVFAAGLKMADRAVTVSHGYLWEIKTMDGGWGLHEIINHNDWKLQGIVNGIDMAEWNPEVDEHLQSDGYANYTFETLDTGKKQCKEALQRQLGLQVRDDVPLIGFIGRLDHQKGVDIIGDAMPWIAGQDVQVVMLGTGRPDLEEMLRRFESEHNDKVRGWVGFSVQLAHRITAGADVLLMPSRFEPCGLNQLYAMAYGTVPVVHAVGGLRDTVAPFDPFADTGLGWTFDRAEANRMIDALGHCLNTYRNYKESWRGLQARGMAQDLSWDHAAELYEDVLVKAKYQW

SEQ ID NO: 6892 - protein, 497 aa, Oryza sativa
  unsure (1)..(497): unsure at all Xaa locations
  Clone ID: PAT_MRT4530_63782C.1.pep
MDVEKVERKEVAVDDDGRVRTAALIWQSLQCTASLLMFMLNQPGVPRDQEGKNVTRTVWTATTHAITAVIGSGVLALPWSVAQMGWVLGPIALVVCAYITYYTAVLLCDCYRTPDPVHGKRNYTYMDVVRSCLXYAILWGAMVGYTITTATSIMIWAVRMXSVVRTNCHHYKXGPDATCGSSGTMYMVLFGLAEVVLSQCPSLEGVTLISVVAAVMSFTYSFVGLFLSAAKVASHGAAHGTLLGVRVGAGGVTASTKAWHFLQALGNIAFAYTYSMLLIEIQDTVKSPPSENVTMKRASLYGIGVTTVFYVSIGCVGYAAFGNAAPGNVLTGFLEPFWLVDIANVAVVIHLVGAYQVYAQPVFACYEKWLASRWPESAFFHREYAVPLGGGRAVRFTLCKLVLRTAFVAVTTVVSLVLPFFNAVLGLLGAVAFWPLTVYFPVTMYMAQAKVQRGSRKWVALQALNVGALVVSLLAAVGSVADMAQRLRHVTIFQTQL

SEQ ID NO: 6893 - protein, 329 aa, Oryza sativa
  Clone ID: PAT_MRT4530_63823C.1.pep
MDPSAPSGSSADASASSSSSAVEDLAPGMAAMSLQDRFELLRGIGEECIQEDELMNLLQKKPVPICYDGFEPSGRMHIAQGIVKTINVNKMVRAGCKVKIWIADWFAQLNNKMGGDLKKIQTVGRYMIEIWRAAGMNLDGVEFLWSSEEINNRANEYWPLVMDIACKNNVKRIMRCCQIMGRNDSDELTAAQIFYPCMQCADIFFLKADICQLGMDQRKAQVNLKIKQAFCPPNVVDGNPCLEYIKYIVFPWFEMFEVVRKEANGGNKTFTNMDELIDDYKTGALHPADVKPALAKAINQILQPIRDHFNNNSEAKILLNTVKKYRVTN

SEQ ID NO: 6894 - protein, 295 aa, Oryza sativa
  Clone ID: PAT_MRT4530_63826C.1.pep
DAWVWLPSSFKGIVKTINVNKMVRAGCKVKIWIADWFAQLNNKMGGDLKKIQTVGRYMIEPTRPAGMNLDGVEFLWSSEEINNRANEYWPLVMDIACKNNVKRIMRCCQIMGRNDSDELTAAQIFYPCMQCADIFFLKADICQLGMDQRKVNVLAREYCTDIKRKNKPIILSHHMLPGFKEGQEKMSKSDPSSAIFMEDDEAQVNLKIKQAFCPPNVVDGNPCLEYIKYIVFPWFEMFEVVRKEANGGNKTFTNMDELIDDYKTGALHPADVKPALAKAINQILQPIRDHFNNNS

SEQ ID NO: 6895 - protein, 133 aa, Oryza sativa
  unsure (1)..(133): unsure at all Xaa locations
  Clone ID: PAT_MRT4530_6392C.1.pep
EPQFAFSVIVKQVLGLSPEEPVTAMILEDFLAFMKGLISFPLYIPGTPYAKAXITSSFSRISSTVKGIIEERRNAGSSNKGDFLDVLLSSNELSDEEKVSFVLDSLLGGYETTSLLISMVVYFLGQSAQDLEL

SEQ ID NO: 6896 - protein, 288 aa, Oryza sativa
  Clone ID: PAT_MRT4530_64041C.1.pep
MAKDIEASAPEGGEFSAKDYTDPPPAPLIDVEELTKWSLYRAVIAEFIATLLFLYITVATVIGYKHQSDATVNTTDAACSGVGILGIAWAFGGMIFILVYCTAGISGGHINPAVTFGLFLARKVSLIRAVLYIIAQCLGAICGVGLVKGFQSSYYARYGGGANELSDGYSKGTGLGAEIIGTFVLVYTVFSATDPKRNARDSHIPVLAPLPIGFAVFMVHLATIPITGTGINPARSLGAAVIYNKDKAWDDQWIFWVGPLIGAAIAAAYHQYVLRASAAKLGSYRSNA

SEQ ID NO: 6897 - protein, 1048 aa, Oryza sativa
  unsure (1)..(1048): unsure at all Xaa locations
  Clone ID: PAT_MRT4530_64237C.1.pep
MGRHQRSGSLSVTSSATPSSDATELDFAAAADVGCPFGRVDALGPVELRETAYEIFFMSCRSSSGGNTAGAAEVSSPVAGPRGGGGSRVKKALGLKARRLSSSSAAMVAQPMMVRTLSQTSGPASPGRGRRPMTSAEIMRQQMRVTEQSDARLRRTLMRAVVGQVGRRPDTIVLPLELLRQLKPAEFADGEEYHQWQFRQVKLLEAGLILHPSLPLDRLNSAVLRFREVMRATEIRAIDTAKSSDAMRTLTSAVHALAWRSGVGSGGGDACHWADGYPLNVLLYASLLHAIFDHRDCTVVLDEVDELLDLIRKTWPTLGVTRPVHNVCLAWAFFQQYVVTGQVEPELAAAALAVLADVAADARGTRDAVYGKALLGALGAMQEWSEKRLLDYHDSYEKGIGGAPTEVMEILLSISLAAGKIIADRDAAADADDAANFAGDRVDYYIRCSMKNAFTXDSRERNGRRRRRAGGGADAAGEGHGGARRRGAAELQPGAEAVAPGAGGRRGGHPARLLRRRAEAVPRQGDHPHGGARPRAPVGEQDGEGHGADDGGGRRRLPRRPGQGHRRRHGALRGGFRRYGLAQGVDGRQVQDHHGLPRQSQRNRELDTKIQRXPFAGSAMEMMKLAKYTVEEFSEIPASAKDEVVQDLVDGLEAIFQEYISFVASCGAKQNYLPPLPPLTRCNQDSGFFKLWRKTVLPSCQAPEGGPRGVGVGGGSHHVPRPSISRGTQRLYVRLNTLEYVLTHLHAIDKSLVAAPSPRFDGARAAAKSAIARVAEVAAFRLVFLDSRHSFYHGLYLRGVAGARLLRRPAVSNLPMAAAAAAASATAAISGALLPHAVACHRLPPRPQLLAVSSSFRRLSLTASPRRASRLVPRADASAEAGEPEPAAEAEAEAVAASTDAEVEEGEAEAAVAVAEEEQEEEDEPPPPSKPPVKFGEIIGILNKQFIEEAEKVKTLPDLRPGDIIELRMQRPNKRRLSLFKGIIIAKHKSGVHTTIRVRRIIAGVGVEITFPIYSPRIKEIKVIRHKKVRRAKLYYLKHKLPRFSTFK

SEQ ID NO: 6898 - protein, 138 aa, Oryza sativa
  Clone ID: PAT_MRT4530_64414C.1.pep
MAEEKHHHHLFHHKKDDEPATGVDSYGEGVYTSETVTTEVVAGGQDEYERYKKEEKQHKHKQHLGEAGALAAGAFALYEKHEAKKDPENAHRHKITEEIAATAAVGAGGYAFHEHHEKKKDHKSAEESTGEKKHHLFG

SEQ ID NO: 6899 - protein, 24 aa, Oryza sativa
  Clone ID: PAT_MRT4530_64758C.1.pep
GYAFHEHHEKKKDHKSAEESTGEK

SEQ ID NO: 6900 - protein, 111 aa, Oryza sativa
  Clone ID: PAT_MRT4530_65023C.1.pep
PGPGRACSSNETKKSIVPAKKKKKKEESMAARTVAVAAALAVLLIFAASSATVAMAGRPTPTTSLDEEAAQAAAQSEIGGGCKEGEGEEECLARRTLTAHTDYIYTQQHHN

SEQ ID NO: 6901 - protein, 597 aa, Oryza sativa
  Clone ID: PAT_MRT4530_6575C.1.pep
MGGEGAEARRLDRAMSFGGAGSIPEEALHLVLGYVDDPRDREAVSLVCRRWHRIDALTRKHVTVPFCYAASPAHLLARFPRLESLAVKGKPRAAMYGLIPEDWGAYARPWVAELAAPLECLKALHLRRMVVTDDDLAALVRARGHMLQELKLDKCSGFSTDALRLVALSCRSLRTLFLEECSIADNGTEWLHDLAVNNPVLETLNFHMTELTVVPADLELLAKKCKSLISLKISDCDFSDLIGFFRMAASLQEFAGGAFIEQGELTKYGNVKFPSRLCSLGLTYMGTNEMPIIFPFSALLKKLDLQYTFLTTEDHCQLIAKCPNLLVLAVRNVIGDRGLGVVADTCKKLQRLRVERGDDDPGLQEEQGGVSQVGLTTVAVGCRELEYIAAYVSDITNGALESIGTFCKNLCDFRLVLLDREERITDLPLDNGVRALLRGCTKLRRFALYLRPGGLSDTGLGYIGQYSGIIQYMLLGNVGETDDGLIRFALGCENLRKLELRSCCFSEQALACAIRSMPSLRYVWVQGYKASKTGHDLMLMARPFWNIEFTPPSSENANRMREDGEPCVDSQAQILAYYSLAGKRSDCPRSVVPLYPA

SEQ ID NO: 6902 - protein, 605 aa, Oryza sativa
  Clone ID: PAT_MRT4530_65929C.1.pep
MELALVGNPSNGVAKPSCNSVGSLPVVSSNAVINPPVTSAAGATLGRHLARRLVQIGATDVFAVPGDFNLTLLDYLIAEPGLKLIGCCNELNAGYAADGYARARGVGACAVTFTVGGLSVLNAIAGAYSENLPVICIVGGPNSNDYGTNRILHHTIGLPDFSQELRCFQTITCYQAVINNLDDAHEQIDTAIATALRESKPVYISVGCNLAGLSHPTFSREPVPLFISPRLSNKANLEYAVEAAADFLNKAVKPVMVGGPKIRVAKAKKAFAGIAESSGYPFAVMPSAKGLVPEHHPRFIGTYWGAVSTTFCAEIVESADAYLFAGPIFNDYSSVGYSLLLKREKAVIVQPDRVVVGNGPAFGCILMTEFLDALAKRLDRNTTAYDNYRRIFIPDREPPNGQPDEPLRVNILFKHIKEMLSGDTAVIAETGDSWFNCQKLRLPEGCGYEFQMQYGSIGWSVGATLGYAQAAKDKRVISCIGDGSFQMTAQDVSTMLRCGQKSIIFLINNGGYTIEVEIHDGPYNVIKNWDYTGLIDAIHNSDGNCWTKKVRTEEELIEAIATATGAKKDCLCFIEIIVHKDDTSKELLEWGSRVSAANSRPPNPQ

SEQ ID NO: 6903 - protein, 211 aa, Oryza sativa
  Clone ID: PAT_MRT4530_66026C.1.pep
AAAAAASACREVWPPVAGSRRYTYTSMILGLAMHGHGEDALSLFAGMQRAGVTPNEVTLLGVLTACCHAGLVEEGLQQLDAMPEPRIEHYGCVVDMLDRAGRLDEAEELVAAMPAHPDALIWGSLLAACRAHDDVERAERVMWRRTTDADADAGDYVLMSNTYASNGRHGEVVKVRRQMRRNEIDKVPDCSLIEIDGVVHEFKAIPANSIR

SEQ ID NO: 6904 - protein, 110 aa, Oryza sativa
  Clone ID: PAT_MRT4530_66161C.1.pep
KNPPRTTPSRPSKMGRSIDQWLRMLLEPIDLDAPCCGPHNEWILLRFNKNVFLPGPPSSLFLGFYKGGTGQISSSQCFAFGPSGPFGLIVFLWICLSCGLAPERVLLTNI

SEQ ID NO: 6905 - protein, 231 aa, Oryza sativa
  Clone ID: PAT_MRT4530_66445C.1.pep
LDGSPRIKIEQHSLTQNMHADTQLGHSRIKEALMRKRITGGILDSNSLRTLKDRRDLFYPFSLILHNTKPVGHQDLVGLVISILLLADFSLVLLTFLQLYSYSMADVLLVLFVLPLGILSPFPAGINALFSHGPRRSAGLARVYALWNITSLVNVVVAFACGLVHYKSSTKRHPSTQPWNLGTDESGWWLFPTGLMLLKCIQARLVDWHVANLEIQDRAVYSNDPSIFWQS

SEQ ID NO: 6906 - protein, 759 aa, Oryza sativa
  Clone ID: PAT_MRT4530_67017C.1.pep
MASGNSSSSSGSMAATAGGVGGWLGFSLSPHMATYCAGGVDDVGHHHHHHVHQHQQQHGGGLFYNPAAVASSFYYGGGHDAVVTSAAGGGSYYGAGFSSMPLKSDGSLCIMEALRGGDQEQQGVVVSASPKLEDFLGAGPAMALSLDNSAFYYGGHGHHQGHAQDGGAVGGDPHHGGGGFLQCAVIPGAGAGHDAALVHDQSAAAVAAGWAAMHGGGYDIANAAADDVCAAGPIIPTGGHLHPLTLSMSSAGSQSSCVTVQAAAAGEPYMAMDAVSKKRGGADRAGQKQPVHRKSIDTFGQRTSQYRGVTRHRWTGRYEAHLWDNSCKKEGQTRKGRQGGYDMEEKAARAYDLAALKYWGPSTHINFPLEDYQEELEEMKNMSRQEYVAHLRRKSSGFSRGASIYRGVTRHHQHGRWQARIGRVSGNKDLYLGTFSTQEEAAEAYDVAAIKFRGLNAVTNFDITRYDVDKILESSTLLPGELARRKGKVGDGGGAAAVADAAAALVQAGNVAEWKMATAAALPAAARTEQQQQHGHGGHQHHDLLPSDAFSVLQDIVSTVDAAGAPPRAPHMSMAATSLGNSREQSPDRGVGGGGGGGVLATLFAKPAAASKLYSPVPLNTWASPSPAEQRVGFAKPNSLWWCLSSQSKLKAHSRSNGGRKPSRGSEKNPPNPCMTFSASLDRTNEFEDATLHVDVILLKVHLVYTLGVSSVAASPRVTEDVALSCVFLHYSLTWELIPSAQPSFVRYVQPSSECKLTD

SEQ ID NO: 6907 - protein, 315 aa, Oryza sativa
  Clone ID: PAT_MRT4530_67035C.1.pep
MADHAAAEAAPQSSQEEEEDWKEAEGGDGDVEVADRGGGGGAANGGIPEGRPIRVYADGIYDLFHFGHAKSLEQAKRLFPNTYLLVGCCNDELTHKYKGRTVMTEDERYESLRHCKWVDEVIPDAPWVVTEEFLNKHNIDFVAHDSLPYADASGAGNDVYEFVKKLGKFKETQRTDGISTSDIIMRIVKDYNEYVMRNLARGYTRKDLGVSYVKEKRLRVNMGLKNLRDKVKQHQEKVGEKWNTMAKLQEEWVENADRWVAGFLEKFEEGCHSMGTAIKERIQERLKAQSRDFSLLQYDGEDVDEDEDDDEYVRE

SEQ ID NO: 6908 - protein, 863 aa, Oryza sativa
  Clone ID: PAT_MRT4530_67341C.1.pep
MGAPAAPATAPPAEAAAVVEEVHRTRSGNSDTTSKRVDQINSKWQFHLSIDDNTDSSCLFKERLTQALRYFKESTDQHLLVQVWAPVKSGDRYVLTTSGQPFVLDQQSIGLLQYRAVSMMYMFSVDGENAGELGLPGRVYKQKVPEWTPNVQYYSSTEYPRLNHAISYNVHGTVALPVFDPSVQNCIAVVELIMTSKKINYAGEVDKVCKALEAVNLKSTEILDHPNVQICNEGRQSALVEILEILTVVCEEHKLPLAQTWVPCKYRSVLAHGGGVKKSCLSFDGSCMGEVCMSTSDVAFHVIDAHMWGFRDACVEHHLQKGQGVSGKAFIYRRPCFSKDISQFCKLEYPLVHYARMFGLAGCFAICLQSMYTGDDDYILEFFLPPNCRNEDDQNALLESILARMKKCLRTLKVVGNGDTNEVCLQISNVLIIETEDLKTNVHFENSEGCFRESPESNGSQRVHEVDNDGNKVSIMSERHLLADDNSQNNGASVGRPNGSGASDSLHKSNKPPERRRGKAEKTISLDVLQQYFSGSLKNAAKSLGVCPTTMKRICRQHGISRWPSRKINKVNRSLSKLKQVIESVQGSDAAFNLTSITGPLPIPVGPSSDSQNLEKASPNKVAELSNLAVEGDRDSSLQKPIENDNLAILMSQQGFIDANNNLQLEADKASHSRSSSGEGSINSRTSEASCHGSPANQTFVCKPIASTFAEPQLIPEAFTKEPFQEPALPLSRMLIEDSGSSKDLKNLFTSAVDQPFLARSSNLALMQNSGTVTIKASFKEDIVRFRFPCSGSVTALKDEVAKRLRMDVGMFDIKYLDDDHEWVKLACNADLEECMEISGSHVIRLLVSDVAAHLGSSCGSSG

SEQ ID NO: 6909 - protein, 243 aa, Oryza sativa
  Clone ID: PAT_MRT4530_67576C.1.pep
MGQSKKKFRGVRQRHWGSWVSEIRHPLLKRRVWLGTFETAEEAARAYDEAAILMSGRNAKTNFPVARNATGELTPAAAVAGRDGRVGGGSGSSSSMTANGGGNSLSQILSAKLRKCCKTPSPSLTCLRLDPEKSHIGVWQKRAGARADSSWVMTVELNKDTAVSSAATVAAATAVSSSDQPTPSDSTVTTTSTSTTGSPSPPPPAMDDEERIALQMIEELLGRSGPGSPSHGLLHGGEGSLVI

SEQ ID NO: 6910 - protein, 227 aa, Oryza sativa
  unsure (1)..(227): unsure at all Xaa locations
  Clone ID: PAT_MRT4530_67628C.1.pep
MGRGRVELKRIENKINRQVTFAKRRNGLLKKAYELSVLCDAEVALIIFSNRGKLYEFCSGQSMTRTLERYQKFSYGGPDTAIQNKENELVQSSRNEYLKLKARVENLQRTQRNLLGEDLGTLGIKELEQLEKQLDSSLRHIRSTRTQHMLDQLTDLQRREQMLCEANKCLRRKEKLEESNQLHGQVWEHGATLLGYERQSPHAVQQXFTPEQMNNSCVTAFMPTWLP

SEQ ID NO: 6911 - protein, 388 aa, Oryza sativa
  Clone ID: PAT_MRT4530_67786C.1.pep
MTDAPPPRSRPHPPSSSVAVPAAAAAVIAAALASSFLALLQPPRRAPVAAGSRVGMSKARVYADVNVLRPKEYWDYEALTVQWGEQDDYEVVRKVGRGKYSEVFEGINVNNNEKCIIKILKPVKKKKIKREIKILQNLCGGPNIVKLLDIVRDQHSKTPSLIFEYVNNTDFKVLYPTLTDYDIRYYIYELLKALDYCHSQGIMHRDVKPHNVMIDHELRKLRLIDWGLAEFYHPGKEYNVRVASRYFKGPELLVDLQDYDYSLDMWSLGCMFAGMIFRKEPFFYGHDNHDQLVKIAKVLGTEALNAYLNKYHIELDPQLEALVGRHSRKPWSKFINADNQHLVSPEAVDFLDKLLRYDHQDRLTAREAMAHPYFLQVRAAENSRARPQ

SEQ ID NO: 6912 - protein, 380 aa, Oryza sativa
  Clone ID: PAT_MRT4530_67800C.1.pep
MATAGKVIKCKAAVAWEAGKPLSIEEVEVAPPQAMEVRLKILYTALCHTDVYFWEAKGQTPVFPRIFGHEAGGIVESVGEGVTELSPGDHVLPVFTGECGDCRHCLSEESNLCDLLRINTDRGAMIGDGQTRFTARGGQPVYHFLGTSTFSEYTVVHVGCVAKIHPAAPLDKVCVLSCGISTGFGATVNVAKPPKGCTVAIFGLGAVGLAAMEGARISGASRIIGVDLNPAKFELAKKFGCTDFVNPKDYDKPVQQVIIEMTNGGVDRSVECTGNAAAMISAFECVHDGWGVAVLVGVAGKDAAFKTHPTNFLNERTLRGTFFGNYKPRTDLPGVVEMYMNKELELEKFITHSVPFSEINTAFDLMLSGESLRCIIRMED

SEQ ID NO: 6913 - protein, 185 aa, Oryza sativa
  Clone ID: PAT_MRT4530_67886C.1.pep
MARVYVGNLDPRVTARELEDEFRVFGVLRSVWVARKPPGFAFIDFDDRRDAQDAIRDIDGKNGWRVELSRNASSGRGGRDRYGSSESKCYECGETGHFARECRLRIGSGGLGSGRRRSRSRSRSRSPRYRRSPSYGRRSYSPAGRSPRRRSVSPARARSYSRSPQYNRGRDESPAYDNGYRRSRS

SEQ ID NO: 6914 - protein, 248 aa, Oryza sativa
  Clone ID: PAT_MRT4530_68165C.1.pep
MVKLAFGSLGDSFSATSVKAYVAEFIATLLFVFAGVGSAIAYGQLTNGGALDPAGLVAIAIAHALALFVGVSVAANISGGHLNPAVTFGLAVGGHITILTGLFYWIAQLLGASIACLLLKFVTHGKAIPTHGVAGISELEGVVMEIVITFALVYTVYATAADPKKGSLGTIAPIAIGFIVGANILAAGPFSGGSMNPARSFGPAVAAGNFAGNWVYWVGPLIGGGLAGLVYGDVFIGSYQPVADQDYA

SEQ ID NO: 6915 - protein, 471 aa, Oryza sativa
  Clone ID: PAT_MRT4530_6816C.1.pep
MGAFLLFVCVLAPFLLVCAVRGRRRQAGSSEAAACGLPLPPGSMGWPYVGETFQLYSSKNPNVFFNKKRNKYGPIFKTHILGCPCVMVSSPEAARFVLVTQAHLFKPTFPASKERMLGPQAIFFQQGDYHAHLRRIVSRAFSPESIRASVPAIEAIALRSLHSWDGQFVNTFQEMKTYALNVALLSIFGEEEMRYIEELKQCYLTLEKGYNSMPVNLPGTLFHKAMKARKRLGAIVAHIISARRERQRGNDLLGSFVDGREALTDAQIADNVIGVIFAARDTTASVLTWMVKFLGDHPAVLKAVTEEQLQIAKEKEASGEPLSWADTRRMKMTSRVIQETMRVASILSFTFREAVEDVEYQGYLIPKGWKVLPLFRNIHHNPDHFPCPEKFDPSRFEVAPKPNTFMPFGNGTHSCPGNELAKLEMLVLFHHLATKYRWSTSKSESGVQFGPFALPLNGLPMSFTRKNTEQE

SEQ ID NO: 6916 - protein, 157 aa, Oryza sativa
  unsure (1)..(157): unsure at all Xaa locations
  Clone ID: PAT_MRT4530_68543C.1.pep
MKGAKSKGAAKPDAKLAVKSKGAEKPAAKGRKGKAGKDPNKPKRAPSAFFVFMEEFRKEFKEKNPKNKSVAAVGKAAGDRWKSLTEADKAPYVAKANKLKAEYNKAIAAYNKGESTAKKAPAKEEEEDDEGESXQSKSRGHDEDDDEGSEEDEDDDE

SEQ ID NO: 6917 - protein, 242 aa, Oryza sativa
  unsure (1)..(242): unsure at all Xaa locations
  Clone ID: PAT_MRT4530_68545C.1.pep
IVSKKKKKKKKKKKQKKKKKVTIHHTTTTLKADAAXSKDEIQARVAQLKKELSETDSIYDTEKLAERIAKLSGGVAVIKVGAATETELEDRQLRIEDAKNATFAAIEEGIVPGGGTAYVHLSTTVPAIKETIEDHDERLGADIIQKALVAPASLIAHNAGVEGEVVVEKIKDGEWEVGYNAMNDKYENLIEAGVIDPAKVTRCALQNAASVAGMVLTTQAIVVEKPKPKAPVAEPAEGTLTV

SEQ ID NO: 6918 - protein, 174 aa, Oryza sativa
  unsure (1)..(174): unsure at all Xaa locations
  Clone ID: PAT_MRT4530_68571C.1.pep
SLNCAKCPPEENVYMVKLADQAERYVDMGEYMGKVAKTAYVEEVTVEECNLLSVAXKSEIGDLRASCRNGSSIEXKEEARGNDEHGTLFMDXRDQIEYELSKICDGVLKLLVSLLVPSSTAAQYTVLYLMMKVDYHRYLAXFKTGAERHGAVEITMRAYKDAQDIALFGSCSHP

SEQ ID NO: 6919 - protein, 441 aa, Oryza sativa
  Clone ID: PAT_MRT4530_68696C.1.pep
MEPNAGGGVVSCDLGLIDMGVLCFGASNILLCAEDSSSVLGLGGFGGGGGEVAAELGCGGGGGFDFFGFGGGAVFPIDSDEFVALLVEKEMDHQPQRGYLEKLELGGLECSWRKDAIDWICKVHSYYNFGPLSLYLAVNYLDRFLSSFNLPHDESWMQQLLSVSCLSLATKMEETVVPLPMDLQVFDAEYVFEARHIKRMELIVMKTLKWRLQAVTPFSFIGYFLDKFNEGKPPSYTLASWCSDLTVGTLKDSRFLSFRPSEIAAAVVLAVLAENQFLVFNSALGESEIPVNKEMVMRCYELMVEKALVKKIRNSNASSSVPHSPITVLDAACFSFRMSVKTTPEMGEEEAAAMPTAILLMQCKELKTSVLTPAMLASACTLHLHGRCTTTASPSIAATPRAEEHEEYSTLSQAIRLSLQAASEEEAGRMHSTAQLAAGKM

SEQ ID NO: 6920 - protein, 196 aa, Oryza sativa
  Clone ID: PAT_MRT4530_69125C.1.pep
EFKAILFVPRRAPFDLFDTRKKMNNIKLYVRRVFIMDNCEELIPEWLGFVKGVVDSDDLPLNISREMLQQNKILKVIRKNLVKKCIEMFFEIADNKEDYAKFYEAFSKNLKLGIHEDSQNRGKLADLLRYHSTKSGNELTSLKDYVTRMKEGQKEVYYITGESRKAVENSPFLEKLKKKGYEVLFMVDAIYEYAVG

SEQ ID NO: 6921 - protein, 901 aa, Oryza sativa
  Clone ID: PAT_MRT4530_69157C.1.pep
MDIVPVVALCCCLVLLPSWAYGLGSMASIAVSYGEDGPVFCGLNSDGSHLVTCFGADASVVYGAPSRIPFVGVTAGDGFACGLLLDTNQPYCWGSNSYVKIGVPQPMVEGAMYSELSAGDNHLCALRTSVKGFHSVNGDTSVIDCWGYNMTATHTVTGAVSAISAGSVFNCGLFARNRTVFCWGDESVSGVIGLAPRNVRFQSIGAGGYHVCGVLENAQVFCWGRSLEMQQMSTPSSTDDGDVNIVPMDAMVSVVGGRFHACGIRSLDHQVACWGFTLQNSTLAPKGLRVYAIVAGDYFTCGVPAETSLKPMCWGHSGPLALPMAVSPGICVSDSCSHGYYEYANHGEVGSGSKTCKPANSRLCLPCSVGCPDDSYESSPCNATADRVCQFDCSKCASDECVSFCLSQKRTKNRKFMAFQLRIFVAEIAFAVILVFSVTAIACLYVRYKLRHCQCSKNELRLAKNTTYSFRKDNMKIQPDVEDLKIRRAQEFSYEELEQATGGFSEDSQVGKGSFSCVFKGILRDGTVVAVKRAIKASDVKKSSKEFHTELDLLSRLNHAHLLNLLGYCEDGSERLLVYEFMAHGSLYQHLHGKDPNLKKRLNWARRVTIAVQAARGIEYLHGYACPPVIHRDIKSSNILIDEDHNARVADFGLSILGPADSGTPLSELPAGTLGYLDPEYYRLHYLTTKSDVYSFGVVLLEILSGRKAIDMQFEEGNIVEWAVPLIKAGDISALLDPVLSPPSDLEALKKIAAVACKCVRMRAKDRPSMDKVTTALERALALLMGSPCIEQPILPTEVVLGSSRMHKKVSQRSSNHSCSENDLVDGDDQRIEYRAPSWITFPSVTSSQRRKSSASEADMDGRTTTDGRNVGSSIGDGLRSLEEEISPASPQENLYLQHNF

SEQ ID NO: 6922 - protein, 571 aa, Oryza sativa
  Clone ID: PAT_MRT4530_69460C.1.pep
MDLHQLLKYRLTGANVVYEIPTENNLQNSPWQANPLKYEFSDSPYTPLSSQFECDNLSALTNTPDNQSSTETISAQPISPLEADSSYRQAGILLQENIQVGADPLYATSRHNMQHALREIETVLMAPDTDDATTSTKHEFEEIKPAQLVRQRSRTWSHESRQPLPGVGRSQFASGGYPTASYEFRPEKRQRELREDPQIIVKQLLTRCAEALSEDRTEEFHKLVQEARGVVSINGEPIQRLGAYLLEGLVARHGNSGTNIYRALKCREPESKELLSYMRILYNICPYFKFGYMAANGAIAEALRTENNIHIIDFQIAQGTQWITLIQALAARPGGPPRVRITGIDDPVSEYARGEGLDIVGKMLKSMSEEFKIPLEFTPLSVYATQVTKEMLEIRPGEALSVNFTLQLHHTPDESVDVNNPRDGLLRMVKGLSPKVTTLVEQESHTNTTPFLMRFGETMEYYSAMFESIDANLPRDNKERISVEQHCLAKDIVNIIACEGKDRVERHELLGKWKSRLTMAGFRPYPLSSYVNSVIRKLLACYSDKYTLDEKDGAMLLGWRSRKLISASAWH

SEQ ID NO: 6923 - protein, 472 aa, Oryza sativa
  Clone ID: PAT_MRT4530_6952C.1.pep
MATRGRIVAAVASVVVAWLAVAVGVNGGGCEAERDRVEALPGQPPVAFAQYAGYVAVSEASGRALFYWLTEAAAAAAAATKPLVLWLNGGPGCSSIAYGASEEIGPFRIKTNGTGLYLNKYSWNREANLLFLESPAGVGFSYSNTTSDLKTSGDERTAQDALQFLISWMSRFPQYRHRDFYIAGESYAGHYVPQLARKIVEFNKASPYPFINLKGILVGNGVTDNYYDNIGTVTYWWTHAMISDTTYKAIMSSCNFTSANVSRLCNRAMSYAMNHEFGDIDQYSIYTPSCAAAAANATGRRRGKAAVLRFKDTFLRRRSFGYDPCTETYAEKYYNRPDVQKAMHANITGIPYRWTACSDVLIKTWRDSEFSMLPTYKLLMKAGLRIWVFSGDTDSVVPVTATRFALSHLGLKTKIRWYPWYSAGQVGGWSEVYEGLTFASVRGAGHEVPLFQPRRAFRMFQSFLAGEPLPKS

SEQ ID NO: 6924 - protein, 2299 aa, Oryza sativa
  Clone ID: PAT_MRT4530_69536C.1.pep
MDASAASMLWTLIIILAAAAAASSVHPPQQQSYGVGCIAAERAALLSFKEGVMADPLRLLDSWQGAGDCCRWNGVGCSNRTGHVVKLDLRNTLYWDDQRQVRLDNPHAMRGQVSTSLLALRRLKYLYLSGNNLGGPGIAIPSFLGSLESLVYLNLSCIDFFGEVPTQLGNLSRLSYLDVGSMYYSGQIFSSDLSWLGRLSSLKYLDMSGVNLSMVSDWAHVVNMLPNLRVLNLELCQLTRSNPPLLHSNLTVLEKLVLSSNNFYGPLATNWFWGITTLRTLEVEFCSLYGPLPDSLGNMTALQVLDMQDNDNITGMFPPTLKNLCNLQEVFTGTNLSGDITEQMERLPKCAWDKLQALNLDATNMTGNLPVWLVNLTNLKDLSVSGNQLSGPVPLGLGALTKLTILYLGHNNLTGIISEDYLANLCNMVILDLSYTSLEVVVGSTWTPPFKLIRAQLASCQLGPGFPILFKHQKGIIYIDVSNAGIADAIPSWFWDEISYAFYVDMSHNQIDGELPAKLEARTRQELHLNSNQLKGSIPQLLRNITKLDISRNSLSAPLPSDFQAPELAALVLFSNYIPGSVPLSIYLEQQLLQILQCKKENFPLSYLGLPLSTHKLRIQDLRPTIAKVDKYLAGWEASLLSYAERIVLINAALNSIPVYAMSALKLPLGTIEEIDKKRKAFLWTGDDSCSGARCLVAWDRVCQPKECGGLGIKDLHLQNEALLIKRLFHLHHSNSSWANWIWEEFSDTSLLHLGTHWSSLQSLLPTMRRLSLVSIGDEAHTSFWFDNWLPDGPLCDSFAALLTHSLDLEITVQTVFQTGLQHCFVPRLSSVALAQLDALQDKLLSVHLHECPDFRAAKCSPQLPILSAKHIYEATQVWLDACPNWKFVWHNKAPLKAQLFAWLLAKERLPTKHNLRMRHLMVILSERATMIGPRRRAAARRGCRAPPQRREDPEDDEDDDGRRCHAEDIPPRRRSLRDVIIGRGRSVESRAAEGARHRSRTPHPSSRQRAHGNGRQGRSRTRHSSQCSCRCRSRRTRSPSSLTPRGQDGTGDAGGATTKVVAVSGQADGDQQPVNALVSLPDPLIQILCSSPLLPFSDEQGDHDPMLPLLAEIAPKSSREAENETKRTGGEEPILGEDKVASAAELGQEKMGHLGPDAQQAPKMDLLAQSTQDDEAQASTGDQPTLVQQADCEEQHQATVQTQPIHGGEGEREKVVLSPLFSQLQPPIILQAPLELAPPGAAKTKGCGRKVVQMPSRRSGRKARFSSVPVSKRAEVRLMEEMGLLTPGEPVGDAAVEAYAKSFDTPLPLHVIAGLRVLTRLDGVHDMPVPGEEGTTTTAVPLLAVWSMRLALPCSNGLKPELLSRLMRIALPVDTGLQLVSSRVDRLEDSEIASTCWNVRGLNNPARREAVLEAAELARAGILCLQETKLSSIDQWIGKEIGGNRLSNFNFLPANGTRGGIAIFWDDTIVNMANFSQGTHHLSVMATTITDNLSFIIIVVYGPSEDCDKENFLAELVTAKPPTDTPWLVMGDFNIIYEARDKNNQNLNRHLMGRFRLDVALETRTLTAEEHQFRKDLKIRILGLAAVEKARKKQASRVKWLKEGDANTRFFHIKMNARRRKKFIHCLQQDGNTLHTHEDKAAHLHAHFNSILGTRRQRGCTLNWEALGLSTIQDDSMDEPFTEDEIWEAIKNSPKEKVPGPDGFTGAFYKSCWHIIKKEIVDVFASFHNLTGGNFGSINRAMITLLPKKDSPRSVNDFRPISLIHSVAKLISKTLAMRLAALLGDLVSHAQSAFIKKRCIQDNFLYVRNMVRSLHMQRKPSLFFKLDITKAFDSVSWEYLVEMLQWRGFSQRWRNWIVLLLSTASSRILLNGIAGEPTTHRRGLRQGDPLSPYLFILAIDPIQRLLNKATQEGLLSPLSNRAAQFRISLYADDAAIFINSIRNDVNNLISILKFFGEATGLQVNLHKSSVVSIKCAEQNLSEVLENFNGQRGNFPITYLGLPLTPGRIKRIHLQPVMDKLQSRLAGWKGKLIQQSGRKTLVMSVLSFIPTYFLTALKPPKQFLTDMDKIRKKFLWAGDQEISGGKCKVNWKKVCSPIKMGGLGVLDLDKFARALRLRWLWFEWECPDKPWVGTTPPCDELDEQIFAAATKVTIGNGRKAKFWTSNWIGHQPLKYLAPALFNHSKGKQRLVQDALTNDKWIEDIRHELSMPLIREFFAVFRLIWDNETNLEERVEDTITWRWTNTGKYTAKSAYLAQFAGRKDSRAATLIWKTWAPSKCKNFAWLVLQNRIWTSDRLQV

SEQ ID NO: 6925 - protein, 943 aa, Oryza sativa
  unsure (1)..(943): unsure at all Xaa locations
  Clone ID: PAT_MRT4530_69540C.1.pep
MAMTITDNLSFIITVVNGPSEDCDKENFLAELVAAKPPTDTPWLVMGDFNIIYEARDKNNQNLNRRLMGRFRLDVALETRTLIAEEHQFRKDLKIRILGLAAVEKARKKQASRVKWLKEGDANTRFFHIKMNARRRKNFIHCLQQDGNTLHTHEDKAAHLHAHFNSILGTRRQRGCTLNWEALRLSTIQDDSMDEPFTEDEIWEAIKNSPKEKAPGPDDFTGAFYKNCWHIIKKEIVDVFASFHNLTGGNFGSINRAMITLLPKKDSPRSMNDFRPISLIHSVAKLISKTLAMRLAARLGDLVSHAQSAFIKKRCIQDNFLYVRNMARSLHMQRKPSLFFKLDITKAFDSVSWEYLVEMLQCRGFSQHWRNWIVLLLSTASSRILLNGIAGEPTTHRRGLRQGDPLSPYLFILAIDPIQRLLNKATQEGLLSPLSNRAARFKISLYADDAAIFINSIRNDVNNLISILKFFGEATSLQVNLHKSSVVPIKCAEQNLSEVLENFNGQRGNFPITYLGLPLTPGHIKRIHLQPVMDKLQSRLAGWKGKLIQQSGRKTLVTSVLSSIPTYFLTALKPPKQFLTDMNKIRKKFLWAGDQEISGGKCKVNWKKVCSPIKMGGLGVLDLDKFARALRLRWLWFEWECPDKPWVGTTPPCDELDEQIFAAATKVTIGNGRKAKFWTSNWIGHQPLKYLAPALFNHSKGKQRLVQDALTNDKWIEDIRHELSMPLIREFFAVFRLIWDNETNLEEGVEDTIIWRWTNXTGKYTAKSAYLAQFAGREDSRAATLIWKTWAPSKCKNFAWLVLQNRIWTSDRLQLRQWPNNYFCQLYYRNLETAQHLLKDCPFTREIWDKIMARMNHNQPFPVHNPDESLVDWWESRTKQQSKCQSKGMQSLHMLLSWEIWCERNMRVFKDKELQIPQLTARIMDEIHTWSACGAKYLARIAP

SEQ ID NO: 6926 - protein, 418 aa, Oryza sativa
  Clone ID: PAT_MRT4530_69798C.1.pep
MAWCAARSRLLPLATAPQLLRRLLLSSAAAPRYAHPHHHHSNSRRRRRPLAPTVYAAAAAAAAEAPLPMPPRIGRATRHPGGAASVARVYADANSQRPKEYWDYESLDIEWGEQDGYEVLRKLGRGKYSEVFEGFRPGGDERCVIKILKPVKKKKIKREIKILQNLYGGPNIVKLLDVVRDDESKTPSLIFEYVNNTDFKVLYPTLLDYDIRYYIYELLKVICPTSLFSNALDYCHSRGIMHRDVKPHNIMIDHEKRQLCLIDWGLAEFYHPKMEYNARVASRSYKGPELLVDLLDYDYSLDLWSLGCMFAAMIFRVDPFFNGQDNYDQLVKITEVLGTEDFYNYLEKYGLELDPQLERLVGRHNRKPWSMFVNSGNRHLASPEAIDFVDRLLRYDHQERPTAKEAMAHPYFNPVRST

SEQ ID NO: 6927 - protein, 1175 aa, Oryza sativa
  Clone ID: PAT_MRT4530_70006C.1.pep
MAEGVVFAALCKIGSVLASSASITLGGRLDANLTIINEIESRIKQIEVELKLMQAFLRQAQKQEGYSEPTEVYLQEVRKAAFEIEDIIDEFLYLSVKHKNRFFNGEFMSYFRKLGKTSWHKIARELKDSQCHLQNLRNLWVQYEIQLPNGNRVSTDVEDHRLPHHLSYPADEMVGVEQERTMMMNWLKTCSTSVITVWGMGGSGKTTLANSIYEDERIKNQFDCHIWITVSQKFNASDIMRKMVRHMLQRCSPNIDSIDGRDLVEILKRTLEHRKILLVLDDVWSTDVWMDLASTVERSNNNGNKVVITTRIKDVASLASEDQVLQLQKLNDADSWCLFCRWAFKNRIDRSCPQELESLGREIMVKCDGLPLAIVVVGNMLSFKKQDMEEWSKCNDQLTWELRDRLRDQELSSVMKILKLSYKNLPSHLKNAFVFCSIFPEDYMITKKRLVRLWVAEGLIKPEKRRTVEEVAEEYLNELIDRCLLQVVERKHFRKVKEFQMHDIVRELAISISEDETFCMTHSKSHPGEPEYRCRRLSIHEHNDRIKSVSDPSRLRSLYHFDVTCSSFPSVGTPRSARYLNVLELQDVPITVLPEELSGLFNLRYLGLRRTKIKQLPQSVDKLFNLQTLDVYLTNVDKLPTGIAKLKRLRHLLAGKLSAPLYCGIVEKSRGVQAPKVVWESMELQTLKGVLANLNLVENLGHMTQLRTLAIEDVGEEHYPKLFASISKMRSLRTLKVLSAEGNQGLNFEALSLPPQNLRKLHLTGRFHHAVMESNFFQTVGAKLEKLYLTGSKTNIDPLISISCLSNLKVLQIGDAYDGASFVFQSGWFPKLHTLIMCNLLHINSMIMEQQTLQNLQWLALVNFPELKEVPHGIELLLSLQNLMLVNMHDEFMERIQGQEDPLGTMSRLMDRCLNDDETVIDAGMCNYGGLGVPNLELMGIALRSRWTWLQRTSSSKPWQGLAIPGSQKERNFVAASTICQLRDGQTILFWEDSWLQEGCIRSFAPNIYDKIPPRVRRCRTVAEALTGRQWIKDIRGALGIQPILEYLKLWSLVQMVDLDPTTPDSIIWKWESSGQYSSKSAYKALFSGRVTFLSTPIWKSLAPPRCCFFLWLVAMNRCWTADRLRSRGLPHPDRCVLCDQYEESIDHILVACLVNEPSFHNWLCESRMKIGERH

SEQ ID NO: 6928 - protein, 530 aa, Oryza sativa
  unsure (1)..(530): unsure at all Xaa locations
  Clone ID: PAT_MRT4530_70155C.1.pep
MPRGRSTTTTTSSSASNPFHAFASTLPFLPSPSPSPTSASPSPSPPAPHLAVPLILPITSSSSASAAAASPESNRGARMAAAASGGKAGGGGGLGKGGGPAFVGQVFTMLDPSGNGLMAVTTRFELPQFLASRTPMWFKRILSPLKKSENGPVFRFFMDLNDAVSYVKRLNVPSGMVGACRLDVAYEHFKEKPQMFQFVPSEKQVKAANKLLKSLPQRRRRKKLDGVPVFSAQNLNIAVATNDGIRWYTPYFFDKNLLDNILEASMDQHFHSMVQNRHTRRRRDIVDDSLTSEMMEESADSFLEPPEVQELMNEIGPVGIPLNVVTKAAEIQFLDVVDKMLLGNKWLRKATGIQPQFPYVVDSFEERTAAAIDRAATASSSFTASKDADCFQISKQPETLESDVDNSNRGKHENSNNGQSHFPFSNLLPNIWPGHDRSFKAQGRDRAFRRCDASINNDLQANPLLPKITMVGISMGEGGQMSKANLKKXMEDLTKELEQAGEKTIFSDEKDPLFVANVGDYSRITKISST

SEQ ID NO: 6929 - protein, 1081 aa, Oryza sativa
  Clone ID: PAT_MRT4530_70289C.1.pep
LVLENKKRDEDNPHSAHPHPVSTRPGREQGGEAPEPNGGPRPPTVRAGPLPACPTVPGAPDPQDGPGATAGRPRLSPSDPEVVGTEVECAPGGLSDEERPGDAAPGEEDRPRRKVQRPVYFVSEALRDAKTRYPQAQKMLYAILMASRKLRHYFLAHRVSVVTSYPLGQILHNREGTGQVVKWAIKLSEFDLHFEPRHAIKSQALADFVAEWTPAPEPVSVLEASSGPSQLPHTAYWVMQFDGSLSLQGAGAGVTLTSLNGDVLRYLVRLDFRATNNMAEYEGLLAGLRVAAGLGIRRLLVLGDSQLVVNQVCKEYRPPPGAFEERLAQPSARPDPLGETDAPERPPRPVGVQASGPDGSVPSSLRLIAWIAEIQAYLADKTLPEDREGSERVQRISKRYVLALQTIPLSWLFAVWGLDILGPFRRAPGGFEYLYVAVDKFTKWPEAYPVIKIDKHSALKFIRGITARFGVPNRIITDNGTQFTSELFGDYCEDMGIKLCFTSPAHPRSNGQVERANAEILKGLKTKTFNILKKHGDSWIEELPAVLWANRTTPSRATGETPFFLVYGAEAVLPSELTLRSPRATMYCEADQDQLRRDDLDYLEERRRRAALRAARYQQSLRRYHQRHVRARSLCVDDLVLRRVQTRAGLSKLSPMWEGPYRVIGVPRPGSVRLAMGDGTELPNPWNIEHLRRFYPYGTMNRVPTSWGFVYSRVNKVTTLAPAFMLWVLCGYRVPTGSVWAQGSPRGEGSRSLFGAQRAGTRLHWRNGPVAVDRQRVRASGHAGHQPVQQRRFVVVVKRFPTFPVPTKAAFASATTTATRRRRRRRGEEEREGEREAERYEEMVEYMERVARAAGGASGGEELTVEERNLLSVAYKNVIGARRASWRIISSIEQKEEGRGNDAHAATIRSYRGKIEAELARICDGILALLDSHLVPSAGAAESKVFYLKMKGDYHRYLAEFKSGDERKQAAESTMNAYKAAQDIALADLAPTHPIRLGLALNFSVFYYEILNSPDRACNLAKQAFDEAISELDSLGEESYKDSTLIMQLLRDNLTLWTSDANDDGGDEIKEAAAPKEPGDQ

SEQ ID NO: 6930 - protein, 585 aa, Oryza sativa
  Clone ID: PAT_MRT4530_70309C.1.pep
MDDDFEMPPPGADDDLMMGEDGMGDFGGADGPPLKVGEEKEIGKQGLRKKLLKEGEGWETPEVGDEVEVHYTGTLLDGKKFDSSRDRGTPFKFKLGQGQVIKGWDLGIKTMKKGENAVFTIPPDLAYGESGSPPTIPASATLQFDVELLSWTSVKDICQDGGIFKKILKEGEKWENPKDLDEMDLDIVVAKYEARLEDGTVISKSEGAEFTVKDGFFCPALAKAVKTMKKAEKVLLTVKPQYGFGENGRPAAGEEGAVPPNATLLVNLELVSWKTVTEIGDDKKILKKVLTEGTGYERPNEGAVVKVKITGKLQDGTIFTKKGHDEPEPFEFKTDEEEVIDGIDRAVLNMKNGEVALVTIPPEYAFGSTESKQDLAVVPPNSTVIYEVELVSFVKDKESWDLNNTEKIETAGAKKEEGNALFKLGKYVRASKRYEKAAKFIEYDSSFSEDEKKQSKQLKVTCNLNNAACKLKLKDYKQAEKLCTKVLELDSQNVKALYRRAQAYMQLADLELAEVDIKKALEIDPDNRDVKLTYKNLKEKVKEYNKKDAKFYSNMFAKMTKQPAEDGKAGSGAESKQGSEPVTAA

SEQ ID NO: 6931 - protein, 149 aa, Oryza sativa
  Clone ID: PAT_MRT4530_70658C.1.pep
MASSMLSSAAVVTSPAQATMVAPFTGLKSSAAFPVTRKTNKDITSIASNGGRVSCMKVWPPIGKKKFETLSYLPDLSDVELAKEVDYLLRNKWIPCVEFELEHGFVYREHGNTPGYYEGRYWTMWKLPLFGCTDSAQVLKEVEECKKEY

SEQ ID NO: 6932 - protein, 607 aa, Oryza sativa
  unsure (1)..(607): unsure at all Xaa locations
  Clone ID: PAT_MRT4530_70933C.1.pep
MATMGSLIGLVNRIQRACTVLGDHGGGGEGGSLWEALPSVAVVGGQSSGTSSVLESIVGRDFLPRGSGXPLVLQPHKTXGGQELAGFLHAPRKRFTDFAAVRKEIADETDRITGKTKAISNIPIHLSIYSPHVVNLTLIDLPGLTKVAVEGQQESIVQDIENMVRSYVDKPNSIILAISPANQDIATSDAIKLARDVDPSGDRTFGVLTKLDLMDKGTNAVDVLEGRQYRLQHPWVGIVNRSQADINRNVDMLAARRKEKEYFESSPDYGHLAHKMGAEYLAKLLSQHLEAVIRAKIPSIIAMINKTIDEIEAELDRLGRPIGGDAGAQLYTILDMCRAFDRVFKEHLDGGRPGGDRIYGVFDHQLPAALKKLPFDKHLSLQNVRKVISEADGYQPHLIAPEQGYRRLIDSSLHYFRGPAEASVDAVHLVLKELVRRSIAATEELKRFPTLQTDIAAAANESLERFREDGRKTVIRLVEMEASYLTVEFFRKLPTEPDKGANNNTPANDRYQDNHLRRIGSNVSSYINMVCETLRNTIPKAVVHCQVKEAKRNLLNRFYAHVGSKEKKQLSAMLDEDPALMEKRDSLVKRLELYKSARNEIDSVAWK

SEQ ID NO: 6933 - protein, 447 aa, Oryza sativa
  Clone ID: PAT_MRT4530_71768C.1.pep
MDEEYDVIVLGTGLKECIISGLLSVDGLKVLHMDRNDYYGGESTSLNLTKLWKRFKGNETAPEHLGVSKEYNVDMVPKFMMANGALVRVLIHTSVTKYLNFKAVDGSFVYNNGKIHKVPATDVEALKSNLMGLFEKRRARKFFIYVQDYEEDDPKSHEGLDLHKVTTREVISKYGLEDDTVDFIGHALALHRDDNYLDEPAIDTVKRMKLYAESLARFQGGSPYIYPLYGLAELPQAFARLSAVYGGTYMLNKAECKVEFDENGKAYGVTSEGETAKCKKVVCDPSYLPDKVKKVGRVARAICIMKHPIPDTKDSHSVQIILPKKQLKRKSDMYVFCCSYAHNVAPKGKFIAFVSTEAEADKPEIELKPGIDLLGPVEETFFDIYDRYEPTNTADEDNCFVTNSYDATTHFETTVKDVLALYSKITGKELDLSVDLNAASAAESEAA

SEQ ID NO: 6934 - protein, 140 aa, Oryza sativa
  Clone ID: PAT_MRT4530_71830C.1.pep
MRKYRVAGLVAALLVLHSLATPSAQAEAHRAGGEGEEKMSSDGGPVLGGVEPVGNENDLHLVDLARFAVTEHNKKANSLLEFEKLVSVKQQVVAGTLYYFTIEVKEGDAKKLYEAKVWEKPWMDFKELQEFKPVDASANA

SEQ ID NO: 6935 - protein, 807 aa, Oryza sativa
  unsure (1)..(807): unsure at all Xaa locations
  Clone ID: PAT_MRT4530_71949C.1.pep
MAADPSAAAAAAPDPDGPDAVRLTWNAWPRSKVEASRCVVPLAAAISPVRSPESLASPPLPYPPLRCKPPCSALLNPFARVDFAAKIWICPLCFSRNHFPPHYAAISESNVPAELFPQCSTVEYLLAGAAPAAGVPLHQGGPPAPPPPVFLFVIDTCVIEEELEYVKMSMRKAVALLPEHALVGLVTFGTQVHLHELGFSDLSKIYVFRGTKEISKEQILDQLGLAGAGRPGFPKMPQQPGGPQINGMHPPATAGVTRFLLPVSDCECTLSTLLDELQPDQWPVETGNRAIRCTGVALSVAAGLLGACMPGTGARIIALLGGPCTEGPGMIVSKDLSEPVRSHKDLDKDAAPHFQKAVKFYDGLAKQLVSQGHVLDVFASALDQVGLAEMKVAIERTGGLVVLSESFGHSVFKDSFKRIFEGGEQSLDLSFNGTLEINCSKDIKVQGIIGPCTSLEKKGALCADTVVGQGNTTAWKMCGLDRNTSLTVFFDVSPSERSSQPGHQNPDLYIQFVTSYQHPEGQMRIRVTTICRKWVDGSTNTEELVEGFDQETAAVVLARYISLKMEMEEEFDATRWLDGSALMLFSRXGDYRKHDASSYNLHXAMFLFAQLKLKLRRSQVVEVTPGFDILVTADVRVFNNSPDETAYFRMLLNRESITNSVAMIQPSLISFSFDLPPSPVFLDVASIAADRILLLDAYFSVVIFHGMTIAQWRNMGYQNQPEHQQFAQLLQAPHEEAQIIIKGRFPAPRLVVCDQHGSQARFLLAKLNPSATYNSAHDVPPGSDIIFTDDVSFQVFCEHLQRLAVQS

SEQ ID NO: 6936 - protein, 90 aa, Oryza sativa
  Clone ID: PAT_MRT4530_72502C.1.pep
MKKPYIVHKIIAYQALFYGQHSFACADLLWHVKGYAKCKFFLWFAFQQCCWTADLLRKCGIDSHSACPFCAQELETANHILLDCVFARQV

SEQ ID NO: 6937 - protein, 568 aa, Oryza sativa
  Clone ID: PAT_MRT4530_72558C.1.pep
MQDQRAGPAKSKEKKRVSRHKQAKLTTVIIKAVPLTTKELRQKKSELRVERRRVKMGGDERAVAAPLLQQQQDGGGGDGERRRRRWWWGWWDGEEAAGQLAFAAPMVATSMAYYAIPLVSVMYAGRLGELELAGATLGNSWGTVTGIALMPWLNIRGVLAAKGLQKDKLDTGLSGSLETLCGQGYGAKMYHMMGVYLQASIITSAFFSVLVSLLWFYSEPVLIFLRQDPEVTRTATLFLRYSIPAQFAYGFIQCTLRFLQTQSVVTPLVVFALLPLVLHFGITHAFVHYLGFGYAGAGMSTSVSLWLSFLMLAAYVCLSERFKHTWEGFSTEAFRHVLPGLKLAIPSAVMVCFEYWAFEVLVLVAGLMPNSHMSTSIIAMCENTEAISYMITYGFAAAISTRVSNELGAGNVAKAKKALAVTLVLSLLLGVAFLLLLGLGHDLWAGLFSKSDAVISEFASMTPLLIGSVVLDSTQGVLSGVSRGCGWQHLAAWTNLVAFYIVGLPLSILFGFKLGLQTKDQMGKIRADNERQRRRFCLLRLERSELTSLAAAYASLVESNIEVKSFRA

SEQ ID NO: 6938 - protein, 625 aa, Oryza sativa
  Clone ID: PAT_MRT4530_7261C.1.pep
MAVMEEQQEGAAGVMRRRPKTKIVCTLGPASRSVEMIGRLLRAGMCVARFNFSHGSHEYHQETLDNLRAAMESTGILCAVMLDTKARDFVLGVLILATFYFLQDFCAVVFTVGRCSSLILGFSPPDYSAGQKTISVMFCWLKISLDDDKICVVHDQFSERLCSGFLNGIKPILDLLKIQGPEIRTGFLKDGKPVQLKKGQEITVSTDYSIKGDDNMISMSYKKLAVDLKPGSVILCADGTITLTVLHCDKEQGLVRCRCENTAMLGERKNVNLPGVIVDLPTLTEKDKEDILKWGVPNKIDMIALSFVRKGSDLVEVRKVLGKHAKSIMLMSKVENQEGVANFDDILAQSDAFMVARGDLGMEIPIEKIFYAQKVMIFKCNIQGKPVVTATQMLESMIKSPRPTRAEATDVANAVLDGTDCVMLSGETAAGAYPELAVRTMAKICLQAESCVDHAAVFKSITASAPIPMSPLESLASSAVRTANSAKAALILVLTRGGTTARLVAKYRPSMPILSVVVPELKQTDSFDWTCSDEAPARHSLIVRGVIPMLSAATAKAFDNEATEEALGFAISNAKAMGLCNSGAPSVFAVHGLTIETVKFVIATAAYFAASAATSIKLDSRYVIC

SEQ ID NO: 6939 - protein, 399 aa, Oryza sativa
  unsure (1)..(399): unsure at all Xaa locations
  Clone ID: PAT_MRT4530_72804C.1.pep
ATALRESKPVYLSISCNLPGLPHRTFSRDPVPFFLAPRLSNKMGLEAAVEATVEFLNKAVKPVLVGGPKLRVAKAGKAFVDLVDASGYAYAVMPSAKGLVPETHPHFIGTYWGAVSTAFCAEIVESADAYLFAGPIFNDYSSVGYSFLLKKDKAIIVQPERVIVGNGPAFGCVMMKEFLSELAKRVNKNTTAYENYKRIFVPEGQPLESEPNEPLRVNVLFKHVQKMLNSDSAVIAETGDSWFNCQKLKLPEGCGYEFQMQYGSIGWSVGALLGYAQGAKDKRVIACIGDGSFQVTAQDVSTMIRCAQNSIIFLINNGGYTIEVEIHDGPYNVIKNWNYTGLVDAIHNGEGKCWTSKVKCEEELTEAIGMALGEKDCLCFIEVIAHKXDTSKELLEWGS

SEQ ID NO: 6940 - protein, 379 aa, Oryza sativa
  Clone ID: PAT_MRT4530_72817C.1.pep
MASLASPPLPCRAAATASRSGRPAPRLLGPPPPPASPLLSSASARFPRAPCNAARWSRRDAVRVCSQAGAAGPAPLSKTLSDLKDSCWRFLRPHTIRGTALGSIALVARALIENPQLINWWLVFKAFYGLVALICGNGYIVGINQIYDIRIDKVNKPYLPIAAGDLSVQTAWLLVVLFAAAGFSIVVTNFILFITSLYCLALFLGTIYSVPPFRLKRYRAPACLIIATVRGFLLNFGVYYATRAALGLTFQWSSPVAFITCFVTLFALVIAITKDLPDVEGDRKYQISTLATKLGVRNIAFLGSGLLIANYVAAIAVAFLMPQAFRRTVMVPVHAALAVGIIFQTWVLEQAKYTKDAISQYYRFIWNLFYAEYIFFPLI

SEQ ID NO: 6941 - protein, 115 aa, Oryza sativa
  Clone ID: PAT_MRT4530_73562C.1.pep
MQVGGTAAAAAEVSMSYRETRREEEKRRGTKMKVKILQWHGVASWTWNAQDETCGICRMAFDGCCPDCKFPGDDCPLIWGSCNHAFHLHCILKWVNSQTSTPLCPMCRREWQFKG

SEQ ID NO: 6942 - protein, 83 aa, Oryza sativa
  Clone ID: PAT_MRT4530_73807C.1.pep
QSKVSMPPPPPTASALQPTPPTRILLRRPAPVSAASWPSPTARRTPSAPSPFPAPAPPSPPTSLLPSPPPRLLAGGGRTSARS

SEQ ID NO: 6943 - protein, 116 aa, Oryza sativa
  unsure (1)..(116): unsure at all Xaa locations
  Clone ID: PAT_MRT4530_73817C.1.pep
MAIGSLIASRLARSTGHALASAASQAPMARHAAASPLLSRLGSVARAFSSKPAAADVIGIDLGTTNSCVSVMEGKAPRVIENAEGARTTPSIVAKNQNGDLLVGITASRQXSDQWP

SEQ ID NO: 6944 - protein, 578 aa, Oryza sativa
  unsure (1)..(578): unsure at all Xaa locations
  Clone ID: PAT_MRT4530_74258C.1.pep
MSATTSNSRRLCNGRGQVIPGPTLPEAVKMGPHAIRIVVGGLGEGELSTATTVHGPERASSSSAPPEMASAALPEAVAPKKKGNVRFAFACAILASMTSILLGYDIGVMSGASLYIKKDFNISDGKVEVLMGILNLYSLIGSFAAGRTSDWIGRRYTIVFAAVIFFAGAFLMGFAVNYAMLMFGRFVAGIGVGYALMIAPVYTAEVSPASARGFLTSFPEVFINFGILLGYVSNYAFSRLPLNLGWRIMLGIGAAPSVLLALMVLGMPESPRWLVMKGRLADAKVVLEKTSDTAEEAAERLADIKAAAXGIPEELDGDVVTVPKRGSGNEKRVWKELILSPTPAMRRILLSGIGIHFFQQASGIDSVVLYSPRVFKSAGITDDKHLLGTTCAVGVTKTLFILVATFFLDRVGRRPLLLSSTGGMILSLIGLGAGLTVVGQHPDAKIPWAIGLSIASTLAYVAFFSIGLGPITWVYSSEIFPLQVRALGCSLGVAANRVTSGVISMTFLSLSKAITIGGSFFLYSGIAALAWVFFYTYLPETRGRTLEEMSKLFGDTAAASESDEPAKEKKKVEMAATN

SEQ ID NO: 6945 - protein, 228 aa, Oryza sativa
  Clone ID: PAT_MRT4530_7432C.1.pep
MARERREIKRIESAAARQVTFSKRRRGLFKKAEELSVLCDADVALIVFSSTGKLSHFASSSMNEIIDKYNTHSNNLGKAEQPSLDLNLEHSKYAHLNEQLAEASLRLRQMRGEELEGLSIDELQQLEKNLEAGLHRVMLTKDQQFMEQISELQRKSSQLAEENMQLRNQVSQISPAEKQVVDTENFVTEGQSSESVMTALHSGSSQSQDNDDGSDVSLKLGLPCGAWK

SEQ ID NO: 6946 - protein, 424 aa, Oryza sativa
  Clone ID: PAT_MRT4530_74368C.1.pep
MASGDGGDDAGVKRVADRYLKREVLGEGTYGVVFKAVDTKTGNTVAIKKIRLGKYKEGVNFTALREIKLLKELKDSNIIELIDAFPYKGNLHLVFEFMETDLEAVIRDRNIVLSPADTKSYIQMMLKGLAFCHKKWVLHRDMKPNNLLIGADGQLKLADFGLARIFGSPERNFTHQVFARWYRAPELLFGTKQYGSAVDIWAAGCIFAELLLRRPFLQGSSDIDQLGKIFAAFGTPKSSQWPDMVYLPDYVEYQFVSAPPLRSLFPMASDDALDLLSRMFTYDPKARITAQQALEHRYFLSVPAPTKPSQLPRPPPKGDSGNNKIPDLNLQDGPVVLSPPRKLRRVTAHEGMEVHMHRADRTEEHPSGARHMDDMSSQSSRIPMSVDVGAIFGTRPAPRPTLNSADKSRLKRKLDMDPEFGYTE

SEQ ID NO: 6947 - protein, 377 aa, Oryza sativa
  unsure (1)..(377): unsure at all Xaa locations
  Clone ID: PAT_MRT4530_74539C.1.pep
MAVGEVLTERRRETLTTDLVLIPICRQEPKISSIVPEEAAAGEYLAIISASYVTNRNWTVLPVQTKQVSDLQQQEAKLCKQSYIRVTCITYSETDLSCGPSSMTELTAAAAPAGSGSSAAVAAGSSEKMGRGKIEIKRIENTTNRQVTFCKRRNGLLKKAYELSVLCDAEVALIVFSSRGRLYEYANNSVKSTVERYKKANSDTSNSGTVAEVNAQHYQQESSKLRQQISSLQNANSRTIVGDSINTMSLRDLKQVENRLEKGIAKIRARKNELLYAEVEYMQKREVELQNDNMYLRSKVVENERGQQPLNMMGAASTSEYDHMVNNPYDSRNFLQVNIMQQPQHYAHQLQPTTLQLGXSSRPSISFGVDTVRTHVR

SEQ ID NO: 6948 - protein, 417 aa, Oryza sativa
  Clone ID: PAT_MRT4530_75365C.1.pep
MEHLPVEVIGNILAHLSAARDVMVASGVCRKWRTACRKHLHSLSFNSDDFPRDMTTRQLEIVITQTIFQTMGLQCLSIHIDRTHEFSAAPVIAWLMYTRETLRSLSYNVRTNPNVNILEKCGRQKLEVLDLDHNTITGVEPSYQRFTCLKSLSLRHVSISALDLSLLVAACPKIESLALDFLEVVTSDPQSTMELTSHTLKSLFAKSVGVDKIILDTDNLEVLNLNALNLDLFELIGKGTLKHLKIDDVSVTHMDIGESTDHLEVVDVSNFTIVRPKLYSMISRASNLRMLRFWGVVFDDEDEIVDSETIAVSFPLLRHLSLSYELRDGLLHYSLQGSSPLDNVSVLELGWTVISEHFGPWVFGMIERCPNLKKLVIHGVLSEAKTREERQMLASFTSFIVCLMRKYVHVDVQFEYE

SEQ ID NO: 6949 - protein, 724 aa, Oryza sativa
  Clone ID: PAT_MRT4530_75414C.1.pep
YKHTFLTSPNSTFSCGFYPIGTNAFTFSIWLTNTAGKTVVWSANRRSPVNGHGSKVLLHDDGYLVLIDVNGSTVWTSTMSAGEGSTAALLESGNLVVRDSSGTILWESFTSPTDTLLPAQQLTKDTRLVSGYHSLYFDNDNSLRLVYNGPEFSSIYWPNDDYTMFRDGIKVKNNSRLAVLDDKGGFFSSDALTVQASDFGLGIKRRLTLDYDGNLRIYSLDASDGSWTVTWQAIVEMHYVHGMCGKNGICEYLPELRCSCPPGFEMVDPQNWSKGCRPTFSYNCGKERYKFIEIPQTDFYDFDLGFNQSISFEECQNICLSTCSCIAFSYRLTGTGVCYPKGLLFNGYKSPAFPGTLYLKVPYSTNLQASSTQSALTCSPGTEGGYMMIRNQFRGFTYQELKEATGKFREELGRGSSGIVYRGVLKDKRVIAVKKLIDVTRGEVEFQAEMSVIGKINHMNLVRIWGFCSEGKHKLLVYEYVENESLDRYLFNTMGTERLLVWKDRFNIALGAARALAYLHHDCLEWVFHCDVKPENILLTRDFEAKIADFGLSKLYKREGSSFNFSQMRGTMGYMAPEWATNLPINAKVDVYSYGVVLLEIVAGQRISSHTTREGKVTKLKQFIENVKEALATGDTKCIVDAIRFGMKQPRAADIVRPDSTNDGCNSCSRMPRRPLCWRSSCARSAALGERRTPWPQPLLRGGRAVGRGRAAAGAPLRQRWVME

SEQ ID NO: 6950 - protein, 772 aa, Oryza sativa
  Clone ID: PAT_MRT4530_75416C.1.pep
MAKFLYLIILSFFLSLLVFCTSASPRLTLHTGSSFSVEDYKHTFLTSPNSTFSCGFYPIGTNAFTFSIWLTNTAGKTVVWSANRRSPVNGHGSKVLLHDDGYLVLIDVNGSTVWTSTMSAGEGSTAALLESGNLVVRDSSGTILWESFTSPTDTLLPAQQLTKDTRLVSGYHSLYFDNDNSLRLVYNGPEFSSIYWPNDDYTMFRDGIKVKNNSRLAVLDDKGGFFSSDALTVQASDFGLGIKRRLTLDYDGNLRIYSLDASDGSWTVTWQAIVEMHYVHGMCGKNGICEYLPELRCSCPPGFEMVDPQNWSKGCRPTFSYNCGKERYKFIEIPQTDFYDFDLGFNQSISFEECQNICLSTCSCIAFSYRLTGTGVCYPKGLLFNGYKSPAFPGTLYLKVPYSTNLQASSTQSALTCSPGSQEIATPSDHPRWLYFYIFPGVFGALELIFILTAWWFLSIRNDIQNSAEGGYMMIRNQFRGFTYQELKEATGKFREELGRGSSGIVYRGVLKDKRVIAVKKLIDVTRGEVEFQAEMSVIGKINHMNLVRIWGFCSEGKHKLLVYEYVENESLDRYLFNTMGTERLLVWKDRFNIALGAARALAYLHHDCLEWVFHCDVKPENILLTRDFEAKIADFGLSKLYKREGSSFNFSQMRGTMGYMAPEWATNLPINAKVDVYSYGVVLLEIVAGQRISSHTTREGKVTKLKQFIENVKEALATGDTKCIVDGRLHGQFNSEQAMVMLIVAVSCLEEERSKRPTMHEVVKSLLDCEE

SEQ ID NO: 6951 - protein, 516 aa, Oryza sativa
  Clone ID: PAT_MRT4530_75440C.1.pep
MADIDMANIDMGKILAGLENDDARVPKTKLVCTLGPASRSVPMLEKLLRAGMNVARFNFSHGTHEYHQETLDNLRQAMHNTGVLCAVMLDTKGPEIRTGFLKDGKPIKLTKGQELTVTTDYEIKGDENMITMSYKKLPVDVKPGNVILCADGTISLTVLSCDPKAGTVRCRCENTAMLGERKNCNLPGIVVDLPTLTEKDKEDILGWGVPNDIDMIALSFVRKGSDLVTVRQLLGQHAKRIKLMSKVENQEGVVNFDEILRETDAFMVARGDLGMEIPVEKIFLAQKMMIYKCNLAGKPVVTATQMLESMIKSPRPTRAEATDVANAVLDGTDCVMLSGESAAGAYPEVAVKIMARICVEAESSLDNEAVFKEMIRSAPLPMSPLESLASSAVRTANKAKAALIVVLTRGGTTAKLVAKYRPRVPILSVVVPVLTTDSFDWTISSEGPARHSLIYRGLVPLLAEGSAKATDSESTEVILDAALKSAVQKQLCKPGDAVVALHRIGVASVIKICIVK

SEQ ID NO: 6952 - protein, 964 aa, Oryza sativa
  Clone ID: PAT_MRT4530_7604C.1.pep
MYFLVVIMVVVDASEFGAEGFDPKRWINAALDARHPSEPLDRFLADAEERLRSAADDAAAALERDSADALRRVPLACRDALRLRDDAVSLRSHLASVLQSLSQVRPRSPASWIWISQFTRAQFYVHVNFEYAVEDIQIQQFSDAHKTMPIVYYNGIPSLISFSSYRYSVPSTFHKFCITDDDDFFNQAEGSSAESITALARIDTVKQRMEAAYATLQDAAGLAQLSQSVEDVFSSGDLPKAAETLATMRHCLSAVGEVAEFANVRKQLEVLEERLDDMVQPRLVDALSNRKPTNFGWKVDAVQDLRGILIRIGRFKSLEVQYTKIHVKPLKKLWEDFDLKQRAKRVEMEKYGGESINSLSFASWLPNFYDETLLYLEQEWKWCLTAFPEEYKSLVPKVLVETMSELNSSFVSRVNLATGDAVPETRSVAKGILDVLSGDLPKSTKLQNKHLGALIDLHNMTGTFARNIQHLFSESDLLVLLNTLKAIYSPYETFKARYGQMERALLSAEMAGIDIRGAIARGVGAQGIELSETVRRMEESIPQIIVLLEAAVERCISLTGGSEADELVLALDDIMLQYISNLQETLKSLRIVCGVDNTAHSDSSKKEAGLEKKEAQRLVDVSEEEEWSIVQGALQILTVADCLTSRTSVFEASLRATLARIGTNFSISGFGSSLDKSTAANGDENAEVPITGRAALDIAAIRLTDLPDKSKKLFTVLEQASYIFLNYLASVTTLELSHVSLICLNSLIANLGGSIKLDYLSKDPRFHALPLTSQRVAAFSDTVNELVYDVLISKVRQRLNEVARLPIWSSVEEPGGLPLPSFSAYPQAYVTSVGEYLLTLPQQLEPLAEGISGGEAGNEEAQFFATEWIFKVAEGATALFMEQLRGIHYITDRGAQQLAADIEYLSNVLSALSMPIPPFLATFHTCISTPRDQVRDLIKSDGGSQLDLPTAHLVCKIRRISSSD

SEQ ID NO: 6953 - protein, 132 aa, Oryza sativa
  Clone ID: PAT_MRT4530_7616C.1.pep
MSEHAVKEDVVRRLKLLSAKGAGRVAINAALLEEISRPTALLKCKPEEEFALSRALRVPEKIGTSKGVLAKEERLVRRTRRVALVTRPTPEKTIPDTRRKLNVEHRIPNKKKLGDDRDNEGAADVRNPGVVC

SEQ ID NO: 6954 - protein, 497 aa, Oryza sativa
  Clone ID: PAT_MRT4530_76302C.1.pep
MVLSHASSGRDDAVRCTFATRYACETLPRFRMPEQSIPREAAYQIINDELMLDGNPRLNLASFVTTWMEPECDKLIMDSVNKNYVDMDEYPVTTELQNRCVNMIAHLFNAPIKEDETAIGVGTVGSSEAIMLAGLAFKRKWQNKRKEQGKPCDKPNIVTGANVQVCWEKFARYFEVELKEVKLSEGYYVMDPVKAVEMVDENTICVAAILGSTLTGEFEDVKLLNNLLTEKNKETGWDVPIHVDAASGGFIAPFLYPELEWDFRLPLVKSINVSGHKYGLVYPGVGWVIWRSKEDLPEELIFHINYLGTDQPTFTLNFSKGSSQIIAQYYQLIRLGFEGYKNIMQNCMENTAILREGIEATGRFEILSKEAGVPLVAFSLKDSGRYTVFDISEHLRRFGWIVPAYTMPANAEHVAVLRVVIREDFSRSLAERLVSDIVKILHELDAHSAQVLKISSAIAKQQSGDDGVVTKKSVLETEREIFAYWRDQVKKKQTGIC

SEQ ID NO: 6955 - protein, 811 aa, Oryza sativa
  Clone ID: PAT_MRT4530_76315C.1.pep
MRKWALSSALLLLLLLTTLPDPAKKLQVNADDSTDELVDPPKVEEKIGGVPHGLSTDSEVVQREAESISRKTLRSSAEKFEFQAEVSRLMDIIINSLYSNKDIFLRELISNASDALDKIRFLALTDKEVLGEGDTAKLEIQIKLDKEKKILSIRDRGIGMTKEDLIKNLGTIAKSGTSAFVEKMQTGGDLNLIGQFGVGFYSVYLVADYVEVISKHNDDKQHVWESKADGSFAISEDTWNEPLGRGTEIRLHLRDEAKEYVEEDKLKDLVKKYSEFINFPIYLWATKEVDVEVPADEDESSESSEEEESSPESTEEEETEESEEKKPKTKTVKETTTEWELLNDVKAIWLRSPKEVTEEEYTKFYHSLAKDFGDDKPLSWSHFTAEGDVEFKALLFVPPKAPHDLYESYYNSNKSNLKLYVRRVFISDEFDELLPKYLSFLKGLVDSDTLPLNVSREMLQQHSSLKTIKKKLIRKALDMIRKLAEEDPDEYSNKDKTDEEKSAMEEKKGQYAKFWNEFGKSVKLGIIEDATNRNRLAKLLRFESTKSEGKLASLDEYISRMKPGQKDIFYITGSSKEQLEKSPFLERLTKKNYEVIYFTDPVDEYLMQYLMDYEDKKFQNVSKEGLKLGKDSKLKDLKESFKELTDWWKKALDTESVDSVKISNRLSDTPCVVVTSKYGWSANMEKIMQSQTLSDASKQAYMRGKRVLEINPRHPIIKELRDKVAQDSESESLKQTAKLVYQTALMESGFNLPDPKDFASSIYRSVQKSLDLSPDAAVEEEEEVEEAEVEEKESSNIKEEAEPSSYDKDEL

SEQ ID NO: 6956 - protein, 232 aa, Oryza sativa
  Clone ID: PAT_MRT4530_76352C.1.pep
MAPSLLGGFTKSLAMTVLSEIGDKTFFAAAILAMRYPRKLVLAGCLTSLTVMTALSVSLGWVAPNLISRKWTHHVTTLLFFVFGILSLWEGFKEDGDSEELAEVEAELDANFKSNKAESKSKSKANDDKKKQQRPFVLQFFSPIFIKAFSITFFGEWGDKSQIATIGLAADENPFGVVLGGVLAQALCTTAAVMGGKSLASQISEKMVGLSSGVLFLLFGIMSYLSGPEGEL

SEQ ID NO: 6957 - protein, 194 aa, Oryza sativa
  Clone ID: PAT_MRT4530_76521C.1.pep
MGRGKIEIKRIENSTNRQVTFSKRRSGILKKAREISVLCDAEVGVVIFSSAGKLYDYCSPKTSLSRILEKYQTNSGKILWDEKHKSLSAEIDRIKKENDNMQIELRHLKGEDLNSLQPKELIMIEEALDNGIVNVNDKLMDHWERHVRTHQQDIALSGSMRDLELGYHPDRDFAAQMPITFRVQPSHPNLQENN

SEQ ID NO: 6958 - protein, 209 aa, Oryza sativa
  Clone ID: PAT_MRT4530_76522C.1.pep
MGRGKIEIKRIENSTNRQVTFSKRRSGILKKAREISVLCDAEVGVVIFSSAGKLYDYCSPKTSLSRILEKYQTNSGKILWDEKHKSLSAEIDRIKKENDNMQIELRHLKGEDLNSLQPKELIMIEEALDNGIVNVNDKLMDHWERHVRTDKMLEDENKLLAFKLHQQDIALSGSMRDLELGYHPDRDFAAQMPITFRVQPSHPNLQENN

SEQ ID NO: 6959 - protein, 608 aa, Oryza sativa
  Clone ID: PAT_MRT4530_76548C.1.pep
MDTTIGSVPTASDAAAPAPAANSAPREATLGRHLARRLAEVGARDVFTVPGDFNLTLLDELEAEAGAGHGGVRLVGCCNELNAAYAADGYARARGGGVGACAVTFTVGGLSAINAVAGAFSENLPVVCIVGGPNSNDYGSNRILHHTIGLPDFTQELRCFQTVTCYQAVVNNLEDAHEQIDAAISTAIKESKPVYISISCNLPSIPHPTFSRHPVPFFLSPRLSNQMNLEAAVETAAAFLNKAVKPVLVGGPKMRVAKACKSFVELADACGYPVAVMPSAKGLVPEHHPRFIGTYWGAVSTPFCAEIVESADAYLFAGPIFNDYSSVGYSLLLKKEKAIIVQPDRVVIGHGPAFGCVLMKDFLHALSARLKKNTAAYENYRRIYVPPGEPPLSEPGEPLRVNVLFQHIQKMLSANSAVIAETGDSWFNCQKLKLPEGCGYEFQMQYGSIGWSVGATLGYAKAAKDKRVIACIGDGSFQVTAQEVSTMLRWGQKSIIFLINNGGYTIEVEIHDGPYNVIKNWNYTGVVEAFHNGEGKCYTAKVRTEEELKEAIEEAQGPKKDCLCFIEVIVHKDDTSKELLEWGSRVSAANSRPPNPQVSTSDIRLAMF

SEQ ID NO: 6960 - protein, 581 aa, Oryza sativa
  Clone ID: PAT_MRT4530_77185C.1.pep
MTICSCEETINEFEMLTRDAARVQKDTLKKILEINASAEYLQNFGLGGRTDAESYKSCIPLCVHNDIEPYIQRIVDGDTSPVVTGEPITNLSLSSGTTHGKPKFIPFNDELLETTLQIYRTSYAFRNREYPIGQGKALQFVYGSKQVITKGGILATTATTNLYRRQRYKEGMKDIQSQCCSPDEVIFGPDFHQSLYCHLLCGLIYSEEVHSVFSTFAHSLVHAFQTFEEVWEDLCTDIRDGVLSKKVTAPSIREAVSKILKPNPELADSIYKKCIGLSNWYGVIPALWPNAKYVYGIMTGSMEPYLKKLRHYAGNLPLISADYGASEGWVGSNIDPTVPPEQVTYAVLPQVGYFEFIPLEKPIGEETENSASIHYIESDPVGLTEVEVGKIYEVVITNFAGLYRYRLGDVVKIARFHNSTPELQFICRRSLVLSINIDKNTEKDLQLAVEEASKFLEGEKLEVMDFTSFVERSSDPGRYVIFWELSGDASDEVLSSCANALDLAFIDAGYTGSRKIKTIGPLELRILRKGTFKEILDHFLSLGGAVSQFKTPRFVNPSNSKVLQILSRNVTQSYFSTAYGF

SEQ ID NO: 6961 - protein, 302 aa, Oryza sativa
  Clone ID: PAT_MRT4530_77608C.1.pep
MSTCDSMKSPDFEYIDNGDSSSVLGSLQRRANENLRISEDRDVEETKWKKDAPSPMEIDQICDVDNNYEDPQLCATLASDIYMHLREAETRKHPSTDFMETLQKDVNPSMRAILIDWLVEVAEEYRLVPDTLYLTVNYIDRYLSGNEINRQRLQLLGVACMLIAAKYKEICAPQVEEFCYITDNTYFRDEDPALHLEFLANYVAELSLLEYNLLSYPPSLVAASAIFLAKFILQPAKHPWNSTLAHYTQYKSSELSDCVKALHRLFCVGPGSNLPAIREKYTQHKIYAADVIDLNMMIQRDS

SEQ ID NO: 6962 - protein, 497 aa, Oryza sativa
  Clone ID: PAT_MRT4530_77611C.1.pep
MSSNLAASRRSSSSSSVAAAAAAKRPAVGEGGGGGGGKAAAGAAAAKKRVALSNISNVAAGGGAPGKAGNAKLNLAASAAPVKKGSLASGRNVGTNRASAVKSASAKPAPAISRHESATQKESVLPPKVPSIVPTAALAPVTVPCSSFVSPMHSGDSVSVDETMSTCDSMKSPEFEYIDNGDSSSVLGSLQRRANENLRISEDRDVEETKWKKDAPSPMEIDQICDVDNNYEDPQLCATLASDIYMHLREAETRKRPSTDFMETIQKDVNPSMRAILIDWLVEVAEEYRLVPDTLYLTVNYIDRYLSGNEINRQRLQLLGVACMLIAAKYEEICAPQVEEFCYITDNTYFRDECWNESNSNNSLIAYNRRFVRVAQVSDELFIVQDPALHLEFLANYVAELSLLEYNLLSYPPSLVAASAIFLAKFILQPTKHPWNSTLAHYTQYKSSELSDCVKALHRLFSVGPGSNLPAIREKYTQHKIYAADVIDLNMMIQRDS

SEQ ID NO: 6963 - protein, 518 aa, Oryza sativa
  Clone ID: PAT_MRT4530_77613C.1.pep
SPPAAAALATLAAAAGGGGFRWWLPSADVEQPSLPPLVVVAAAKRPAAGEGGGKAAAGAAAAKKRVALGNISNVAAAANNAKFNSATWAAPVKKGSLASGRNVGMNRVSAVKSASAKPAPAISRHESAPQKESVLPPKVPSIVPTAALAPVTVPCSSFVSPMHSGDSVSVDETMSTCDSMKSPEFEYIDNGDSSSVLGSLQRRANENLRISEDRDVEETKWKKDAPSPMEIDQICDVDNNYEDPQLCATLASDIYMHLREAETRKRPSTDFMETIQKDVNPSMRAILIDWLVEVAEEYRLVPDTLYLTVNYIDRYLSGNEINRQRLQLLGVACMLIAAKYEEICAPQVEEFCYITDNTYFRDEVLEMEASVLNYLKFEVTAPTAKCFLRRFVRVAQVSDEDPALHLEFLANYVAELSLLEYNLLSYPPSLVAASAIFLAKFILQPTKHPWNSTLAHYTQYKSSELSDCVKALHRLFSVGPGSNLPAIREKYTQHKYKFVAKKPCPPSIPTEFFRDATC

SEQ ID NO: 6964 - protein, 296 aa, Oryza sativa
  Clone ID: PAT_MRT4530_77697C.1.pep
MPVVAASGHGLRRTMYSLYSKGSFLLLLGRRCIGGGGAPPGEGMGMRCSGDDEDHLIPRKYHLIRGRAQCTLRGPNVSVVAVHQQNTPRVRESAAAATSNRDVYRSVTTCARASERMSAAEERGDRQERDDGEGGEEERRERGGVGGLVDRAKGFVAEKIAKIPKPDATLDRVSFKGVSRECITLHSHLDVNNPYSHRIPICELTYTFKSGDKVIASGTMPDPGWIAASGTTNLELPVKVPYDFIVSLIKDVSGDWDIDYVLEVGITIDLPVVGSFTIPLATEGEMKLPTFRDLLF

SEQ ID NO: 6965 - protein, 164 aa, Oryza sativa
  unsure (1)..(164): unsure at all Xaa locations
  Clone ID: PAT_MRT4530_77850C.1.pep
WIPGLQARSALSLCFDSIRFDLLHLVAAAAADKDWLRGSIFLIIATLAWASLFILQAATLKRYDAPLSLTTLICFVGTLQAIVVTFAMEHSMSVWKIGFDMNLLAAAYAGIVTSSIAYYVQGLVMQSRGPVFASAXSPLMMIIVAIMGSFILAENIYLGGIIGS

SEQ ID NO: 6966 - protein, 456 aa, Oryza sativa
  Clone ID: PAT_MRT4530_77859C.1.pep
MGPSAAALRAAAVVGLVVAVGLALPPLAAALRPLRERVASAGAASSSGSWGDEHAFFKRDENEISPYSWNITGTYKGSWNFAGSTNGSSRFLEFTKLKGDAVLELLSTPTKISGVHYVQGSVTFHDVLDNAHDRGVAQISGADGEPLQEEDYFLSNPYHLNMSVQFGPLAFHNLKDSSFEVVYIILQGAAKVSILMIGQQAIMDAYLCLLHLTAGILVESLFNAFATAAFFKFVVFSIFEMRYLLAIWKASRPLNSGEGWEVMRRELSVLYSRFYGILLGGILLMYELHNFLRPLLFLMYSFWVPQIVTNVIRDTRKPLHPQYILGMTITRLAIPLYIFGCPSNFMRIEPDKTWCIAVTIFMGIQAAVLLLQHYFGSRCFIPHQILPEKYCYHRKVEDNTNQPIDCVICMTTIDLTQRTSEYMVAPCEHIFHSGCLQRWMDIKMECPTCRRSLPPA

SEQ ID NO: 6967 - protein, 532 aa, Oryza sativa
  unsure (1)..(532): unsure at all Xaa locations
  Clone ID: PAT_MRT4530_77861C.1.pep
ERVASAGAASSSGSWGDEHAFFKRDENEISPYSWNITGTYKGSWNFAGSTNGSSRFLEFTKLKGDAVLELLSTPTKISGVHYVQGSVTFHDVLDNAHDRGVAQIRLEGVYIWPFRQLRMVANSGADGEPLQEEDYFLSNPYHLLRIFSSQVFQETSEEKNRRKNSLTYDMEKHCSVEIAAKVVRVSSNLNEGEHEKYRLEGLMESTAVDDDGECFSPILLNATSLNVEVYYNKAVNYTLMVTFISFLQVLLLIRQMEHSNTQSGAAKVSILMIGQQAIMDAYLCLLHLTAGILVESLFNAFATAAFFKFVVFSIFEMRYLLAIWKASRPLNSGEGWEVMRRELSVLYSRFYGILLGGILLMYELHNFLRPLLFLMYSFWVPQIVTNVIRDTRKPLHPQYILGMTITRLAIPLYIFGCPSNFMRIEPDKTWCIAVTIFMGIQAAVLLLQHYFGSRCFIPHQILPEKYCYHRKVEDNTNQPIDCVICMTTIDLTQRTSEYMXAPCEHIFHSGCLQRWMDIKMECPTCRRSLPPA

SEQ ID NO: 6968 - protein, 487 aa, Oryza sativa
  Clone ID: PAT_MRT4530_77880C.1.pep
MVSQVVAEEKPQLLSKKAGCNSHGQDSSYFLGWQEYEKNPFDPVSNPSGIIQMGLAENQLSFDLLEEWLEKNPHALGLRREGGGASVFRELALFQDYHGLPAFKNALARFMSEQRGYKVVFDPSNIVLNAGATSANEALMFCLADHGDAFFIPTPYYPGFDRDLKWRTGAEIVPVHCASANGFRVTRAALDDAYRRAQKRRLRVKGVLITNPSNPLGTASPRADLETIVDFVAAKGIHLISDEIYAGTAFAEPPAGFVSALEVVAGRDGGGAGVSDRVHVVYSLSKDLGLPGFRVGAIYSANAAVVSAATKMSSFGLVSSQTQYLLAALLGDRDFTRSYVAENKRRIKERHDQLVDGLREIGIGCLPSNAGLFCWVDMSHLMRSRSFAGEMELWKKVVFEVGLNISPGSSCHCREPGWFRVCFANMSAKTLDVAMQRLRSFVDSATGGGDNAALRRAAVPVRSVSCPLAIKWALRLTPSIADRKAER

SEQ ID NO: 6969 - protein, 233 aa, Oryza sativa
  Clone ID: PAT_MRT4530_77902C.1.pep
MAAKIFCFLMLLGLSASVATATIFPQCSQAPIASLLPPYLSPAVSSMCENPIVQPYRIQQAIATGILPLSPLFLQQPSALLQQLPLVHLVAQNIRAQQLQQLVLANLAAYSQQHQFLPFNQLAALNSAAYLQQQLPFSQLVAAYPQQFLPFNQLAALNSAAYLQQQQLLPFSQLADVSPAAFLTQQQLLPFYLHAMPNAGTLLQLQQLLPFNQLALTNSTVFYQQPIIGGALF

SEQ ID NO: 6970 - protein, 99 aa, Oryza sativa
  unsure (1)..(99): unsure at all Xaa locations
  Clone ID: PAT_MRT4530_77952C.1.pep
MAAEKHHHHLLHHKKDVVPATCVDSDREGVYTSETVTTEVVASRQHXCERYKKEEKXQHKHKQHXSLGLCPRRSAFGLVEKHXAKNDPENAHRHKITEE

SEQ ID NO: 6971 - protein, 645 aa, Oryza sativa
  Clone ID: PAT_MRT4530_78529C.1.pep
MAPALSRSLGASSVAALRPTPSRGRGPTLRSAVAVQGRGAAAVAARGVRWEAGRRKGKGRMVGVRCEAAVTEKPAGEEEAAGEQFEYQAEVSRLLDLIVHSLYSHKEVFLRELVSNASDALDKLRFLSVTDSSVLSDGGELEIRIKPDPEAGTITITDTGIGMTKDELKDCLGTIAQSGTSKFLKALKENKDLGADNGLIGQFGVGFYSAFLVAEKVVVSTKSPKADKQYVWEAMADSSSYVIKAETWAEKMLTRGTQITLFLRDDDKYEFADPGRIQGLVKNYSQFVSFPIYTWQEKSRTVEVEEEEPKEGEEATEGEKKKKKKTITEKYWDWELANETKPIWMRNPKEVEKTEYNEFYKKAFNEFLDPLAYTHFTTEGEVEFRSVLYIPGMAPLSNEEIMNPKTKNIRLYVKRVFISDDFDGELFPRYLSFVKGVVDSNDLPLNVSREILQESRIVRIMRKRLVRKTFDMIQEIAERDDEEDYKKFWESFGKFVKLGCIEDTGNHKRLSPLLRFYSSKNETDLISLDQYVENMPENQKAIYYIATDSLQSAKTAPFLEKLVQKDIEVLYLIEPIDEVAIQNLQTYKEKKFVDISKEDLELGDEDEDKENESKQEYTLLCDWIKQQLGDKVAKVQISKRLSSSP

SEQ ID NO: 6972 - protein, 242 aa, Oryza sativa
  Clone ID: PAT_MRT4530_78867C.1.pep
MRKAYKDSLKVLEADIQHANTLASEFPREYDGACLQMRLSYSPAAHIFLFLVQWTDCSLAGALGLLRILVYKVYVDGTTTMSTHERKASIKEFYAVIFPSLLQLQRGITDTEDKKQKAVCMERYRRRDEDERNILSEIDAEREEECGICMEMNSKVVLPNCTHNMCLRCYQDWNSRSQSCPFCRDNLKKTDPGDLWIYVEDQDVVDLETVSRENLRRLFMYINKLPLIVPDVIFSIYDSHIK

SEQ ID NO: 6973 - protein, 336 aa, Oryza sativa
  Clone ID: PAT_MRT4530_79066C.1.pep
MAPLGDGAAAAAAAEPNLVVSFGEMLIDFVPDVAGVSLAESGGFVKAPGGAPANVACAISKLGGSSAFVGKFGDDEFGHMLVDILKKNGVNAEGCLFDEHARTALAFVTLKSNGEREFMFYRNPSADMLLTEAELNLDLIRRAKIFHYGSISLITEPCRSAHVAAMRAAKSAGILCSYDPNVRLPLWPSEDAARAGILSIWKEADFIKVSDDEVAFLTQGDANDEKNVLSLWFDGLKLLIVTDGEKGCRYFTKDFKGSVPGFSVNTVDTTGAGDAFVGSLLVNVAKDDSIFHNEEKLREALKFSNACGAICTTKKGAIPALPTVAVAQELISKAAN

SEQ ID NO: 6974 - protein, 91 aa, Oryza sativa
  Clone ID: PAT_MRT4530_79068C.1.pep
MSGRGKGGKGLGKGGAKRHRKVLRDNIQGITKPAIRRLIYEETRGVLKIFLENVIRDAVTYTEHARRKTVTAMDVVYALKRQGRTLYGFGG

SEQ ID NO: 6975 - protein, 174 aa, Oryza sativa
  unsure (1)..(174): unsure at all Xaa locations
  Clone ID: PAT_MRT4530_79070C.1.pep
EERVEGWMREXIAEIVRHIGEAPFLVHLFNDDDGGSGRGGAGRVTVRRETASAESWPDVRRRWGPGGMRRPDGIILVEQIAAAVEEGGASAGAGAAEAARQVWGLVVXARGMECASCYVLDTCRVRSPAGLCTHFCLARAQCFGDPRQXLAPQRLAQPPFPSLVVTAAAAAAAY

SEQ ID NO: 6976 - protein, 237 aa, Oryza sativa
  Clone ID: PAT_MRT4530_79072C.1.pep
MSGRGKGGKGLGKGGAKRHRKGLRDNIQGITKPAIQRLARRGGVKRISGLIYEETRGVLKILVASHPRESPPTGQQQSRGEGKKKKKKRRRRRPWRGVRTPPGATPITTTSSPIPLAFLSLSCVEPPESSSSAAMSGRGKGGKGLGKGGAKRHRKVLRDNIQGITKPAIRRLARRGGVKRISGLIYEETRGVLKIFLENVIRDAVTYTEHARRKTVTAMDVVYALKRQGRTLYGFGG

SEQ ID NO: 6977 - protein, 223 aa, Oryza sativa
  Clone ID: PAT_MRT4530_79077C.1.pep
MRGLGNRARLPEPRNFQSLPTPQNAKFSTAPARGLHSTENPAKRARSAPPPLTRGSLPDPTAGAAPPHHSRGSLPDPTAAHSPPNSIYIHPSQTNRPPHPNLATKKIPNSAVVFVAVAARMSGRGKGGKGLGKGGAKRHRKVLRDNIQGITKPAIRRLARRGGVKRISGLIYEETRGVLKIFLENVIRDAVTYTEHARRKTVTAMDVVYALKRQGRTLYGFGG

SEQ ID NO: 6978 - protein, 103 aa, Oryza sativa; identical to SEQ ID NO: 3555
  Clone ID: PAT_MRT4530_79079C.1.pep

SEQ ID NO: 6979 - protein, 103 aa, Oryza sativa; identical to SEQ ID NO: 3555
  Clone ID: PAT_MRT4530_79080C.1.pep

SEQ ID NO: 6980 - protein, 133 aa, Oryza sativa
  Clone ID: PAT_MRT4530_79083C.1.pep
VRPGRPGSKPKKSPNLKSSSVSKLSSSSSDMSGRGKGGKGLGKGGAKRHRKVLRDNIQGITKPAIRRLARRGGVKRISGLIYEETRGVLKIFLENVIRDAVTYTEHARRKTVTAMDVVYALKRQGRTLYGFGG

SEQ ID NO: 6981 - protein, 103 aa, Oryza sativa; identical to SEQ ID NO: 3555
  Clone ID: PAT_MRT4530_79084C.1.pep

SEQ ID NO: 6982 - protein, 844 aa, Oryza sativa
  Clone ID: PAT_MRT4530_79184C.1.pep
MNNTRLNGGLQHRSMGCSPRLSLRRMADLQEPLVRPKRKKVLVDYLVKFRWILVIFVVLPISALIYFNIYLGDVWSAMKSEKRRQKEHDDNVQKVVKRLKQRNPKKDGLVCTARKPWIAVGMRNVDYKRARHFEVDLSAFRNILEIDRERMVAKVEPLVNMGQITRATCPMNLALAVVAELDDLTVGGLINGYGIEGSSHLYGLFSDTVVAVEVVLADGRVVRATKDNEYSDLFYGIPWSQGTLGFLVSAEIKLIPIKEYMRLTYTPVKGSLKEIAQGYCDSFAPRDGDPAKVPDFVEGMVYTENEGVMMTGVYASKEEAKKKGNKINCVGWWFKPWFYQHAQTALKKGEFVEYIPTREYYHRHTRCLYWEGKLILPFGDQFWFRFLLGWLMPPKVSLLKATQGESIRNYYHDNHVIQDMLVPLYKVGDALEFVHKEMEVYPLWLCPHRLYKLPVKTMVYPEPGFEHHHRQGDTSYAQMFTDVGVYYAPGAVLRGEEFNGALAVHRLEQWLIENHSYQPQYAVSELNEKDFWRMFDASHYEHCRQKYGAVGTFMSVYYKSKKGRKTEKEVQEAEAAILEPAYADEADRGGALPPPAASTHPVLAGGAKPPVTIPDPIAALLSSTPIPSSSDASARPPPYPYQPESAADPTRQAFTAEQINETTYVDIHGNKSVFDSLRNNPKVHYDGRRFSYKSKHDLKGKDQLLVLVRKYPEGLAVVEVKDAYPTVMEDLQALKAAGEVWLLSNMDSQEDIVYPNDPKAKIKVDDDLKQLFREMELPRDMVDIEKELQKNGIKPMTNTAKRRAAAQINGVQPKAKPKKKQREITRRTKLTNAHLPELFQNLNT

SEQ ID NO: 6983 - protein, 561 aa, Oryza sativa
  Clone ID: PAT_MRT4530_79187C.1.pep
MADLQEPLVRPKRKKVLVDYLVKFRWILVIFVVLPISALIYFNIYLGDVWSAMKSEKRRQKEHDDNVQKVVKRLKQRNPKKDGLVCTARKPWIAVGMRNVDYKRARHFEVDLSAFRNILEIDRERMVAKVEPLVNMGQITRATCPMNLALAVVAELDDLTVGGLINGYGIEGSSHLYGLFSDTVVAVEVVLADGRVVRATKDNEYSDLFYGIPWSQGTLGFLVSAEIKLIPIKEYMRLTYTPVKGSLKEIAQGYCDSFAPRDGDPAKVPDFVEGMVYTENEGVMMTGVYASKEEAKKKGNKINCVGWWFKPWFYQHAQTALKKGEFVEYIPTREYYHRHTRCLYWEGKLILPFGDQFWFRFLLGWLMPPKVSLLKATQGESIRNYYHDNHVIQDMLVPLYKVGDALEFVHKEMEVYPLWLCPHRLYKLPVKTMVYPEPGFEHHHRQGDTSYAQMFTDVGVYYAPGAVLRGEEFNGALAVHRLEQWLIENHSYQPQYAVSELNEKDFWRMFDASHYEHCRQKYGAVGTFMSVYYKSKKGRKTEKEVQEAEAAILEPAYADEA

SEQ ID NO: 6984 - protein, 429 aa, Oryza sativa
  Clone ID: PAT_MRT4530_79269C.1.pep
MTSSGAPPPAAMAVDDAEDDQLASMSTEDIVRASRLLDNEIRVLKDELQRTNLELESFKEKIKENQEKIKLNKQLPYLVGNIVEILEMNPEDEAEEDGANIDLDSQRKGKCVVLKTSTRQTIFLPVVGLVDPDKLKPGDLVGVNKDSYLILDTLPSEYDSRVKAMEVDEKPTEDYNDIGGLEKQIQELVEAIVLPMTHKDRFQKLGIRPPKGVLLYGPPGTGKTLMARACAAQTNATFLKLAGPQLVQMFIGDGAKLVRDAFQLAKEKAPCIIFIDEIDAIGTKRFDSEVSGDREVQRTMLELLNQLDGFSSDERIKVIAATNRADILDPALMRSGRLDRKIEFPHPSEEARARILQIHSRKMNVNPDVNFEELARSTDDFNGAQLKAVCVEAGMLALRRDATEVTHEDFNEGIIQVQAKKKSSLNYYA

SEQ ID NO: 6985 - protein, 533 aa, Oryza sativa
  Clone ID: PAT_MRT4530_79285C.1.pep
MAGGGAAPPPKQEELQPHQVKDQLPSVSYCITSPPPWPEAVILGFQHYIVMLGTSVIIPSALVPQMGGGNEEKARVIQTLLFVAGINTLCQSFFGTRLPAVMGGSYTIVAPTISIILAGRYSNEADPHEKFLRTMRGTQGALIIASTIQIILGFSGLWRNVVRLLSPLSAVPLISLAGFGLYELGFPGVAKCVEIGLPEIILLLVFSQYLPHVIHVAKPVFDRFAVIFTIAIVWLYAYILTASGAYKNARPKTQVHCRVDRSGIISGAPWIRVPFPFQWGAPTFDAGESFAMMMASFVALVESTGTFIAVSRYASATMIPPSVLGRGIGWQGIGTLIGAFFGTANGTAVSVENAGLLALTHVGSRRVVQISAGFMIFFSILGKFGAIFASIPLPIFAALYCIFFAYIGACGLSFLQFCNLNSFRTKFIVGFSFFMGLSVPQYFNEYTSVAGYGPVHTGARWFNDMINVPFASKPFVAGLIAYFLDNTIQRRDNGVRRDRGYHWWDKFRSFKTDTRSEEFYSLPFNLNKFFPSV

SEQ ID NO: 6986 - protein, 487 aa, Oryza sativa
  Clone ID: PAT_MRT4530_79466C.1.pep
MGMERPQEKVATTTTAAFNLAESGYADRPDLDDDGREKRTGTLVTASAHIITAVIGSGVLSLAWAIAQLGWVIGPAVLVAFSVITWFCSSLLADCYRSPDPVHGKRNYTYGQAVRANLGVAKYRLCSVAQYVNLVGVTIGYTITTAISMGAIKRSNWFHRNGHDAACLASDTTNMIIFAGIQILLSQLPNFHKIWWLSIVAAVMSLAYSTIGLGLSIAKIAGGAHPEATLTGVTVGVDVSASEKIWRTFQSLGDIAFAYSYSNVLIEIQDTLRSSPAENEVMKKASFIGVSTTTTFYMLCGVLGYAAFGNRAPGNFLTGFGFYEPFWLVDVGNVCIVVHLVGAYQVFCQPIYQFAEAWARSRWPDSAFVNGERVLRLPLGAGDFPVSALRLVWRTAYVVLTAVAAMAFPFFNDFLGLIGAVSFWPLTVYFPVQMYMSQAKVRRFSPTWTWMNVLSLACLVVSLLAAAGSIQGLIKSVAHYKPFSVSS

SEQ ID NO: 6987 - protein, 502 aa, Oryza sativa
  Clone ID: PAT_MRT4530_79467C.1.pep
MGMERPQEKVATTTTAAFNLAESGYADRPDLDDDGREKRTGTLVTASAHIITAVIGSGVLSLAWAIAQLGWVIGPAVLVAFSVITWFCSSLLADCYRSPDPVHGKRNYTYGQAVRANLGVAKYRLCSVAQYVNLVGVTIGYTITTAISMGYLLSTMTNYSSKFGHAIKRSNWFHRNGHDAACLASDTTNMIIFAGIQILLSQLPNFHKIWWLSIVAAVMSLAYSTIGLGLSIAKIAGGAHPEATLTGVTVGVDVSASEKIWRTFQSLGDIAFAYSYSNVLIEIQDTLRSSPAENEVMKKASFIGVSTTTTFYMLCGVLGYAAFGNRAPGNFLTGFGFYEPFWLVDVGNVCIVVHLVGAYQVFCQPIYQFAEAWARSRWPDSAFVNGERVLRLPLGAGDFPVSALRLVWRTAYVVLTAVAAMAFPFFNDFLGLIGAVSFWPLTVYFPVQMYMSQAKVRRFSPTWTWMNVLSLACLVVSLLAAAGSIQGLIKSVAHYKPFSVSS

SEQ ID NO: 6988 - protein, 800 aa, Oryza sativa
  unsure (1)..(800): unsure at all Xaa locations
  Clone ID: PAT_MRT4530_79494C.1.pep
QQPAMATLQSAVVFADAADTVAADRPLSGSQRLLVSSRGKFALGFFQPENSIHWYIGIWYNQISKHTPVWVANRGSPISNPDTSQLTIATDGNMVLLDNSRTAIWSTNISKIASNSTVGVILDTGNLVLADASNTSIIHWQSFDHFGNTWLPGGKLGRNKLAGVSTGLVAWKARNDPAPGVFSLELDPNGTSQYLLEWNSTQQXWTSGNWTGRIFTGVPEMTPTGIYPNSLYTFDYVNGENGSYFVYDLKDDSVLTRFVLGEMGQIQFLTWMNGANDWMLFWSQPKAQCDVYSLCGPFSVCTENAMAPCSCLRGFGEQNVGEWLQGDHTSGCRRNVELQCSSNGSVVGRSTDRFYTMGNVRLPSDAESVVATSTDQCEQACLRSCSCTAYSYNGSCSLWHGDLINLQDVSAIGSQGSNAVLIRLAASELSSQKQKHAKKLITIAIVATIVAALMVAALVVILRRRMVKGTTQVEGSLISFTYRDLKSMTKNFSEKLGGGAFGSVFKGSLPDATMVAVKKLEGFHQGEKQFRAEVSTIGNIQHVNLIRLLGFCSEKSRRLLVYEYMPNGSLDKQLFDGRKHVLSWDTRYQIALGIARGLDYLHEKCRDCIIHCDIKPENILLDGSFAPKVADFGLAKLMGRDISRVLTTARGTVGYIEPEWLAGTAVTAKADVFSYGMTLLEIVSGRRNVERREDGTADILPLLAASRLVGGVGDGRREELVSAVVDGRLGGDADMGEAERACRVAFWCIQDDENARPAMATVVQVLEGLVEIGVPPIPRSLQLLADESNYLQFSDLLPSK

SEQ ID NO: 6989 - protein, 329 aa, Oryza sativa
  Clone ID: PAT_MRT4530_80152C.1.pep
MVRLLVISVELKDIKIKKQKKSTGGCGTGVVDRASLGGFVKTQKTNAYHKRFQVKFKRRRQGKTDYRARIRLTNQDKNKYNTPKYRFVVRFTNKDITAQIVYATIAGDIVMAAAYSHELPRYGLEVGLTNYAAAYCTGLLLARRVLKLRGLDQEYEGNIEATGEDYYVEPADERRPFRALLDVGLIRTTTGNRVFGALKGALDGGLDIPHSDKRFAGFKKDEKQLDSDIHRKYIYGGHVADYMRSMAEEEPEKFQAHFSEYLKKGIDADGMEALYKKVHAAIRADPYHGQINQEGTGDPQEIQPQEANLRTEEGQSCRKIECSQLLCWC

SEQ ID NO: 6990 - protein, 358 aa, Oryza sativa
  Clone ID: PAT_MRT4530_80157C.1.pep
MCAIRRKKKKKKNRPGNPNHSFSPTRQIDQHLLPSPRSSPSAAAAAEQQQQASDMGGFVKTQKTHAYFKRFQVKFKRRRQGKTDYRARIRLTNQDKNKYNTPKYRFVVRFTNKDITAQIVYATIAGDIVMAAAYSHELPRYGLEVGLTNYAAAYCTGLLLARRVLTLRGLDQEYEGNVEATGEDYYVEPADERRPFRALLDVGLIRTTTGNRVFGALKGALDGGLDIPHSDKRFAGFKKDEKQLDSDIHRKYIYGGHVADYMRSMAEEEPEKFQAHFSEYLKKGIDADGMESLYKKVHAAIRADPTMAKSTKKEPATHKRYNLKKLTYEQRKASLVERLNALNSSAGADDDDEEEDDE

SEQ ID NO: 6991 - protein, 57 aa, Oryza sativa
  Clone ID: PAT_MRT4530_80270C.1.pep
IYKFYRVVGPHHPGSLTRVHPDRTTHFSRTFIKRSSWFLGLGEAPSDVRKNIGPINT

SEQ ID NO: 6992 - protein, 504 aa, Oryza sativa
  Clone ID: PAT_MRT4530_804C.1.pep
MQPPILLPLLLLLLLLAAASPRPVLSRRHASPPLATETLDVAASLSRARAAVSAEAVPLHQSAAAAVSTEVVGEEHEEGRLALRLHSRDFLPEEQGRQRHASYRSLVLARLRRDSARAAAVSARAAMAADGVSRFDLVPANVTAFEASAAEIQGPVVSGVGLGSGEYFSRVGVGSPARQLYMVLDTGSDVTWVQCQPCADCYQQSDPVFDPSLSTSYASVACDNPRCHDLDAAACRNSTGACLYEVAYGDGSYTVGDFATETLTLGDSAPVSSVAIGCGHDNEGLFVGAAGLLALGGGPLSFPSQISATTFSYCLVDRDSPSSSTLQFGDAADAEVTAPLIRSPRTSTFYYVGLSGLSVGGQILSIPPSAFAMDSTGAGGVIVDSGTAVTRLQSSAYAALRDAFVRGTQSLPRTSGVSLFDTCYDLSDRTSVEVPAVSLRFAGGGELRLPAKNYLIPVDGAGTYCLAFAPTNAAVSIIGNVQQQGTRVSFDTAKSTVGFTTNKC

SEQ ID NO: 6993 - protein, 954 aa, Oryza sativa
  Clone ID: PAT_MRT4530_81538C.1.pep
MVSGNLFHCRRNSWPAEEYVGRTALQLLDFDGGSPPEQAWRRRLNSHANLLKEFSVTFMEAMRMMSLGLRLWSYVREEASHGRKAPIDPFTKEKCKPSASQGVPLGGMGSGSISRGFRGEFKNWHIIPGLCETSPIFVSRDGGNKKYSSVLSPGHHEGLKKCNDSGISSWDWNLSGQHSTYHALFPRAWTVYDGEPDPDLKISCRQISPFIPHDYKDSSLPTSVFVYTLVNTGKDRAKVSLLMTWANSIGGFSHHSGGHFNEPFITAKDNPPVTFAIAACETQNVNVTVLPVFGLSGEGHDSAKQMWDRMKQNGHFDRENFEAGTSMPSSSGETLCAAVSASTWVEPHGRCTVVFGLAWSSPKIKFQKGCTYNRRYTEFYGTSERSAVNLVHDALTKYRIWEEEIEKWQNPILKNEKLPEWYKFTLFNELYFLVAGGTVWTDGQPPVIDEKPSPGSNQQKSSKRGTRDTKQESVKDNHVKLTAEQVTNGGDLANGEEQSVSKYAAVHGPQMAKATNGLGSQEPIPYLLSKNGPENVGKFLYLEGVEYIMWCTYDVHFYASFALLDLFPKIELSIQRDFANAVLYEDRRRMKFLADGTSGIRKVKGAVPHDLGTHDPWHEMNAYNIHDTSKWKDLNPKFVLQVYRDFAATGDMSFGRDVWPAVCAVMDYMNQFDRDGDGLIENDGFPDQTYDAWTVHGISAYCGGLWLAALQAAATMAHRLGDRPFAEKYKLKFIQAKAVYEAKLWNGSYFNYDSGTSSNSRSIQADQLAGQWYAASSGLPPLFDENKIRSALQKIFEFNVMKVKGGRLGAVNGMTPNGKVDETCMQSREIWTGVTYGVAANMLLHGMEHQGFTTAEGIFIAGWSEEGYGYWFQTPEGWTIDGHYRSLIYMRPLAIWAMQWARSPPKAILDAPKVNLMDRIHLSPQMIRAMNEINVRKIAPDNRCFPSSAFRCEC

SEQ ID NO: 6994 - protein, 448 aa, Oryza sativa
  Clone ID: PAT_MRT4530_81540C.1.pep
YRIWEEEIEKWQNPILKNEKLPEWYKFTLFNELYFLVAGGTVWTDGQPPVIDEKPSPGSNQQKSSKRGTRDTKQESVKDNHVKLTAEQVTNGGDLANGEEQSVSKYAAVHGPQMAKATNGLGSQEPIPYLLSKNGPENVGKFLYLEGVEYIMWCTYDVHFYASFALLDLFPKIELSIQRDFANAVLYEDRRRMKFLADGTSGIRKAAATMAHRLGDRPFAEKYKLKFIQAKAVYEAKLWNGSYFNYDSGTSSNSRSIQADQLAGQWYAASSGLPPLFDENKIRSALQKIFEFNVMKVKGGRLGAVNGMTPNGKVDETCMQSREIWTGVTYGVAANMLLHGMEHQGFTTAEGIFIAGWSEEGYGYWFQTPEGWTIDGHYRSLIYMRPLAIWAMQWARSPPKAILDAPKVNLMDRIHLSPQMIRAMNEINVRKIAPDNRCFPSSAFRCEC

SEQ ID NO: 6995 - protein, 98 aa, Oryza sativa
  Clone ID: PAT_MRT4530_81543C.1.pep
MSLGLRLWSYVREEASHGRKAPIDPFTKEKCKPSASQGVPLGGMGSGSISRGFRGEFKNWHIIPGLCETSPVMENQFSVMLSSSFCCCWLINLVYGDA

SEQ ID NO: 6996 - protein, 463 aa, Oryza sativa
  Clone ID: PAT_MRT4530_81921C.1.pep
MARKQHIAIFTTASLPWMTGTAVNPLFRAAYLAKAGDWEVTLVVPWLSKGDQLLVYPNKMKFSVPGEQEGYVRRWLEERIGLLPKFEIKFYPGKFSTEKRSILPAGDITQTVSDDKADIAVLEEPEHLTWYHHGRRWKNKFRKVIGVVHTNYLEYVKRERNGYIHAFLLKHINSWVTDIYCHKVIRLSAATQEVPRSIVCNVHGVNPKFIEIGKLKHQQISQREQAFFKGAYYIGKMVWSKGYTELLQLLQKHQKELSGLKMELYGSGEDSDEVKASAEKLNLDVRVYPGRDHGDSIFHDYKVFINPSTTDVVCTTTAEALAMGKIVICANHPSNEFFKRFPNCHMYNTEKEFVRLTMKALAEEPIPLSEELRHELSWEAATERFVRVADIAPIMSIKQHSPSPQYFMYISPDELKKNMEEASAFFHNAISGFETARCVFGAIPNTLQPDEQQCKELGWRLQE

SEQ ID NO: 6997 - protein, 426 aa, Oryza sativa
  Clone ID: PAT_MRT4530_82365C.1.pep
MFADFSAAAMELGEVLGLQGLTVPSTKEGDLSLIKRAAAGSFTQAAAASYPSPFLDEQKMLRFAKAAHTLPSGLDFGRENEQRFLLSRTKRPFTPSQWMELEHQALIYKYLNAKAPIPSSLLISISKSFRSSANRMSWRPLYQGFPNADSDPEPGRCRRTDGKKWRCSKEAMADHKYCERHINRNRHRSRKPVENQSRKTVKETPCAGSLPSSVGQGSFKKAKVNEMKPRSISYWTDSLNRTMANKEKGNKAAEENNGPLLNLTNQQPTLSLFSQLKQQNKPEKFNTAGDSESISSNTMLKPWESSNQQNNKSIPFTKMHDRGCLQSVLQNFSLPKDEKMEFQKSKDSNVMTVPSTFYSSPEDPRVSCHAPNMAQMQEDSISSSWEMPQGGPLGEILTNSKNPDDSIMKPEARPYGWLLNLEDHAM

SEQ ID NO: 6998 - protein, 671 aa, Oryza sativa
  unsure (1)..(671): unsure at all Xaa locations
  Clone ID: PAT_MRT4530_82807C.1.pep
MALTTFSISRGGFVGALPQEGHFAPAAAELSLHKLQSRPHKARRRSSSSISASLSTEREAAEYHSQRPPTPLLDTVNYPIHMKNLSLKELQQLADELRSDVIFHVSKTGGHLGSSLGVVELTVALHYVFNTPQDKILWDVGHQSYPHKILTGRRDKMPTMRQTNGXLSGFTKRSESEYDSFGTGHSSTTISAALGMAVGRDLKGGKNNVVAVIGDGAMTAGQAYEAMNNAGYLDSDMIVILNDNKQVSLPTATLDGPAPPVGALSSALSKLQSSRPLRELREVAKGVTKQIGGSVHELAAKVDEYARGMISGSGSTLFEELGLYYIGPVDGHNIDDLITILREVKSTKTTGPVLIHVVTEKGRGYPYAERAADKYHGVAKFDPATGKQFKSPAKTLSYTNYFAEALIAEAEQDNRVVAIHAAMGGGTGLNYFLRRFPNRCFDVGIAEQHAVTFAAGLACEGLKPFCAIYSSFLQRGYDQVVHDVDLQKLPVRFAMDRAGLVGADGPTHCGAFDVTYMACLPNMVVMAPSDEAELCHMVATAAAIDDRPSCFRYPRGNGIGVPLPPNYKGVPLEVGKGRVLLEGERVALLGYGSAVQYCLAAASLVERHGLKVTVADARFCKPLDQTLIRRLASSHEVLLTVEEGSIGGFGSHVAQFMALDGLLDGKLKWRP

SEQ ID NO: 6999 - protein, 485 aa, Oryza sativa
  unsure (1)..(485): unsure at all Xaa locations
  Clone ID: PAT_MRT4530_83072C.1.pep
MAGGFRVLHLVRPFLAFLPEVQSADRKIPFREKVIYTVISLFIFLVCSQLPLYGIHSTTGADPFYWMRVILASNRGTVMELGITPIVTSGMVMQLLVGSKIIEVDNSVREDRALLNGAQKLLGILIAIGEAVAYVLSGMYGSVSQLGTGNAILIILQLFFAGIIVICLDELLQKGYGXGSGISLFIATNISSSLYFSFSLLAYIIWKAFSPTTINSGRGAEFEGAVIALFHLLITRTDKVRALREAFYRQNLPNVTNLLATVLVFLIVIYFQGFRVVLPVRSKNASGQQGSYPIKLFYTSNMPIILHSALITNLYFISQLLYRRYSGNFLVNLLGKWKESEYSGHSVPVGGLAYYVTAPSSLADVLANPFHALFYVVFMLSACALFSKTWIEVSGSSAKDVAKQLKEQQMVMPGHRESNLQKELNRYIPTAAAFGGVCIGALTVLADFMGAIGSGTGILLAVTIIYQYFETFEKERATELGFFGF

SEQ ID NO: 7000 - protein, 485 aa, Oryza sativa
  Clone ID: PAT_MRT4530_83074C.1.pep
MAGGFRVLHLVRPFLAFLPEVQSADRKIPFREKVIYTVISLFIFLVCSQLPLYGIHSTTGADPFYWMRVILASNRGTVMELGITPIVTSGMVMQLLVGSKIIEVDNSVREDRALLNGAQKLLGILIAIGEAVAYVLSGMYGSVSQLGTGNAILIILQLFFAGIIVICLDELLQKGYGLGSGISLFIATNICLLLVNLLLHSENIIWKAFSPTTINSGRGAEFEGAVIALFHLLITRTDKVRALREAFYRQNLPNVTNLLATVLVFLIVIYFQGFRVVLPVRSKNARGQQGSYPIKLFYTSNMPIILHSALITNLYFISQLLYRRYSGNFLVNLLGKWKESEYSGHSVPVGGLAYYVTAPSSLADVLANPFHALFYVVFMLSACALFSKTWIEVSGSSAKDVAKQLKEQQMVMPGHRESNLQKELNRYIPTAAAFGGVCIGALTVLADFMGAIGSGTGILLAVTIIYQYFETFEKERATELGFFGF

SEQ ID NO: 7001 - protein, 538 aa, Oryza sativa
  Clone ID: PAT_MRT4530_83242C.1.pep
TMAVFGAAVLVALAVTCGLIWSRSRRLSKEMRDIPGTMGWPVVGETFSFISGFSSPAGILSFMRDRQKRFGKVFKTYVLGRMTVFMTGREAAKILLSGKDGVVSLNLFYTGKQVLGPTSLLTTNGDEHKKLRRLIGEPLSIDALKKHFDFINDLAVQTLDTWLDRRVLVLEEASSVIIKLFTLKVIANMLISLEPEGEEQEKFRANFKIISSSFASLPLKIPGTAFHRGLKKARNRMYAMLDSVIARRRDGGEVRNDFLQTLLRKHAKDGTAADEDDGGGGGDRDADKLTDAQLKDNILTLLVAGHDTTTAGLTWLIKFLGENPEALQKLRVMNETLRRATILPWFSRKAAQDFSIDGYEIKKGTSVNLDVVSIHHDPSVFADPYKFDPNRFDGTLKPYSFLGFGSGPRMCPGMSLARLEICVFIHHLVCRYSTPAGSQEIKQQELLRGKVTRNSYFSGKCDKEQQPRSIAQIFRSLKHDHSRAVTRNGTIQEATQQQQLRKGQGQWNNNQVAKPIRVTKKHYARQQWPSHAKPHMID

SEQ ID NO: 7002 - protein, 576 aa, Oryza sativa
  Clone ID: PAT_MRT4530_8325C.1.pep
MEVPIAAMTFAHPANVMTLASRQPKSKRSHISPATTAHRNLQTRLAHHHHATPASLPMAICNTVDKVINRFIDLPEQRPTVDPRRVLSGNFAPVDELPPTSCHVIRGSIPSCLAGGVYIRNGPNPQHRLPQRTHHLFDGDGMLHSLLIPSASSTLLSEPVLCSRYVHTYKYLLERETGGPVLPNFFAGFHGVAGLARAVVMIARVLAGQINLNKGFGLANTSITLFADCLYALCESDLPYSMHINPANGEVTTLGRCDFGGDLSFRMTAHPKKDPVTMELFAFRYNVFQPFITYFWFDRAGSKVADVPILSLQKPSVMHDFAITERYAIFPESQLIVNPMDMVMRGSSLVGLDRTMVPRIGVLPRYAKDESDMRWFEVPRFNMLHTTNGWEEADGEEIVLVAPNILSIEHMLGNMELMRARVDMVRINLCTGDVSCTALSPESLEFGVIHQGYVGRKNRYGYFGVSGPLPKIKGIRKLDFDLVGSGDCTVGRRDFGLGCFAGEPFFVPDNIDGYGNEDSGYVVCYTHEEDTGESWFVVMDAKSPELDIVAEVQLPSRIPYGFHGIFVKQAELLAQQ

SEQ ID NO: 7003 - protein, 139 aa, Oryza sativa
  Clone ID: PAT_MRT4530_83609C.1.pep
MAGKGGKGLLAAKTTAAKAAADKDKDRKKAPVSRSSRAGIQFPVGRIHRQLKGRVSANGRVGATAAVYTAAILEYLTAEVLELAGNASKDLKVKRITPRHLQLAIRGDEELDTLIKGTIAGGGVIPHIHKSLINKTAKE

SEQ ID NO: 7004 - protein, 323 aa, Oryza sativa
  Clone ID: PAT_MRT4530_83782C.1.pep
MAGRSELVVSFGEMLIDFVPTVAGVSLAEAPAFVKAPGGAPANVAIAVARLGGGAAFVGKLGDDEFGRMLAAILRDNGVDDGGVVFDAGARTALAFVTLRADGEREFMFYRNPSADMLLTHAELNVELIKRAAVFHYGSISLIAEPCRSAHLRAMEIAKEAGALLSYDPNLREALWPSREEARTKILSIWDQADIVKVSEVELEFLTGIDSVEDDVVMKLWRPTMKLLLVTLGDQGCKYYARDFRGAVPSYKVQQVDTTGAGDAFVGALLRRIVQDPSSLQDQKKLEEAIKFANACGAITATKKGAIPSLPTEVEVLKLMESA

SEQ ID NO: 7005 - protein, 744 aa, Oryza sativa
  Clone ID: PAT_MRT4530_84339C.1.pep
MAGQERRTIDLEEGWAFMQKGITKLKNILEGKPEPQFSSEDYMMLYTTIYNMCTQKPPHDYSQQLYDKYRESFEEYITSMVLPSLRDKHDEFMLRELVKRWSNHKIMVRWLSRFFFYLDRYFISRRSLIPLEQVGLTCFRDLIYQEIKGQVKGAVIALIDKEREGEQIDRALLKNVLGIFVEIGLGSMECYENDFEDFLLKDTTDYYSLKAQSWILEDSCPDYMIKAEECLKKEKERVGHYLHISSEQKLLEKVQNELLAQYATPLLEKEHSGCFALLRDDKEEDLSRMYRLFSKINRGLEPIANMFKTHVTNEGTALVKQAEDSASNKKPEKKDMVGMQEQVFVWKIIELHDKYVAYVTECFQGHTLFHKALKEAFEVFCNKGVSGSSSAELLATFCDNILKKGCSEKLSDEAIEDALEKVVRLLAYISDKDLFAEFYRKKLARRLLFDKSANDEHERSILTKLKQQCGGQFTSKMEGMVTDLTVARDHQTKFEEFVAAHQELNPGIDLAVTVLTTGFWPSYKTFDINLPAEMVKCVEVFKEFYQTRTKHRKLTWIYSLGTCNINAKFEAKTIELIVTTYQAALLLLFNGSDRLTYSEIVTQLNLSDDDVVRLLHSLSCAKYKILNKEPANRSISPNDVFEFNSKFTDRMRRIKIPLPPVDEKKKVVEDVDKDRRYAIDASIVRIMKSRKVMGHQQLVAECVEQLSRMFKPDFKAIKKRIEDLITRDYLEREKDNANVYRYLA

SEQ ID NO: 7006 - protein, 196 aa, Oryza sativa
  Clone ID: PAT_MRT4530_85095C.1.pep
MGRGRSEIKRIENPTQRQSTFYKRRDGLFKKARELAVLCDADLLLLLFSASGKLYHFLSPTVPSVREFVERYEATTHTKVWADIRQERRAELEKVGSMCDLLEKQLRFMTVDDGEEYTVPSLEALEHNLEAAMRKVRSEKDRKIGGEICYLQNIIRGRQEERYGLCDKIAHAQTLKDVECGSTSLSNGLDLKLGFN

SEQ ID NO: 7007 - protein, 89 aa, Oryza sativa
  Clone ID: PAT_MRT4530_85350C.1.pep
MVNPGRTARALCLLCLALLLLGQDTHSRKLLLQEKHSHGVGNGTTTTQEPSRENGGSTGSNNNGQLQFDSAKWEEFHTDYIYTQDVKKP

SEQ ID NO: 7008 - protein, 383 aa, Oryza sativa
  Clone ID: PAT_MRT4530_85425C.1.pep
REERRGEGAGQGRGGKMSSTAPLLTPYKMGRFDLSHRVVLAPLTRQRSYGNVPQPHAILYYQQRTTKGGLLIAEATGISDTAQGYKDTPGIWTKEQVEAWKPIVDGVHAKGGIFFCQIWHVGRVSNNTFQPNGQAPISSTNKSLKPAVRANGIDVATFSTPRRLETDEIPFVVNDYRVAARNAIEAGFDGVEIHGAHGYLIDQFLKDQVNDRSDKYGGSLENRCRFALEVVQAVTDEIGADKVGIRLSPFASYSEAADSNPEALGLYMANALNKFGILYCHMVEPRMVKLGEKFETPHSLRPIRDAFKGTFIAAGGYNKEDGNKAVSTGYTDLVAYGRLFLSNPDLPERFEIDAPLNKYNRETFYISDPVIGYTDYPFLPSDV

SEQ ID NO: 7009 - protein, 814 aa, Oryza sativa
  Clone ID: PAT_MRT4530_85672C.1.pep
MAGLVIGCLAVQLSLASLLLCSSASTAQHTLGTGSSLSVADRSRPFLVSPDGTFSCGFIQAGDDGDNAFSFSVWFTAARDGAVVWTANPDAPVNGRGSTISFRHDGELALADTNGTTVWASRTGGGGRGLTVSLRDTGNLVIEDPSTGRAVWQSFDWPTDTLLPSQRFTKDTKLVAGYFSLYYDNDNVLRMLYDGPEIASIYWPLPGVSIFDFGRTNYNSSRIAILDDAGVFRSSDRLQAQASDMGVGVKRRLTIEQDGNLRIYSLNASTGGWAVTWAALSQPCQAHGLCGKNGLCVYLPSLRCSCPPGYEMIDRRDWRKGCQPMFSVGNCSQPAAPERFKSVVVPQTDFYGYDLMFNGSSITFELCRNQCLSDCQCVAFSYRFDGVGRCFTKGRLFNGYTSANFPGNIYLKVSIDFDESSPLVSARSAAGLTCNPNVSIVTVPAAVYGMAPRNSGKWTYLFVFAGVLGVLDLLFIATGWWFLSSKQSIPSSLEAGYRRVMTSQFRRFTYRELKDVTANFKEELGRGGSGVVYRGVLDGGKVVAVKRLAVDVTMQGDEEFWAEMTVLGRINHMNLVRIWGFCSERKHKLLVYEYVENQSLDRHLFDTAEGGGGMSTTTLAWKDRYKIALGTARGLAYLHHECLEWVIHCDMKPENILLTRDFDAKIADFGLAKLSKRDRGAGVELTHMRGTSGYMAPEWALNVPINAKVDVYSFGIVLLEIVVGSRVADQRTEAGERLQLPQIAQALRHVLDSGDVRSLVDARLQGQFNPRQAMEMVRISLACMEDRNSRPTMDDIAKALTAFDDEDEHPAYRS

SEQ ID NO: 7010 - protein, 499 aa, Oryza sativa
  Clone ID: PAT_MRT4530_85748C.1.pep
MTKIVGTLGPKSRAVDTISSCLKAGMSVARFDFSWGDAEYHQETLENLKLAIKSTKKLCAVMLDTVGPELQVVNKSEAAISLEANGTVVLTPDQGQEASSELLPINFSGLAKALKPGATIFVGQYLFTGSETTSVWLEVSEVKGDDVVCVIKNSATLAGSLFTLHCSQIHIDLPTLSDEDKEVIRRWGAPNKIDFLSLSYTRHAEDVRQAREFLSKLGDLSQTQIFAKIENVEGLNHFDEILQEADGIILSRGNLGIDLPPEKVFLFQKSALHKCNMAGKPAVVTRVVDSMTDNLRPTRAEATDVANAVLDGSDAILLGAETLRGLYPVETISIVGKICAEAEKVFNQDLYFKRTVKYVGEPMTHLESIASSAVRAAIKVKASVIICFTSSGRAARLIAKYRPTMPVLSVVIPRLKTNQLRWSFTGAFEARQSLIVRGLFPMLADPRHPAESTSATNESVLKVALDHGKASGVIKSHDRVVVCQKVGDSSVVKIIELDD

SEQ ID NO: 7011 - protein, 86 aa, Oryza sativa
  unsure (1)..(86): unsure at all Xaa locations
  Clone ID: PAT_MRT4530_85868C.1.pep
RMSLDLAQWIKHVPLMNILWSHFAEKVLNEDFXLVLGQQEGMINGANVWKWPVLYDKLGIRYRLWRDAIERGVDRLPFSKKSESGP

SEQ ID NO: 7012 - protein, 445 aa, Oryza sativa
  Clone ID: PAT_MRT4530_85925C.1.pep
MAVTIQSVKARQIFDSRGNPTVEVDVGLSDGSFARGAVPSGASTGIYEALELRDGGSDYLGKGVLKAVSNVNTIIGPALIGKDPTEQVDIDNFMVQQLDGTSNNWGWCKQKLGANAILAVSLAVCKAGAMVKKIPLYQHIANLAGNKTLVLPVPAFNVINGGSHAGNKLAMQEFMILPTGASSFKEAMKMGVEVYHHLKSIIKKKYGQDATNVGDEGGFAPNIQENKEGLELLKAAIAKAGYTGKVVIGMDVAASEFYSEKDKTYDLNFKEDNNDGSHKISGDSLKDVYKSFVSEYPIVSIEDPFDQDDWATYAKLTDEIGQQVQIVGDDLLVTNPTRVAKAISEKTCNALLLKVNQIGSVTESIEAVRMSKRAGWGVMASHRSGETEDTFIADLSVGLSTGQIKTGAPCRSERLAKYNQLLRIEEELGDAAVYAGEKFRAPVKP

SEQ ID NO: 7013 - protein, 585 aa, Oryza sativa
  unsure (1)..(585): unsure at all Xaa locations
  Clone ID: PAT_MRT4530_86446C.1.pep
MDSSYQHDKPLLDEENSSQVTLEYTGDGSVCIRGHPALRKHTGNWKGSSLAIVFSFCSYLAFTSIVKNLVSYLTKVLHETNVAAARDVATWSGTSYLAPLVGAFLADSYLGKYCTILIFCTIFIIGLMMLLLSAAVPLISTGPHSWIIWTDPVSSQNIIFFVGLYMVALGYGAQCPCISSFGADQFDDTDENERTKKSSFFNWTYFVANAGSLISGTVIVWVQDHKGWIWGFTISALFVYLGFGTFIFGSSMYXDFRNLEEAPLARICQVVVAAIHKRDKDLPCDSSVLYEFLGQSSAIEGSRKLEHTTGLKFFDRAAMVTPSDFESDGLLNTWKICTVTQVEELKILIRMFPVWATMILFAAVLDNMFSTFIEQGMVMEKHIGSFEIPAASFQSIDVIAVLILVPVYERVLVPVFRKFTGRANGITPLQRMGIGLFFSMLSMVSAALVESNRLRIAQDEGLVHRKVAVPMSILWQGPQYFLIGVGEVFSNIGLTEFFYQESPDAMRSLCLAFSLANVSAGSYLSSFIVSLVPVFTAREGSPGWIPDNLNEGHLDRFFWMMAGLCFLNMLAFVFCAMRYKCKKAS

SEQ ID NO: 7014 - protein, 165 aa, Oryza sativa
  Clone ID: PAT_MRT4530_86520C.1.pep
MPVPLAPYPTPPVPFTPPNGAQSQLVCSGCRNLLMYPAGATSVCCAVCSTVTAVPAPGTEMAQLVCGGCHTLLMYIRGATSVQCSCCHTVNLAMEANQVAHVNCGNCRMLLMYQYGARSVKCAVCNFVTSVGEHWDPGDWYNLSDCHPKLMSAWQQLAVMACDAF

SEQ ID NO: 7015 - protein, 819 aa, Oryza sativa
  Clone ID: PAT_MRT4530_86643C.1.pep
MAGLVIGYLAVQLSLMSLLLCPSSSTAQHTLGRSSMSVEDHARPFLVSTDGSFSCGFLEAGDNAFTFSVWFTADPNRTAVWSANRDAPVNGRGSRVSFSRDGELALADTNGTTVWSSKTTAGTGNRRGLTVSLRDTGNLVVGDPSTGLAVWQSFEWPTDTLLPSQRFTKQTKLVAGYFSLYFDNDNVLRMLYDGPEIASIYWPLPGLTVFENGRTNYNSTRIAILDDAGVFLSSDQTKAEATDLGLGIKRRITIEQDGNLRMYSLNASTGGWAVTWSALKQPCQAHGLCGKNGLCEYLPSLRCSCLPGYEMVDRRDWRRGCKPTFPVGNCSQGSAPPPSPATAPPQFKFIEVAQTDFFGFDLGYTESITFKQCRDQCMNNCQCTAFSYRLDGRGKCYPKGTLFNGFTSANFPGSIYLKVPLDFNASSPRVSAQRAAGLACGANVTVVTVSADVYGMAPGSNGQWTYFFVFAGVLGVLDILFIATGWWFLSSKQSIPSSLQAGYKMVMTSQFRRFTYRELKGATANFKEELGRGGSGAVYRGVLDGGKVVAVKRLAVDVTMQGDEEFWSEMTVLGRINHINLVRIWGFCSERKHKLLVYEYVENQSLDRHLFDASDGSGGKATTLAWSDRYKIALGTARGLAYLHHECLEWVIHCDVKPENILLTREFEAKIADFGLAKLSKRDGGAGVELTHMRGTSGYMAPEWALNLPINAKVDVYSFGIVLLEMVVGSRVADQRTEAGEPLQLPQITQALRHVVDSGDVMSLVDARLQGQFNPRQAMEMVRISLACMEERSCRPTMDDIAKSLTAFDDEDEHPAYHS

SEQ ID NO: 7016 - protein, 192 aa, Oryza sativa
  unsure (1)..(192): unsure at all Xaa locations
  Clone ID: PAT_MRT4530_86677C.1.pep
PITAAAEAIWACSIEELGLENEAEKPSNALLTRAWSPGWSNADKLLNEFIEKQLIDYAKNSKKVVGNSTSLLSPYLHFGEISVRHVFQCARMKQIIWARDKNSEGEESADLFLRGIGLREYSRYICFNFPFTHEQSLXSHLRFFPWDADVDKFKAWRXGRTGYXLVDAGMRELWAPGWMHNRIRVICFKLCW

SEQ ID NO: 7017 - protein, 673 aa, Oryza sativa
  Clone ID: PAT_MRT4530_86747C.1.pep
MAGNLLANYVQVNVMLPLDVVTVDNKFEKVDETRAQLKKLTEAGVDGVMVDVWWGLVEGKGPGSYDWEAYKQLFRLVQEAGLKLQAIMSFHQCGGNVGDIVNIPIPQWVRDVGASDPDIFYTNRGGARNIEYLTLGVDDQPLFHGRTAIQMYADYMKSFRENMAEFLDTGVIVDIEVGLGPAGEMRYPSYPQSQGWVFPGIGEFICYDKYLEADFKAEAAKAGHPEWELPDDAGEYNDTPEKTRFFADNGTYVTEKGKFFLTWYSNKLIKHGDKILDEANKVFLGCRVQLAIKISGIHWWYRVPNHAAELTAGYYNLDNRDGYRTIARMLTRHRACVNFTCAEMRDSEQSSEAKSAPEELVQQVLSAGWREGLHVACENALGRYDATAYNTILRNSRPTGINKNGPPEHKLFGFTYLRLSDELLEGQNYSTFKTFVKRMHANLESSIYMRDPIPGNYPSSLTPCRDVVVIIASALLCQQRSRGTPPRRGARSGGLRAACRARSRRRTGWRFWKPSLPPAAAGGGSRPLGRGGTGSRTDRRFSAAQRGQFGLPANPAATGAAAEGRRPGELLRGCLSVSAAVFCSAASVRLVGPTLSCTISVRLPAFQRERRNGKRKGKDGSCLVFGREVAKQVGTFYTELVLLTVGARTHTLVHSGAVPLARNKFTLGFLIYR

SEQ ID NO: 7018 - protein, 549 aa, Oryza sativa
  Clone ID: PAT_MRT4530_8698C.1.pep
MSSEPPPDAAAAAASSAGDLAADLSSATISKKQLKKDARKAEKAEKASQRQQQQQPQADADDPFAANYGDVPVEEIQSKTISGRVWTEIGGLDEAAAGRSVLIRGAAQAIRPVSKKMAFVVLRESMSTVQCVLVASADAGVSTQMVRFATSLSKESIVDVEGVVSLPKEPLKATTQQVEIQVRKIYCINRAIPTLPINLEDASRSEAEIEKAEQAGEKLVRVGQDTRLNYRAIDLRTPANQAIFRIQCQVENKFREYFLSKNFVGIHSPKLIAGSSEGGAAVFKLQYNGQPACLAQSPQLYKQMAICGGFERVFEVGPVFRAENSNTHRHLCEFVGLDAEMEIKEHYFEVCDIIDGLFVAIFKHLNENCKKELETINRQYPFEPLKYLEKTLKLTYEEGIQMLKEAGTEIEPMGDLNTEAEKKLGRLVKEKYGTEFFILYRYPLAVRPFYTMPCYDNPAYSNSFDVFIRGEEIISGAQRIHLPELLTKRATECGIDASTISSYIESFSYGAPPHGGFGVGLERVVMLFCALNNIRKTSLFPRDPQRLVP

SEQ ID NO: 7019 - protein, 679 aa, Oryza sativa
  Clone ID: PAT_MRT4530_87187C.1.pep
MAASLLLRAARRRDLASPLGTLTANAQSAYSANICSQWGSFARAFSVKPTGNEVIGIDLGTTNSCVSVMEGKNPKVIENSEGTRTTPSVVAFNQKGERLVGTPAKRQAVTNPQNTFFGTKRLIGRRFEDPQTQKEMKMVPYKIVKAPNGDAWVETTDGKQYSPSQIGAFVLTKMKETAESYLGKTVSKAVITVPAYFNDAQRQATKDAGRIAGLDVQRIINEPTAAALSYGTNNKEGLIAVFDLGGGTFDVSILEISNGVFEVKATNGDTFLGGEDFDNTLLEFLVSEFKRSEAIDLAKDRLALQRLREAAEKAKIELSSTAQTEINLPFITADASGAKHLNITLTRSKFESLVNSLIERTREPCKNCLKDAGITTKEVDEVLLVGGMTRVPKVQEIVSEIFGKSPSKGVNPDEAVAMGAAIQGGILRGDVKELLLLDVTPLSLGIETLGGIFTRLINRNTTIPTKKSQVFSTAADNQTQVGIRVLQGEREMATDNKLLGEFDLVGIPPAPRGMPQIEVTFDIDANGIVTVSAKDKSTGKEQQITIRSSGGLSEAEIQKMVQEAELHSQKDQERKALIDIRNNADTTIYSVEKSLGEYRDKIPAEVATEIETAIADLRSVMTSDDIEKIKANIEAANKAVSKIGQHMSGGGGGAGGSETGGSQGGGEQAPEAEYEEVKK

SEQ ID NO: 7020 - protein, 51 aa, Oryza sativa
  unsure (1)..(51): unsure at all Xaa locations
  Clone ID: PAT_MRT4530_87581C.1.pep
SIYRSVQKSLDLSPYTAVEKEKEVXRPRFKXKESSPLKEEAEPLLFYKDQL

SEQ ID NO: 7021 - protein, 267 aa, Oryza sativa
  Clone ID: PAT_MRT4530_87677C.1.pep
MPIYVMTALKIPKQIIQEIDKARRKFLWDGGDEFHGGKCKVNWQRVCRPIKYGGLGVSNLTKMGRALHLRWLWYEWTFPDKPWIGMPTPCDEQDAELFAASTTVTIGDSRKALFWESPWVSSSPLKTMAPNLYRHARRKKRTVANALQDNKWINDIRHNLTSMLVTEFFKVFEILWESNTTLSQDIRDGVSVGALRRLWQPEEDGRVVDGWRGEAAVGSGGDGAAGEATVPEAEVKVEELGVDAAGEESRRRGEVRVQPGELLPQLR

SEQ ID NO: 7022 - protein, 826 aa, Oryza sativa
  unsure (1)..(826): unsure at all Xaa locations
  Clone ID: PAT_MRT4530_87860C.1.pep
MVKLAFGSCGDSFSASSIKAYVAEFIATLLFVFAGVGSAIAYGQLTKGGALDPAGLVAIAIAHAFALFVGVSMAANISGGHLNPVVTFGLAVGGHITILTGIFYWVAQLLGASVACLLCSSPPTDRLAIPTHAIAGISEIEGMVMEIVITFALVYTVYATAADPKKGSLGTVAPMAIGFIVGANILAAGPFSGSSMNPARSFGPAVAAGNFAGNWVYWVGPLIGGGLAGLVYDDVFIASYQPVMIGFTVILCDRSDQAVYAGQTSGDRAVTRCLGRVFAVMDRESAWCRMQSYIMAENYDIWRKVSLPYVIPEVINTAAEKIAFELNCKARNILLSGISCSDYDRVAHLQTAHEIWVALNNFHQGTNNIKEFRRDLFKKEYIKFEMKPGEALDDYLSRFNKILSDLRSVDSSYDANYPQSEISRHFLNGLDMSIWEMKVTSIQESVNMSTLTLDSLYTKLKTHEMNILSRKGDSKSSALVSSSTSLDVGASSSKSSVLALFNAMSDDQLEQFEEEDLVLLSNKFSRAMKNVRNRKRGEPNHCFECGALDHLRSHCPKLGRGKKEDDGRVKEDDVNKKKNMKEKEKKKHCIKWLIQKLIKVFDESEDEDESKGKQVVDLVFIARNESSHVDESDDDNEEKHSYDQLELAAYKFAKKTXTCSIVLDEKDHTIEILNAEIDRLKSSISDDDNCXSCEVLFSEINALRDANSVNCKKLEFXIEKSKTLESSFAIGFALHARVVDELILTKNVLXKKYKVAFCASSLVNASCVNKAKQNNGVLISQDCSKCVLNEMKLKDAFGRVIHMEEIVNQDEVLILMLIILDILLLC

SEQ ID NO: 7023 - protein, 235 aa, Oryza sativa
  unsure (1)..(235): unsure at all Xaa locations
  Clone ID: PAT_MRT4530_88073C.1.pep
GHDAAQLLACLSDLNGLGILDLELMNKSLLGKWLWKLETEEGSWXDLFKAKYLYHTTLRHKKKKLSNGDSIFWQGLMQVRDDFLKSCSKEIGNGENTLFREYRWNGKEPFAVKYANLYNVAMTKNVTVAKVSRERWXVLSFRRKMEGKKXFPXQNLKKNFMNITLNNQKDSLVWELDRKXGFFVKSFYRALQIQQIKCPNRKKSELGVIMVIAVSCVKLLSAHNSTQHTSRKHKV

SEQ ID NO: 7024 - protein, 341 aa, Oryza sativa
  Clone ID: PAT_MRT4530_88123C.1.pep
MASEGVLLGMGNPLLDISAVVDDAFLTKYDVKLNNAILAEEKHLPMYDELASKGNVEYIAGGATQNSIRVAQWMLQTPGATSYMGCIGKDKFGEEMKKNAQAAGVTAHYYEDEAAPTGTCAVCVVGGERSLVANLSAANCYKSEHLKKPENWALVEKAKYIYIAGFFLTVSPDSIQLVAEHAAANNKVFLMNLSAPFICEFFRDAQEKVLPFVDYIFGNETEARIFAKVRGWETENVEEIALKISQLPLASGKQKRIAVITQGADPVVVAEDGQVKTFPVILLPKEKLVDTNGAGDAFVGGFLSQLVQQKSIEDSVKAGCYAANVIIQRSGCTYPEKPDFN

SEQ ID NO: 7025 - protein, 369 aa, Oryza sativa
  unsure (1)..(369): unsure at all Xaa locations
  Clone ID: PAT_MRT4530_88136C.1.pep
MARTRFLAPRAAASAASAVSAKPAAVAPLYADRTVVRIGLPSKGRMSEQTLSLLKSCQLSVRHLNPRQYTADIPQVPNLEVWFQRPKDIVRKLQSGDLDLGIVGFDIVSEYGQGIDDLVVVHDALEFGHCRLSLAVPKEGIFENINTLEDLANMPEWTQERPLRVVTGFGYLXEKFMRENGFNHVSFLAGDGALESYPAMGMADVIVDLVSSGTTLRENNLKEIDGGVVLESQATLVACRRSLHKRNGVLEITHEMLERLEAHLTATGEIMVTANMRGNSAEEVAERVLSQTSLCGLQGPTISPVYRSRDGKVAVEYYAINVVVPQKSLYKSIQQLRSIGGSGVLVTKLTYIFDEETPRWRKLLSELGL

SEQ ID NO: 7026 - protein, 273 aa, Oryza sativa
  Clone ID: PAT_MRT4530_88198C.1.pep
MEHIARFFFGVSGNVIALFLFLSPVVTFWRIIKKRSTEDFSGVPYNMTLLNCLLSAWYGLPFVSPNNILVTTINGTGSVIEAIYVVIFLIFAERKARLKMMGLLGLVTSIFTMVVLVSLLALHGQGRKLFCGLAATIFSICMYASPLSIMRLVIKTKSVEFMPFLLSLSVFLCGTSWFIYGLLGRDPFIAIPNGCGSFLGLMQLILYAIYRNHKGATPAAAAGKGDAADEVEDAKKAAAAVEMADAKTNKVVADDADADADGKSADDKVASQV

SEQ ID NO: 7027 - protein, 1413 aa, Oryza sativa
  Clone ID: PAT_MRT4530_88374C.1.pep
MAPMLSIASRSPSPALIAPHASARATGLRAPFAGNRIVGWGWGDQTKSGTDRNRASICVVLFLRVRSGEPTQAPRDPPAAVGGGGCYVRLPAPPRDRDAVLYHVCLFTLLLCFIPITALAESDIKNLFALRKAIAVGKGFLHNWFELETPPCNWSGISCVGLTVVAIDLSSTPLYVDFPSQIIAFQSLVRLNVSGCGFSGELPEAMVNLQHLQHLDLSDNQLGGPLPASLFDLKMLKVMVLDNNMFSGQLSPAIAHLQQLTVLSISTNSFSGGLPPELGSLKNLEYLDIHTNAFSGSIPASFSNLSRLLYLDANNNNLTGSIFPGIRALVNLVKLDLSSNGLVGAIPKELCQLKNLQSLILSDNELTGSIPEEIGNLKQLEVLNLLKCNLMDTVPLSIGNLEILEGLYISFNSFSGELPASVGELRNLRQLMAKSAGFTGSIPKELGNCKKLTTLVLSGNNFTGTIPEELADLVAVVLFDVEGNRLSGHIPDWIQNWSNVSSISLAQNMFDGPLPGLPLHLVSFSAESNRLSGSIPAKICQGTFLQILRLNDNNLTGSIDETFKGCKNLTELSLLDNHLHGEIPEYLALLPLVSLDLSHNNFTGMIPDRLWESSTILDISLSDNQLTGMITESIGKLLSLQSLSIDRNYLQGPLPRSIGALRNLTALSLSGNMLSEDIPIQLFNCRNLVTLDLSCNNLTGHIPKAISHLTKLNTLVLSRNRLSGAIPSELCVAFSRESHSELEYVQHIGLIDLSRNRLTGHIPRAINNCSILVELHLQDNLLSGTIPVELAELRNITTIDLSSNALVGPVLPWPVPLASLQGLLLSNNRLSGSIPSGIGNILPQITMLDLSGNALTGTLPLDLLCKESLNHLDVSDNNISGQIPFSCHEDKESPIPLIFFNASSNHFSGSLDESISNFTKLTYLDLHNNSLTGRLPSAIARVTSLYYLDLSSNDFSGTIPCGICGMFGLTFANFSGNRDGGTFTLADCAAEEGGVCAANRVDRKMPDHPFHVLEATICCIATAIVIVLVVILVVYLRRRRKMLRRRQFVLVPAGDNAMADHETTLSNNLLGRRRMKKREPPSINLATFEHAPVRVTVDEIMRATGNFDGMHVVGDGGFGTVYRAELPGGRRVAVKRLHGVGRRFQGGEREFRAEMETVGKVRHPNLVPLLGYCAAGDERFLVYEYMEHGSLEDRLRGGGGAALGWPERLTICGGAARGLAFLHHGFVPHVIHRDVKSSNVLLGEGLQPRVSDFGLARIISACETHVSTVLAGTLGYIPPEYALAMRCTAKGDVYSFGVVMLELLTGRPPTWSSAEVTAEGDDERGGGGSLVGWVRWMAARGRGGEVFDACLPVSGAEREQMARVLDVARDCTADEPWRRPTMAEVARRVGAIEAMEYGPLVVAVSSGEPPAMP

SEQ ID NO: 7028 - protein, 352 aa, Oryza sativa
  Clone ID: PAT_MRT4530_88443C.1.pep
MGHGVTVNVIDRCELHEIPLQNRKFTWSNERRKATLVKLDRCFCNEEWDLAFPHHVLHAFPTGPSDHCPLVLSNPQGPHRPRTFKFENFWTRVPGFKDKVKDIWSQPSSHTEPMHHLNQKLQRTAVGLRDWTKGICSEAKLQFHMALNVIQRLDVAQEHRELSPPETRLRAALKRKVLGLASIERARKKQASRVTHIREGDANTKFFHLRVNARRRRNTIQRLKKDSGWAVTHGEKELTIHDHFASFMGRPGPRPNELNWETLDITPIDLATLGEPFTEEEVHRAIKEMPADKAPGPDGFTGAFFKVCWEIIKDDILLVFSSIYNLRSQGLPDKMDRLARGFTVVFDIPSPP

SEQ ID NO: 7029 - protein, 646 aa, Oryza sativa
  unsure (1)..(646): unsure at all Xaa locations
  Clone ID: PAT_MRT4530_88449C.1.pep
MQQLDVAQEHRELSXPPETRLRAALKRKVLGLASIERARKKQASRVTHIREGDANTKFFHLKVNARRRRNTIQRLKKDSGWAVTHGEKESTIHDHFASFMGRPGPRPNELNWETLDITPIDLATLGEPFTEEEVHRAIKEMPADKAPGPDGFTGAFFKVCWEIIKDDILLVFSSIYNLRCAHLNLLNSANIVLIPKKDGAESVSDYRPISLIHSIAKIFAKMLALWLRPHMHELISVNQSAFIKGRSIHDNYLFVRNMTRRYHRLRRAMLLFKLDITKAFDSVRWDYLLALLQRKGFSTRWIDWLGALLSSSTSQVLLNGSPGQRIKHGRGLRQGDPLSPLLFILAIDPLQRILSKATELGAISKLRGRTTRLQISMYADDAVIFINPTRNDVATFANILHRFGTATGLVTNLQKSQVAAIRCGNIDLEEVLQGVPAKRANFPLKYLGLPLVLGRLRKTDLQPVFDKISGRVASWRGKNMAVAGRTTLVKSVLSAQPIYLLTALKVTKESLEQLDKQRHRFLWAGTGDITGGKCKVNWAKTCLPTSQGGLGVLSLDKFTRALRLRWLWNEWRDPSKPWVGLETPCDGVDRDLFAASTKITVGDGNTTRFWDSAWINGQRPKDLMPLVYEISKNRKKSLRQGKEDDS

SEQ ID NO: 7030 - protein, 1951 aa, Oryza sativa
  Clone ID: PAT_MRT4530_88450C.1.pep
MTPRRGELLPTMLACLRVASPSRTWAALSPENRAGSGFSGSIGGDVQSIQAESIQAGRTGHLQGETTSSGLGEAASPTATFGRRSVGNVSFASPAATVQPSVEIQSAASSAVAPAIGRATVATATLRTARLDSAALLALTVLGSRPLHHVEFVLPHTPRLRLANALHLAVVPTRAAFLTRTPPPLVAPARQRIRHATAPPLLHCRHPPSRIPSPGPRRRLRDRPWLRLVSWAARAPPTTEPRDVEQAFLDEFKLRRGEVAVSLHHPQAFLIKFQHRRHCEEALAKGYVKRHGIEIHFIKWRSLKSALGVALMFRVRLCLDGVPMHAWAADIAERIIGRTCALEQIETDVVHPVESGNTRSIDLWAWTANPSTIPKRMWLGFTKRAKDPNLAPLFAVENPLEHWQRGVRHPVLFHLEEIHDYTAATIDLEGQGSFQPAKRRLPPWSLGVLDGEQVPGRVFEDFPHHPPPPRSVHERLGGRDRDDERREARRPERRSDRDAIDGRADRPRRGRAVRGGHLHDEGDHDDEDDWDGERDDRDGCADRDGRHARDQGGRGGRGRRRGSGNDHPRPWRRNDRDDDRDDRGRDLGRGRDDRRGSDNNYRRERTRSPRRWDRGGANRSGGGTRRTADPVYDSSKLMNIPLLHKSANQAEVGEFRLLHALHNSSFLCQEPQTNTLSPVSQLQWLSIIADKAATPALSGRPAKPRIEAWFQNAAWEPIPVEHAFARIKSALPPPTSTTTCQQVEEALLRIELAAAATDPPVGEPFPQIDSPPPRVTSPALAQGPVVPTGAMEIDDIVAPPPPSPVATQLAQAAASASPISTGVLDALFASPPQPIIASPPRSPPRSPCARPLHMGRRLKIRTRQHSQPTRRSERIAKQPARPTMERCQRVLFKRLGVLNGEEGASIEQVIAEYVAMFDGPLPAHVIAALTTIFGIDDEEQETMDAALISLVGEANVGKNFVFLLFHLRAVVFAPAPTDCYLISWNVRGLNSPARCNVVHELMLDTKCTLACFQETKLQSIDDGLARFLGGYKLDKFAFKPARGTRGGILLLWSSGDFDVQEVRIGRFSISAQITDIRSGVTFLLTGVYGPTRHHLKDSFLRHIRRLRPSPGEGWLILGDFNMIYRARDKNNSNLNLARMRRFRAVIDRCELHEIPLQNRKFTWSNERRKATLVKLDRCFCNEEWDLAFPHHVLHALPTGPSDHYPLVLSNPQGPHRPRTFKFENFWTRVPGFKDKVKDIWSQPSSHTEPMHRLNQKLQHTAVGLRDWTKGICSEAKLQFHMALNVIQRLDVAQEHRELTPLETRLRAALKRKVLGLASIERARKKQASRVTHIREGDANTKFFHLKVNARRRRNTIQRLKKDSGWAVTHGDKELTIHDHFASFMGRPGPRPNELNWETLDITPIDLATLGEPFTEEEVHKAIKEMPADKAPGPDGFTGAFFKVCWEIIKDDILLVFSSIYNLRCAHLNLLNSANIVLIPKKDGAESVSDYRPISLIHSIAKIFAKMLALRLRPHMHELISVNQSAFIKGRSIHDNYLFVRNTIRRYHRQRRAMLLFKLDITKAFDSVRWDYLLALLQRKGFPTRWIDWLGALLSSSISQRILSKATELGAISKLRGRTTRLRISMYADDDVIFINPTQNDVATSANILHRFGTAIGLVTNLQKSQVAAIRCGNIDLEEVLQGVPAKRANFPLKYLGLPLALGRLRKTDLQPVFDKISGRVASWRGKNMAAAGRTTLVKSVLSAQPIYLLTALKVMKESLEQLDKQRRRFLWAGTGDITGGKCKVNWAKTCLPTSQGGLGVLSLDKFTRALRLRWLWNEWRDPSKPWVGLETPCDGVDRNLFAASTKITVGDGNTTRFWDSAWINGRRPKDLMPLVYEISKNRKKSLRQGKEDDSWVHDLTLDAGLSITINLLDQLVRLWEANCKKCQGYQLLDYLSLSGPITVSRARSASP

SEQ ID NO: 7031 - protein, 1076 aa, Oryza sativa
  Clone ID: PAT_MRT4530_88573C.1.pep
MAANAGMVAGSRNRNEFVMIRPDGDAPPPAKPGKSVNGQVCQICGDTVGVSATGDVFVACNECAFPVCRPCYEYERKEGNQCCPQCKTRYKRHKGSPRVQGDEEEEDVDDLDNEFNYKHGNGKGPEWQIQRQGEDVDLSSSSRHEQHRIPRLTSGQQISGEIPDASPDRHSIRSGTSSYVDPSVPVPVRIVDPSKDLNSYGINSVDWQERVASWRNKQDKNMMQVANKYPEARGGDMEGTGSNGEDIQMVDDARLPLSRIVPIPSNQLNLYRIVIILRLIILMFFFQYRVTHPVRDAYGLWLVSVICEIWFALSWLLDQFPKWYPINRETYLDRLALRYDREGEPSQLAPIDVFVSTVDPLKEPPLITANTVLSILAVDYPVDKVSCYVSDDGSAMLTFEALSETAEFARKWVPFCKKHNIEPRAPEFYFAQKIDYLKDKIQPSFVKERRAMKREYEEFKVRINALVAKAQKVPEEGWTMADGTAWPGNNPRDHPGMIQVFLGHSGGLDTDGNELPRLVYVSREKRPGFQHHKKAGAMNALIRVSAVLTNGAYLLNVDCDHYFNSSKALREAMCFMMDPALGRKTCYVQFPQRFDGIDLHDRYANRNIVFFDINMKGLDGIQGPVYVGTGCCFNRQALYGYDPVLTEADLEPNIVVKSCCGGRKKKSKSYMDSKNRMMKRTESSAPIFNMEDIEEGIEGYEDERSVLMSQKRLEKRFGQSPIFIASTFMTQGGIPPSTNPASLLKEAIHVISCGYEDKTEWGKEIGWIYGSVTEDILTGFKMHARGWISIYCMPPRPCFKGSAPINLSDRLNQVLRWALGSVEILLSRHCPIWYGYNGRLKLLERLAYINTIVYPITSIPLIAYCVLPAICLLTNKFIIPEISNYAGMFFILLFASIFATGILELRWSGVGIEDWWRNEQFWVIGGTSAHLFAVFQGLLKVLAGIDTNFTVTSKASDEDGDFAELYVFKWTSLLIPPTTVLVINLVGMVAGISYAINSGYQSWGPLFGKLFFSIWVILHLYPFLKGLMGRQNRTPTIVIVWSILLASIFSLLWVKIDPFISPTQKAVALGQCGVNC

SEQ ID NO: 7032 - protein, 354 aa, Oryza sativa
  Clone ID: PAT_MRT4530_88663C.1.pep
MGVGGEKFQLGTVGALSLSVVSSVSIVICNKALMSSLGFNFATTLTSWHLLVTFCSLHVALWMKFFEHKPFDSRTVMGFGVLNGISIGLLNLSLGFNSVGFYQMTKLAIIPCTVILETLFFRKKFSRSIQLSLSVLLFGVGVATVTDLQLNAVGSVLSLLAIITTCIAQIMTNTIQKKFKVSSTQLLYQSCPYQSLTLFLIGPFLDGFLTNQNVFAFDYTSQVVFFIVLSCLISVSVNFSTFLVIGKTSPVTYQVLGHLKTCLVLTFGYVLLHDPFSWRNILGILIAVVGMVLYSYFCTLEGQQKNAEVSPQQAKEGDSAPLISDSLSKVENGGGVVDDEPLKVPMWSSKYSRA

SEQ ID NO: 7033 - protein, 308 aa, Oryza sativa
  Clone ID: PAT_MRT4530_88712C.1.pep
MSQPAELSREENVYMAKLAEQAERYEEMVEFMEKVAKTVDSEELTVEERNLLSVAYKNVIGARRASWRIISSIEQKEESRGNEDRCTLIKEYRGKIETELSKICDGILKLLDSHLVPSSTAPESKVFYLKMKGDYYRYLAEFKTGAERKDAAENTMVAYKAAQDIALAELPPTHPIRLGLALNFSVFYYEILNSPDRACNLAKQAFDEAISELDTLSEESYKDSTLIMQLLRDNLTLWTSDISEALPIYVVLGNLAADSLLGWWILELHFLWGEPQGGTFMSLIGSIVFGMSVVSLISRVHSPAKCPA

SEQ ID NO: 7034 - protein, 262 aa, Oryza sativa
  Clone ID: PAT_MRT4530_88714C.1.pep
MSQPAELSREENVYMAKLAEQAERYEEMVEFMEKVAKTVDSEELTVEERNLLSVAYKNVIGARRASWRIISSIEQKEESRGNEDRCTLIKEYRGKIETELSKICDGILKLLDSHLVPSSTAPESKVFYLKMKGDYYRYLAEFKTGAERKDAAENTMVAYKAAQDIALAELPPTHPIRLGLALNFSVFYYEILNSPDRACNLAKQAFDEAISELDTLSEESYKDSTLIMQLLRDNLTLWTSDISEDAAEEIKEAPKGESGDGQ

SEQ ID NO: 7035 - protein, 1422 aa, Oryza sativa
  unsure (1)..(1422): unsure at all Xaa locations
  Clone ID: PAT_MRT4530_88759C.1.pep
MAVTSDTVLDPLGGKSRGDSASIGAIATDDGPSREPAWTVQEVLVTEDGLAAEDGPTDGDGPADGDGLSAIVLPATEDGLLATPARLTRPVGLTEFPLVYSRRRCPAQAVAVDQGALAAVGRRAREERATDENEAPPEVQARISAFISSISTTPPPSILGGPPASVPVTRTRRRATILEGFTPWRSPRLALQGNGTRRHTISKAQKVTMKKLGIIEEEEEANQEAVQEFEKLFDEPLPPHHVQAIAELLQIDMAAPLQPLPEVLPGVEESKLSAVNQSLIYELCGLDFDGFVFLPAEETRGGVIIAWKSALFRGDVVHIGTWSVTVNLCWLAANRSWSLTSVYGPQGDEEKLLFLEELSVIREICLGEWLIAGNFNLIAAAEDKNNSRINRRLLNAFRSKINDLELKEMYMFGRRYTWSSEQARPTLVKLDRILVTTSWEDLFPEAHLQALSSSNSDHCPLLLTCGEFKPISRRFRFETFWTKLDGFMEVVKESWERSVDSTDPFCILYVKMARLSKILSKWGQKKMSNFRLQLQIANEIILRFDVAQEIRILSDLERQLRAALKGRCLALASLERIRIRQRARVRNLREGDASTAYFFMKMKSHQRKLKILWLEHDGVIATTQEDMEQMAKTHFEYVMGASQGDLKQILFQEIHLARANLSELDDAFTEEEVWATIKAMQNEKSPGPDGFTGLFYQRCWDVIKKEVLEALHKFCTGNSQNLELLNTAIITLLPKKDAPTLLKDFRPISLIHSFAKLATKILALRLAPRMDELVAHSQSAFIRGRSIHENFIFVKGLATQFHRNHKAMLLFTLDISKAFDSVSWSFLLNMLRFRGFGPKWRSWVAALFLTAETRVDLNGALGESFKPQKGLRQGDPLSPLLFVLQTTTIGLIDKVNLRNRAPNISIYADDAIIFLKPLVHEVEAVKALLNLFGTATGLHINFSKSAVTPIRCAESQKTLAQNTLACRLEDFPITYLGLPLSIRKPTKAEVQPTLDKMAKKVAGWKPKLLSPDGRLCLIKSVLMAIPVHFLSVLQLPRWAIKEMERRRRVFLWKGQEEINGGHCLVAWRDLCRPISNGGLGIKDIDLFGKALRMKWDFKRLEHKDRPWTMAGWGTDRDLQDIISSTAVHMLGDGCDTNFWRGNWLPGDGSIASRWPILFSFVGRANLTISQGLSNNTWVRRLQGSLSGRALLDYLALWDELQLVQLQQGVEDSILWKFSTNGQFSVASAYEFFFLTAVRCPYGEMIWKARAPARGALSNEAMGEFFQLWDEVHDFSLLPSPDEIRWKLTGDGKFSAASAYDVFFIAAEDCPYGELLWRSRAPSRVRFFMWLALKDRCLTXTILRSEIGRTTPSARCVREKTRIATTCLXPVLLRRRYGERSEDGAMQTLQSRQTVTADLLTGGLQRDAVFGRATKWTSTVPSC

SEQ ID NO: 7036 - protein, 512 aa, Oryza sativa
  Clone ID: PAT_MRT4530_88764C.1.pep
MPGGSLLNSGGMADYGGGGGSGGGLTFPVVVTCLMAASGGLIFGYDIGISGGVSEMESFLEKFFPGLLKGTAHASKDVYCIYNSQALTAFTSSLYAFGMVGTLVASRVTRRTGRQAVMLIGGSMFLVGALVNAAAVNIAMLIIGRMLLGLGLGFSGQATPVYLAEMSPPRWRGGFISGFPLFISVGYLIANLINYGTSRIPVWGWRLSLGLAAFPAAVMVAGAAFIPDTPSSLVLRGKHDLARAALQRVRGKGVDVDAEFNDILAAVEHDRRNDEGAFRRILRREYRPYLVMAIAFPVFLNLTGVAVTAFFSPILFRTVGFESDAALMGAVILGLMNIFGIVGSGFAMDRYGRRLLFMIGGALMFTCQVAMASIVGSQLGHGSKMAKGYAVTVLVMTCAFSASFSWSWGALYWAIPGEIYPVEVRSAGQGVAVALNLGLNFVQAQCFLAMLCCFKYGTFLFYASWLVVMTAFAVAFVPETKGVPLESMGHVFARHWYWGRFVKDHKFGDVST

SEQ ID NO: 7037 - protein, 427 aa, Oryza sativa
  Clone ID: PAT_MRT4530_88794C.1.pep
MAATIQSVKARQIFDSRGNPTVEVDICCSDGTFARAAVPSGASTGVYEALELRDGGSDYLGKGVLKAVDNVNSIIGPALIGKDPTEQTVIDNFMVQQLDGTKNEWGWCKQKLGANAILAVSLALCKAGAIIKKIPLYQHIANLAGNKQLVLPVPAFNVINGGSHAGNKLAMQEFMILPTGASSFKEAMKMGVEVYHNLKSVIKKKYGQDATNVGDEGGFAPNIQENKEGLELLKTAIEKAGYTGKVVIGMDVAASEFYNDKDKTYDLNFKEENNDGSQKISGDSLKNVYKSFVSEYPIVSIEDPFDQDDWEHYAKMTAEIGEQVQIVGDDLLVTNPTRVAKAIQEKSCNALLLKVNQIGSVTESIEAVKMSKRAGWGVMTSHRSGETEDTFIADLAVGLATLLRIEEELGAAAVYAGAKFRAPVEPY

SEQ ID NO: 7038 - protein, 888 aa, Oryza sativa
  Clone ID: PAT_MRT4530_89025C.1.pep
MSRHPEVKWAQRIDKVYITVQLADAKDAKVNLEPEGVFSFSATAGTDGNLYESKLELNDKVNVEESKISVGVRSIFCIVEKAEAKWWKKLVRDDQKAPHFVKVDWDKWVDEDDDGADVNVDGMDFSNFGGMGGMGGMGGMGDMMGGMGGMGGMGGMAEMMGGMGGMGGMGGMGGMDEFEDESDDEGSIIFAVWYDTNLNHMHQKFLNHYTYILVRKLFDACKVSVTRCRLRMSGDMPIRLYYGDAPIQICDSGVDLTVYAFHDTSLNAPEHMGLNDVLGWLYNMFGVDPVHDKFVINTVWPVRGQHEWQWRVVEVASTGSWRKFVSKVREKGYSLAIVVQKTTCVDRSGESSHAVVEETPLEGGQAENVWRTEQGRGEEVVEGNTQGEVIVRGTNREANDSDDEEPDSPMRVDAAEENEVVVDQMEVENEEYLALVVEGEDTTLWDNETNIPDDWTTISMSRMKVNDGLDAHWCYDSKQVKVGQMFHDKGHLQDAVKRWAFVQKREFRVKVSNRTTYDVKCIQGGCPWRVHGYKPQHDTLWVGSRVEQHTCLLENTRLVHRNLTAAFVAQMVYSKVVRKTSLSPFTIMHDVEKEYGYEISYDKAWRAKQKALEMRFGTHEDSYHNLPPLLEVMQARNPGTHMAILDEVNEYGENILRRAFWSFGCMIEAFRNCIPLLCVDGTFMTGKYRGTILTAIGVDTDSHVVPVAFAFVESKNTSSWLWFLRHIKMCVVENRLNVCVLHDRHAGLLSAIQKLQEDVTQSVPWPDLHSRWCMRHFGANFYRQFRNDEYGSASTHHGMPAYSPRTAFIEDFFSTDPPQGEVGMDYWHAAPQVTQPTQETEAGQGPDVTPQQAARDRLPPDNLTYPTEQIRHRKKGGPSKRAKGTDRP

SEQ ID NO: 7039 - protein, 1018 aa, Oryza sativa
  Clone ID: PAT_MRT4530_89052C.1.pep
MDCNKDEAVKAKALAEKKMREKDFAGAKRMINKAQNLSKDVDSNISQMLTVCDIHCASATKVNGEIDWYGILQVPVTADDTLIKKQYRKLALLLHPDKNNFAGAEAAFKLVGEANMTLTDRSKRSVYDMKRNASVRIGSARVPYQQSRRTAPVRPTTTPVNLHNVHQSQQHKPSNPSDSQTFWTICPTCGMRYQYYLSILKKALRCQNCLKPFVALDLNEQAVPSGANQRSAGVWKSSGAPQNFPGSQANVGQQAQNSANPVHANFGSHNAHVETKRGADGNEAGGLKNKRKFAKATGNSSKASSVAGSKKRRKAMFESSESSASDTSTDSEEEIIEDGPAASNVGPDQHPRRSSRQKQEVKYNEDSDGDDTDCHGNGDDGFVSSPSLKRLRKGGLFHGGENNETKLNADTTGPGHDGPTNGVNNYNNTEDIERGSACAEQIKRETMSGGGNSAEKEKLSHSVSNNGLESNSDDAPNEVICADSEFFDFNQLRHINQFKANQIWACYDSQSCMPRYYARITKVKHVPKFMLNFIWLEFDPKNKAEAAWSSGDLPVSCGRFKHGVSDTAKESSMFSHAIFYEKNKTRNSYEIYPRKGEVWALFKGWDIDWSADADKHKNYEYEVVQVLSDLTSSTSIIVMPLVKIKGFVSLFIQSKEASPYVIPQDDTLRFSHCVPRHTMIGTEKEGIPEGAIELDPAALPLNFGVAFASVVPESCCSVKVQGSGAEHIGSSSGNNCHKGSVDVGESQHATCANTGFATRTTKAEINEHNARSAVEGTDDDEEPDDFAQAEVLYPESEFFEFSEIRSIHKFQPGQIWALYSDVDKFPNYYACIKTVDVKNNELQVRWLDACPQSEEERRLVREDLTVACGTFKISSFHGIQTYNGTEYLSHPVQAKPGRRNEYEIVPCQGDIWAVFKNWRTGWTAKDYKKCDYELVEIFGHTDSSIQVQLLRKVDGYRAVFMPDRREGAVKTIRKDEYPKFSHQIPCFHLTNERGGKLRGFLELDPLSVPEMFLFTESI

SEQ ID NO: 7040 - protein, 935 aa, Oryza sativa
  unsure (1)..(935): unsure at all Xaa locations
  Clone ID: PAT_MRT4530_89113C.1.pep
GPHRQPPSRVATSSPXMPIRLYYGDAPIQICDSGVDLTVYAFHDTSLNAPEHMGLNDVLGWLYNMFGVDPVHDKFVINAVWPVRGQHGWQWRVVEVASTGSWRKFVSKVREKGYSLAIVVQKTTCVDRSGESSHAVVEETPLEGGQAENVWRTEQGRGEEVVEGNTQGEVIVRGTNREANDSDDEEPDSPMRVDAAEENEAVNDGLDAHWCYDSKQVKVGQMFHDKGHLQDAVKRWAFVQKREFRVKVSNRTTYDVKCIQGGCPWRVHGYKPQHDTLWVASRVEQHTCLLENTRLVHRNLTAAFVAQIVYSKVVRKTSLPPFTIMHDVEKEYGYEISYDKAWRAKQKALEMRFGTYEDSYHNLPPLLEVMQARNPGTHMAILDEVNEYGENVLRRAFWSFGCMIEAFKNCIPLLCVDGTFMTGKYRGTILTAIGVDADSHVVPVAFAFVESENTSSWLWFLRHIKMCVVENRPNVCVLYDRHAGLLSAIQKLQEDVTQSVPWPDLHSRWCMRHFGANFYRQFRSKRLMDLFKKLCKQNQQRKFDAIWEQLDRLTTTHMEEVRKKPIVARQEEPEGLEPIPNEAPSITRRRKRGRATKCFTEWVEFEPREKWSLLYDTDGSRYGVMTTNLAEVYNWVMKNTRPLPLVAILEGITRGTQKYLCKRYSMASLNLSKPSVKYSPAITQYMDEKSKKGGIHRVWHAGNRELLFEIRLRDKSGVGIGTTDITLECTLWPEYHACKCNCNKPYLLHRPCSHVLAASAKGGVDGNIFVSPYFRKESWEATWRGELRGWRAVCDFTRPPPGQANWVPDSNLLVDTKGHRQSRRIKNLMDEAEVKDRSRRMADQNDGQLIDKEIDRNQSRATHSTHGEVGMDYWHAAPQVTQPTQETEAGQGPDVTPHQAARDRHPPDNLTYPTEQIRRRKKGGPSKRAKGTDRP

SEQ ID NO: 7041 - protein, 365 aa, Oryza sativa
  Clone ID: PAT_MRT4530_89433C.1.pep
MGVVSFSSTSSGASTATTESGGAVRMSPEPVVAVAAAAQQLPVVKGVDSADEVVTSRPAAAAAQQSSRYKGVVPQPNGRWGAQIYERHARVWLGTFPDEEAAARAYDVAALRYRGRDAATNFPGAAASAAELAFLAAHSKAEIVDMLRKHTYADELRQGLRRGRGMGARAQPTPSWAREPLFEKAVTPSDVGKLNRLVVPKQHAEKHFPLRRAASSDSASAAATGKGVLLNFEDGEGKVWRFRYSYWNSSQSYVLTKGWSRFVREKGLRAGDTIVFSRSAYGPDKLLFIDCKKNNAAAATTTCAGDERPTTSGAEPRVVRLFGVDIAGGDCRKRERAVEMGQEVFLLKRQCVVHQRTPALGALLL

SEQ ID NO: 7042 - protein, 771 aa, Oryza sativa
  Clone ID: PAT_MRT4530_89498C.1.pep
MPRKVVSGPDYDDEYDDDYDEYDEDYDDYGETGHSDDIQHPVKEEKESSKKSSSTVPVLWRCSMCMFDNHESMVYCEMCGVFRESFMKSAKDGSIKVHGIPSDFGTPSMPKSDCTKMPVNTRTTDFDGDPEIKNASISHEKVGSTQYTSAGSSSGAGKKVKHIALPEDVPVERTAQLISDHFQLKEDQSSRASSSAQNEDVAQKLSSDIQKLGLEKNEVDTAKPYLPEEYKPEKWMFANEESGVLSQLNLAIVGHVDSGKSTLSGRLLHLLGRISKKDMHKNEKEAKEKGKGSFAYAWAMDESSEERERGVTMTVAVAYLETKKYRVVLLDSPGHKDFVPNMISGATQADAAILVVDACTGSFEAGMDGEGGKSVGQTKEHAQLIRSFGVEQLIVAVNKMDAIGYSKERFEFIKVQLGSFLRSCNFKDSSVTWIPLSAVENQNLIKIPSDVRLTSWYQGFCLLDAIDSLQLPSRDVSKPLILPICDVIKSQSTGQFAAFGKLETGAIRIGSKVLISPCGEVAAVKSIERDSNSCDIARAVPVSNFLELRVLVLDVTIRILIGYQVEFHIHHVKEAARVTKIVALLDKAGKPSKTAPRFLKSKQNAVVQVTLDAPVCVQEFSKCRALGRAFLRSSGSTIAVGVVTRPCFGAHIVADSKRDIKDPEHPYSLEELNVVTEDSVEINDELSHVRVTFTPTVERCSMATVIGLCLRVKLMRSLPPRYKVDIRVAPGSHATETAVNKQLNDKERVAAALENPNLLDIVEECLSPTFA

SEQ ID NO: 7043 - protein, 814 aa, Oryza sativa
  Clone ID: PAT_MRT4530_89500C.1.pep
NPSPLEAQVRRCVSRMPRKVVSGPDYDDEYDDDYDEYDEDYDDYGETGHSDDIQHPVKEEKESSKKSSSTVPVLWRCSMCMFDNHESMVYCEMCGVFRESFMKSAKDGSIKVHGIPSDFGTPSMPKSDCTKMPVNTRTTDFDGDPEIKNASISHEKVGSTQYTSAGSSSGAGKKVKHIALPEDVPVERTAQLISDHFQLKEDQSSRATSSAQNEDVAQKLSSDIQKLGLEKNEVDTAKPYLPEEYKPEKWMFANEESGVLSQLNLAIVGHVDSGKSTLSGRLLHLLGRISKKDMHKNEKEAKEKGKGSFAYAWAMDESSEERERGVTMTVAVAYLETNKYRVVLLDSPGHKDFVPNMISGATQADAAILVVDACTGSFEAGMDGEGGKSVGQTKEHAQLIRSFGVEQLIVAVNKMDAIGYSKERFEFIKVQLGSFLRACNFKDSSVTWIPLSAVENQNLIKIPSDVRLTSWYQGFCLLDAIDSLQLPSRDVSKPLILPICDVIKSQSTGQLAAFGKLETGAIRIGSKVLISPCGEVATVKSIERDSNSCDIARAGDNVAVSLQGIDGSKLIAGGILCNPGFPVPVSNFLELRVLVLDVTIPILIGYQVEFHIHHVKEAARVTKIVALLDKAGKPSKTAPRFLKSKQNAVVQVTLDAPVCVEEFSKCRALGRAFLRSCGSTIAVGVVTRPCFGAHIVADSKRDIKDPEHPYSLEELNVVTEDSVEINDELSHVRVTFTPTVERCSMATVIGLCLRVKLMRSLPPRYKVDIRVAPGSHATETAVNKQLNDKERVAAALENPNLLDIVEECLSPTFA

SEQ ID NO: 7044 - protein, 1076 aa, Oryza sativa
  unsure (1)..(1076): unsure at all Xaa locations
  Clone ID: PAT_MRT4530_89648C.1.pep
MAKTLQGTQQQYAASGFPTQQYPTSGWTQSAAEILQLDNMDQDTSVVRNIIHRKIVEYLNERKEFCNFDLSFLMEIGKCIDRHLFEKADSKIKYMDLETLRTRLNAIVNSASFRGRYNQYENCMGAANFAHSLADKPKQMPERLANTIFTSCASTLPKCSPSIDVLHIGHIKEHFSGDAYQNDSSQPSTSGSSSSLSAVWDQTTCSSAMRTLPMDSFSTVNGQNLSTNNKSLYPTTGQGPLLQQYIECEMKQETWSRSLEQSDQSNITTGNRDLYHAQIHPYINGEHKRDRCIQMKEKLGHTSDHEGFSREKSSNLSNHFMHHQQGFMTNYGACSPVSKTVDRAEQTSNSTVSKPTSPASDGSSGKHYPAKRLKVDVPHLVHVNEMEASKEQQPAANETYASAETVQSEVTNSPTKSPCCTSLGDNIACTDNVHGMDMVRLSGSAVQTEEEFRRENSDIEMKDAKVDLLDQTLSGDSLRARKRRGASVLYALTSEELKDHLCTLNHDTSQSKVPTEELLSVEGLPDQNTCNLCGMERLLFEPPPRFCALCFKIINSTGSYYVEVENGNDKSSICGRCHHLSSAKAKYQKRFSYAETDAEAEWWVQCDKCKAWQHQICALFNPKIVDPEAEYTCAKCFLKEKDNEDVDSLEPSTILGARELPRTRLSDHIEQRLSERLVQERQQRAIASGKSVDEVPGVEGLTVRVVSSADRTLQVQPRFKDFFKKEQYPGEFPYKSKAILLFQKNEGVDVCLFAMYVQEYGSACPSPNQRHVYLAYIDSVKYFRPEIKSASGEALRTFVYHEILIGYLDFCKKRGFVSCSIWTCPSTKRDDYVLYCHPTIQKMPKSDKLRSWYQNLVKKAVKEGVVVERNTLYDFFLQPTNECKTNISAAWLPYCDNDFWPGEAERLLEKKDDDTSQKKETQLGRLLRVAKRDDRKGNLEDILLVHKQFCKHCHHPIVSGSSWVCTSCKNFFLCERCYAEELNTPLKDRHPATTKQKHAFERDYLEGLVHASRCFDRSCTSKLCLTLXNCSSMVYDVIPVPVVEEVAICVYSCGNCCSRTHCFVTMQTVQLPDAGI

SEQ ID NO: 7045 - protein, 535 aa, Oryza sativa
  Clone ID: PAT_MRT4530_89679C.1.pep
MGMEVAAARLGALYTTSDYASVVSINLFVALLCACIVLGHLLEENRWVNESITALIIGLCTGVVILLMTKGKSSHLFVFSEDLFFIYLLPPIIFNAGFQVKKKQFFRNFMTITLFGAVGTMISFFTISIAAIAIFSRMNIGTLDVGDFLAIGAIFSATDSVCTLQVLNQDETPFLYSLVFGEGVVNDATSIVLFNALQNFDLVHIDAAVVLKFLGNFFYLFLSSTFLGVFAGLLSAYIIKKLYIGRHSTDREVALMMLMAYLSYMLAELLDLSGILTVFFCGIVMSHYTWHNVTESSRVTTKHAFATLSFIAETFLFLYVGMDALDIEKWEFASDRPGKSIGISSILLGLVLIGRAAFVFPLSFLSNLTKKAPNEKITWRQQVVIWWAGLMRGAVSIALAYNKFTRSGHTQLHGNAIMITSTITVVLFSTMVFGMMTKPLIRLLLPASGHPVTSEPSSPKSLHSPLLTSMQGSDLESTTNIVRPSSLRMLLTKPTHTVHYYWRKFDDALMRPMFGGRGFVPFSPGSPTEQSHGGR

SEQ ID NO: 7046 - protein, 42 aa, Oryza sativa
  Clone ID: PAT_MRT4530_89985C.1.pep
PEAGEGGGDGARGLPTEEAIAWFISVTPVLGSPASYKHQIKF

SEQ ID NO: 7047 - protein, 762 aa, Oryza sativa
  Clone ID: PAT_MRT4530_90081C.1.pep
MNHKHSFSALCAAMILNVIILFVDSYVAVASDTLFPGQSLSGSETLVSENGIFELGLFPSAPAGTKHYLGIRYKNMSSNNPITFWLGNRIPITYFINATLYIDAGKLYIEELGSILWTSNSTRNESNTAVAVILNTGNFVIRDQLNSSVVTWQSFDHPADKLLPGAYLGLDMVMGTNILLTLFKPPYNCTLMIDQSRKRGFIMFIDGHDKYLGTFPEWMVTYEENGSLVRLNDPGIPNDTEYMKLQLGQLSLLRWLDNATISGWQSVWSHPSSCKVSAFHCGAFGICTSTGTCKCIDGFRPTEPNEWELGHFGSGCSRITPSNCLGVVSTDLFVLLDNLQGLPYNPQDVMAATSEECRAICLSECYCAAYSYHSACKIWYSMLFNLTSADNPPYTEIYMRIGSPSKRRMHILVFVLIFGSIGVILFLLMLLLMYKRSSCVARQTKMEGFLAVYSYAQVKKATRNFSDKLGEGSFGSVFKGTIAGSTIVAVKKLKGLGHTEKQFRTEVQTVGMIQHNNLVRLLGFCTRGTRRLLVYEYMPNGSLDSHPFSETSRVLGWNLRHQIVVGIARGLAYLHEECRDSIIHCDIKPENILLDAEFCPKIADFGMAKLLGREFSAALTTIRGTIGYLAPEWISGQAITHKADVYSFGVVLFEIISGRRSTEKIRHGNHWYFPLYAAAKVNEGDVLCLLDDRIEGNASLKELDVACRVACWCIQDDEIHRPSMRKVIHMLEGVVDVELPPIPASFQNLMDDYDSDIYSVEV

SEQ ID NO: 7048 - protein, 166 aa, Oryza sativa
  unsure (1)..(166): unsure at all Xaa locations
  Clone ID: PAT_MRT4530_90460C.1.pep
TKSSPTHPVELNEVKLIDGYYIMDPAKASGYXVDENTICIVAIPRSTLNGEYEDVKLLNDLLTKKNAETGWDTPIHVNAGSGWFIAPMLYPELKWDFRLXLANSMIISGHKYGLVYAGIGWCIWTSKEDLSEELMFHMNYLGADQPTXTLNLWKGCSHVIAHDYQL

SEQ ID NO: 7049 - protein, 541 aa, Oryza sativa
  Clone ID: PAT_MRT4530_90535C.1.pep
MTTVASLSLLPHLLIKPSFRCCSRKGVGRYGGIKVYAVLGDDGADYAKNNAWEALFHVDDPGPRVPIAKGKFLDVNQALEVVRFDIQYCDWRARQDLLTIMVLHNKVVEVLNPLAREFKSIGTLRKELAELQEELAKAHNQVHLSETRVSSALDKLAQMETLVNDRLLQDGGSSASTAECTSLAPSTSSASRVVNKKPPRRSLNVSGPVQPYNPSLKNFWYPVAFSSDLKDDTMVPIDCFEEQWVIFRGKDGRPGCVMNTCAHRACPLHLGSVNEGRIQCPYHGWEYSTDGKCEKMPSTKMLNVRIRSLPCFEQEGMVWIWPGNDPPKSTIPSLLPPSGFTIHAEIVMELPVEHGLLLDNLLDLAHAPFTHTSTFAKGWSVPSLVKFLTPSSGLQGYWDPYPIDMEFRPPCMVLSTIGISKPGKLEGKSTKQCSTHLHQLHICLPSSRNKTRLLYRMSLDFAPWIKHVPFMHILWSHFAEKVLNEDLRLVLGQQERMINGANVWNWPVSYDKLGIRYRLWRDAIERGVDRLPFSNQSESGS

SEQ ID NO: 7050 - protein, 556 aa, Oryza sativa
  Clone ID: PAT_MRT4530_90537C.1.pep
MTTVASLSLLPHLLIKPSFRQWFQGSVILQTPYLKTCCIEGVGRYGGIKVYAVLGDDGADYAKNNAWEALFHVDDPGPRVPIAKGKFLDVNQALEVVRFDIQYCDWRARQDLLTIMVLHNKVVEVLNPLAREFKSIGTLRKELAELQEELAKAHNQVHLSETRVSSALDKLAQMETLVNDRLLQDGGSSASTAECTSLAPSTSSASRVVNKKPPRRSLNVSGPVQPYNPSLKNFWYPVAFSSDLKDDTMVPIDCFEEQWVIFRGKDGRPGCVMNTCAHRACPLHLGSVNEGRIQCPYHGWEYSTDGKCEKMPSTKMLNVRIRSLPCFEQEGMVWIWPGNDPPKSTIPSLLPPSGFTIHAEIVMELPVEHGLLLDNLLDLAHAPFTHTSTFAKGWSVPSLVKFLTPSSGLQGYWDPYPIDMEFRPPCMVLSTIGISKPGKLEGKSTKQCSTHLHQLHICLPSSRNKTRLLYRMSLDFAPWIKHVPFMHILWSHFAEKVLNEDLRLVLGQQERMINGANVWNWPVSYDKLGIRYRLWRDAIERGVDRLPFSNQSESGS

SEQ ID NO: 7051 - protein, 357 aa, Oryza sativa
  Clone ID: PAT_MRT4530_90587C.1.pep
MARRSSSRACAAMATAAVFALLAATATASGLVRVEHPAKSDGSLSLLVVGDWGRKGTYNQSRVAEQMGKVGEKLNIDFVISTGDNFYEDGLTGVDDQAFEESFTDIYTAKSLQKPWYLVLGNHDYRGDVLAQLSPVLRKIDQRFICMRSFIVNAEIVDFFFIDTTPFQLKYWTRPKDHHYDWRGVAPRQKYITNLLKDMDEAMKKSTAKWKIAVGHHTIRSVSDHGDTKELLQLLLPVLKVNGIDFYINGHDHCLEHISSRDSPIQYFTSGGGSKAWRGVLQPNSDKLQFFYDGQGFMSLQINQDQADFIFYDVSGNILYKWSKSKANYLQPSTYITEAFTYNLWRERERERDFGGF

SEQ ID NO: 7052 - protein, 339 aa, Oryza sativa
  Clone ID: PAT_MRT4530_90589C.1.pep
MARRSSSRACAAMATAAVFALLAATATASGLVRVEHPAKSDGSLSLLVVGDWGRKGTYNQSRVAEQMGKVGEKLNIDFVISTGDNFYEDGLTGVDDQAFEESFTDIYTAKSLQKPWYLVLGNHDYRGDVLAQLSPVLRKIDQRFICMRSFIVNAEIVDFFFIDTTPFQLKYWTRPKDHHYDWRGVAPRQKYITNLLKDMDEAMKKSTAKWKIAVGHHTIRSVSDHGDTKELLQLLLPVLKVNGIDFYINGHDHCLEHISSRDSPIQYFTSGGGSKAWRGVLQPNSDKLQFFYDGQGFMSLQINQDQADFIFYDVSGNILYKWSKSKANYLQPSTYITEA

SEQ ID NO: 7053 - protein, 590 aa, Oryza sativa
  unsure (1)..(590): unsure at all Xaa locations
  Clone ID: PAT_MRT4530_90745C.1.pep
MGSYAYKYCMCFTRKFRSPAADPPPDVRAAFLAAGGGDGGLRRFLAQAQGETPAEVDRILALLSGGGGGGGGGGIAARLVGPRPGPAPSLDDFFGFLFNADLNPXIATQVHQDMSAPFSHYYIYTGHNSYLTGNQLNSDSSDIPIIKALQRGVRVIELDMWPNSAKNNIDILHGGTLTAPVQIIKCLKSIKEYAFCASPYPLVITLEDHLTPDLQAKVAEMLVKTFGNLLYIPSSDPINEFPSPESLMKKIIISTKPPEEYKKFLKSKDNQNINGGLANLAEEGSLRRIDSNAEESDGKDELDDQDEDSSDEDDPKFQQETACEYRELITIHAGKPKGHLKDALKVDPDKVRRLSLSETQLAKATASHGADVIRFTQKNILRVYPKGTRINSSNYDPMNAWTHGAQMVAFNMQGHDKALRLMQGFFRANGGCGYVKKPDFLLRTGPNGEVFDPNASMPVKKTLKVKVYMGDGWRMDFSKTHFDTFSPPDFYTRVGIAGVRADCVMKKTRTIEDQWVPMWDEEFTFPLTVPELAVLRIEVHEYDMSEKHDFGGQTCLPVSELKQGIRAVPLHDRRGTRYKSVRLLMRFDFL

SEQ ID NO: 7054 - protein, 442 aa, Oryza sativa
  Clone ID: PAT_MRT4530_91041C.1.pep
MADTASPAAAREAMIEPASTPLLRRRGSYTRSMSHARDELGSFRSCLRWMCVEHSDGSSAVASWLVFTLLAVAVPAAARAALPRRAYDGQVQASLTLSAALAYLTLSRLVRRRGLRRLLYLDRLRHDSQDVRAGYTVELAGSFRLLACFVLPCFLADAAYKVYWYCANRPFPLWWSAAACALEMASWMYRTAMFFMACVLFRIICFLQILRMTGFARDFGQCADVADVLRQHRRIREQLRRISHRYRKFIVSCLLLVTASQFSALLAATRPHAQVNIATSGELALCSLSLVTGLLICLHSAAKITHKTQAITSVAAQWHADATINSQERDHENPRTPIKASSYLHAAGPVVPQPAPNASSSGDESEDETSPSDDGLDGTKIVSFHATHISFQKRQALVTYLENNRAGITVFGFVVDRTWLHALFMIEFSLVMWLLGKTIGIS

SEQ ID NO: 7055 - protein, 411 aa, Oryza sativa
  Clone ID: PAT_MRT4530_91259C.1.pep
MGGGGAGGDGEAWADQEQGNGGGRGGGGGEAKRSEIYTYEAGWHIYGMNWSVRRDKKYRLAIASLLEQHNNHVQVVQLDESSGDIAPVLTFDHPYPPTKTMFVPDPHSVRPDLLATSADHLRIWRIPSPDEAAAAAAASSNSGSVRCNGTASPDVELRCELNGNRNSDYCGPLTSFDWNDADPRRIGTSSIDTTCTIWDVEREAVDTQLIAHDKEVYDIAWGGAGVFASVSADGSVRVFDLRDKEHSTIIYESGSGGSSNSAGADGGAASPTPLVRLGWNKQDPRYMATIIMDSPKVVVLDIRYPTLPVVELHRHHSPVNAIAWAPHSSCHICTAGDDSQALIWDLSSMGTGSNNGGNGNGNAAAAAAAEGGLDPILAYTAGAEIEQLQWSATQPDWVAIAFSTKLQILRV

SEQ ID NO: 7056 - protein, 362 aa, Oryza sativa
  Clone ID: PAT_MRT4530_91530C.1.pep
MAHAAAATGALAPLHPLLRCTSRHLCASASPRAGLCLHHHRRRRRSSRRTKLAVRAMAPTLSSSSTAAAAPPGLKEGIAGLYDESSGVWESIWGEHMHHGFYDAGEAASMSDHRRAQIRMIEESLAFAAVPDDAEKKPKSVVDVGCGIGGSSRYLANKYGAQCYGITLSPVQAERGNALAAEQGLSDKVSFQVGDALEQPFPDGQFDLVWSMESGEHMPDKRQFVSELARVAAPGARIIIVTWCHRNLEPSEESLKPDELNLLKRICDAYYLPDWCSPSDYVKIAESLSLEDIRTADWSENVAPFWPAVIKSALTWKGLTSLLRSGWKTIRGAMVMPLMIEGYKKGLIKFTIITCRKPETTQ

SEQ ID NO: 7057 - protein, 510 aa, Oryza sativa
  Clone ID: PAT_MRT4530_91961C.1.pep
MATTDATIAHIMDEQEDIKVKASKCWNPIRPPATLLISNGRQISIQAPFSAREYLMESSRSPLSNGSNLITKFHPSQPQMKKQGATSPVMGLWACNFVWDPGPRIGLICTGKINNPRRGVSIAKAQHNVSFQRLLLSCAGPTVETNTVNSNSRFVPSSSLDANPVCDRTYPRNKSALIDRAMAVAVEEIVRRAGGCAVIDGGFATQLEALGADINDPLWSAACLITKPHLIKEVHMQYLEAGADVIISSSYQATIPGFLARGMLLEEAEGLLRRSIELALEARDEFWKSTLRKSKPVYNRALVAASIGSYGAYLADGSEYSGSYGEDITAEKLKDFHRRRLQVLASAGPDLIAFEAIPNKMEAQALVELLEEENIQVPSWICFSSVDGKNLCSGESFAECLQFLNASDKVTIVGVNCTPPQFIEGIIRELKKQTKKAIAVYPNSGEIWDGRAKRWLPAQCFGHKSFDALAKRWQEAGASLVGGCCRTTPSTIRAVSKVLKGKTSYSATQI

SEQ ID NO: 7058 - protein, 429 aa, Oryza sativa
  Clone ID: PAT_MRT4530_9221C.1.pep
MSSPPPAAAAAMAVDDADDDQLASMSTEDIVRATRLLDNETRVLKDELQRTNLEVESYKEKIKENQEKIKLNKQLPYLVGNIVEILEMNPEDEAEEDGANIDLDSQRKGKCVVLKTSTRQTIFLPVIGLVDPEKLKPGDLVGVNKDSYLILDTLPSEYDSRVKAMEVDEKPTEDYNDIGGLEKQIQELVEAIVLPMTHKDRFQKLGIRPPKGVLLYGPPGTGKTLMARACAAQTNATFLKLAGPQLVQMFIGDGAKLVRDAFQLAKEKSPCIIFIDEIDAIGTKRFDSEVSGDREVQRTMLELLNQLDGFSSDERIKVIAATNRADILDPALMRSGRLDRKIEFPHPSEEARARILQIHSRKMNVNPDVNFEELARSTDDFNGAQLKAVCVEAGMLALRRDATEVTHEDFNEGIIQVQAKKKSSLNYYA

SEQ ID NO: 7059 - protein, 623 aa, Oryza sativa
  Clone ID: PAT_MRT4530_92341C.1.pep
MEDWMPPPTPSPRTLMSSFLNEDFVSGSFSNIFSDHESNKPQDQFERNRELVDLSKEVPSQFARPAFQRDASLDHSLVSPTQRSNSHGGLAERRAARAGFSVPKIDTSRGGSSTVIRSPVAIPPGLSPTTLLESPVFLYNAMAQPSPTTGTLPFLMASNAKSTIPSATKMDEDCTFGNDTFSFQPHVGSRRPNFSAAEKGPNACHQNQSLSNIHQRESSLQSSFTAVKDITDEKNIKTKTSDSMFGDNHSSDEQDDETNQNGENSMPPPNHRSGVPLSHTNDPEVNVLENRGSQTCHNSASLWDNAKNDCLQDVQSEVIETRTAACLPVSTNCDTSIMESQDAVDVSSTLSNEEDDRATHGTASIECNGDGDETDSKRRKLDALTAATAAITTTSNIDMGAAASRGVREPRVVVQTTSEVDILDDGYRWRKYGQKVVKGNPNPRSYYKCTHQGCSVRKHVERASHDLKSVITTYEGKHNHEVPAARNSGHGSSGSGNAPSAPQSNGSQRRQEQGQASFSQFGGAAPFSSFVLPPRNQFGPSASNFPFGMVPPGMAIPMPSLGSLAPAKMAGHPSTMQGYQGLMIPEGEMKTEPMSQLGFPAVNQSSSSFQQMMNRPPSFGPQM

SEQ ID NO: 7060 - protein, 477 aa, Oryza sativa
  Clone ID: PAT_MRT4530_92556C.1.pep
MAVTADVKLEGLRAATDKLDQISENEKSGFISLVSRYLSGEAEQIEWSKIQTPTDEVVVPYDTLSAAPEDLNETKKLLDKLVVLKLNGGLGTTMGCTGPKSVIEVRNGFTFLDLIVIQIESLNKKYGCNVPLLLMNSFNTHDDTQKIVEKYSNSNIEIHTFNQSQYPRIVTEDFLPLPSKGKTGKDGWYPPGHGDVFPSLNNSGKLDTLLAQGKEYVFVANSDNLGAIVDIKFESLTITEILNHLIHNQNEYCMEVTPKTLADVKGGTLISYEGRVQLLEIAQVPDEHVNEFKSIEKFKIFNTNNLWVNLKAIKRLVEAEALKMEIIPNPKEVDGVKVLQLETAAGAAIRFFEKAIGINVPRSRFLPVKATSDLLLVQSDLYTLVDGFVIRNPARTNPSNPSIELGPEFKKVANFLARFKSIPSIVELDTLKVSGDVWFGSGVTLKGKVTITAKSGKLEIPDGAVLENKDINGPEDL

SEQ ID NO: 7061 - protein, 352 aa, Oryza sativa
  Clone ID: PAT_MRT4530_92598C.1.pep
MADSPSPRLDEEDAFGRDFNSSPSPTAPPARSGEKRPFGDLDDDDEDVFASKKGKTKVEESAPGAATGMILSLRESLQNCKDNLASCQVEREAAKSEVQKWHSAFQNIPAVPAGTNPDPVSVVSYLNNLKSSEESLKEQLEKAKKREAAFIVTFAKREQEIAELKSAVRDLKTQLRPPSMQTRRLLLDPAIHEEFTRLKNLVEEKEKKIKELQDNVAAVNFTPSSKHGKMLMAKCRTLQEENEEIGAMASEGKIHELGMKIAVLKTRNNELRNQFNELYKHMDGLTNDVERSNEMVAILQDELETKDVELRRLKEMLAQKEATDENKIPQENDVAGDDIVAAAESQPIKVET

SEQ ID NO: 7062 - protein, 459 aa, Oryza sativa
  Clone ID: PAT_MRT4530_92707C.1.pep
MVSYVGPSTARPTSGRAWAGYSDDAAAVRESRVASGGIEHGGGRPWPQDQRWYQHCHLQQEEEPWRCQIKAHTVLQGSDALSSIREWSRSHLVTMTGLVACAVLVVPSADAVDALKTCTCLLKECRIELAKCIANPSCAANVACLNTCNNRPDETECQIKCGDLFENTVVDEFNECAVSRKKCVPQKSDVGEFPVPDPSALVKNFNMADFNGKWYISSGLNPTFDTFDCQLHEFRVEGDKLIANLTWRIRTPDSGFFTRTAIQRFVQDPAQPAILYNHDNEFLHYQDDWYIISSKVENKEDDYIFVYYRGRNDAWDGYGGAVLYTRSKVVPESIVPELERAAKSVGRDFSTFIRTDNTCGPEPPLVERIEKTVEQGEKTIIREVQEIEGEIEGEVKELEEEEVTLFKRLTDGLMEVKQDLMNFFQGLSKEEMELLDQMNMEATEVEKVFSRALPIRKLR

SEQ ID NO: 7063 - protein, 446 aa, Oryza sativa
  Clone ID: PAT_MRT4530_92709C.1.pep
MAARPEVVSALSPPAGGGAMGGVRYHRCCPPRAYLWRKGDHLPLHHAKISARCSEIKAHTVLQGSDALSSIREWSRSHLVTMTGLVACAVLVVPSADAVDALKTCTCLLKECRIELAKCIANPSCAANVACLNTCNNRPDETECQIKCGDLFENTVVDEFNECAVSRKKCVPQKSDVGEFPVPDPSALVKNFNMADFNGKWYISSGLNPTFDTFDCQLHEFRVEGDKLIANLTWRIRTPDSGFFTRTAIQRFVQDPAQPAILYNHDNEFLHYQDDWYIISSKVENKEDDYIFVYYRGRNDAWDGYGGAVLYTRSKVVPESIVPELERAAKSVGRDFSTFIRTDNTCGPEPPLVERIEKTVEQGEKTIIREVQEIEGEIEGEVKELEEEEVTLFKRLTDGLMEVKQDLMNFFQGLSKEEMELLDQMNMEATEVEKVFSRALPIRKLR

SEQ ID NO: 7064 - protein, 533 aa, Oryza sativa
  Clone ID: PAT_MRT4530_93023C.1.pep
MDSSTVGAPGSSLHGVTGREPAFAFSTEVGGEDAAAASKFDLPVDSEHKAKTIRLLSFANPHMRTFHLSWISFFSCFVSTFAAAPLVPIIRDNLNLTKADIGNAGVASVSGSIFSRLAMGAICDMLGPRYGCAFLIMLAAPTVFCMSLIDSAAGYIAVRFLIGFSLATFVSCQYWMSTMFNSKIIGLVNGLAAGWGNMGGGATQLIMPLVYDVIRKCGATPFTAWRLAYFVPGTLHVVMGVLVLTLGQDLPDGNLRSLQKKGDVNRDSFSRVLWYAVTNYRTWIFVLLYGYSMGVELTTDNVIAEYFYDRFDLDLRVAGIIAASFGMANIVARPTGGLLSDLGARYFGMRARLWNIWILQTAGGAFCLLLGRASTLPTSVVCMVLFSFCAQAACGAIFGVIPFVSRRSLGIISGMTGAGGNFGAGLTQLLFFTSSRYSTGTGLEYMGIMIMACTLPVVLVHFPQWGSMFLPPNAGAEEEHYYGSEWSEQEKSKGLHGASLKFAENSRSERGRRNVINAAAAAATPPNNSPEHA

SEQ ID NO: 7065 - protein, 135 aa, Oryza sativa
  unsure (1)..(135): unsure at all Xaa locations
  Clone ID: PAT_MRT4530_93123C.1.pep
LTHSNQYYLFHHKKDDEHDTGXVDSYGGGVYTSNTVTTDVFIGGQNEYKRYKMEEKXHTHKQHLVEAGALVDGAFIMYEKHEAKKDPENAHKHKIMEEIAFTDWFNAGRYTLHEHHEKNKDHTSAEESTGEKKHH

SEQ ID NO: 7066 - protein, 602 aa, Oryza sativa
  Clone ID: PAT_MRT4530_93287C.1.pep
MDTLFRLVSLQAASEQQQQQQQSASYNSRSTTSSGSRSSSHQTNASYSYYHHSSNSGGGGGGGGGYYYGGQQPPPSQYYYLEPYQEECGNAPHHQLYMDEDFSSSSSSRHFHHGARVQQQQPPASSTPTGTAPTPPLSTSSTAAGAGHGLFEAADLSFPPDLNLDFSSPASSSGGGTASSGAVGGGGGGRWASQLLLECARSVAARDSQRVQQLMWMLNELASPYGDVEQKLASYFLQGLFARLTASGPRTLRTLAAASDRNTSFDSTRRTALRFQELSPWSSFGHVAANGAILESFLEVAAAASSETQRFHILDLSNTFCTQWPTLLEALATRSADETPHLSITTVVSAAPSAPTAAVQRVMREIGQRMEKFARLMGVPFRFRAVHHSGDLAELDLDALDLREGGATTALAVNCVNSLRGVVPGRARRRDAFAASLRRLDPRVVTVVEEEADLVASDPDASSATEEGGDTEAAFLKVFGEGLRFFSAYMDSLEESFPKTSNERLALERGAGRAIVDLVSCPASESMERRETAASWARRMRSAGFSPVAFSEDVADDVRSLLRRYREGWSMREAGTDDSAAGAGVFLAWKEQPLVWASAWRP

SEQ ID NO: 7067 - protein, 497 aa, Oryza sativa
  unsure (1)..(497): unsure at all Xaa locations
  Clone ID: PAT_MRT4530_9330C.1.pep
MREGNVTHHEYMQVGKGRDVGMNQISSFEAKVANGNGEQTLSRDIYRLGRRFDFYRMLSFYFTTVGFYFSSMVTVLTVYVFLYGRLYLVMSGLERSILLDPRIEQNIKPLENALASQSFFQLGLLLVLPMVMEVGLEKGFRTALGEFVIMQLQLASVFFTFQLGTKTHYYGRTILHGGAKYRPTGRGFVVYHAKFADNYRMYSRSHFVKGLELLILLVVYLVYGSSYRSSSMYLFVTFSIWFLVASWLFAPFIFNPSCFEWQKTVDDWTDWRKWMGNRGGIGMSVDQSWEAWWISEQEHLRKTSIRSLLLEIILSLRFLIYQYGIVYHLNIARRSKSILVYGLSWLVMLSVLVVLKMVSIGRQKFGTDLQLMFRILKGLLFLGFVSVMAVLFVVCNLTISDVFASILGFMPTGWCILXDWAGMFAVGEEGNAVGFHHGAREVVREPDGTRPLPPHRPLVMVPLRVRVPDTTALQPGLQPWPPDLKDPRRAKGHWRGM

SEQ ID NO: 7068 - protein, 629 aa, Oryza sativa
  unsure (1)..(629): unsure at all Xaa locations
  Clone ID: PAT_MRT4530_94258C.1.pep
MAAPSAATRRKLQRKFKLRGFTLKVDALEEAAAFLARFPDAEDDALDLLLDELDKEPLQSSILDRDAVRRVVALLVEADEAVDAASPAATSARSALRVVDSFVVPRFHYDPIKKVFYELAIHGEAGDKAALYRDRYQVLLQRLARDIYFSKPAFDTVMTEDDNCEVNTCGFPPLEDREASLSMLMGLDFFGGGPSKALPRCALPKYLTEELQKHIPNAIFVSNPCSTHGHAVDCRLVHYTRSIADAQPQDVPQWSWAERFAIGRPVVDSAPYGVGRSAQWPEDGPTMGTYWCRRGRRYAHVQVRRGYPDFVFEFDRLQPSDVIWEPYTEEAVAARAPLGLSSLCTRDQAYWLTILPMVFDIFVEPHCPQRVMRQFGLRQVLATEEVINELFLHTEENYRDYLRWYLPRTHARVTFTPDAPEPHVAAVTDAYPTHRDRDYFVGADAARDISANITAVQVRLNRGLHLTDVEQRVTFDRMQEKMRAVMRVFSCRSAVDVVPPAGPDLVCLRAPLASEQCDLQHRNSSAFERVHSHDRRFRELRRGIRQHFRRVRHLFERVRQLFLSRSVDPSSTRRDLRYWGLFVSRRXGGAPEAHTQEQPEVTPVQAGRVGRAIPPDRLTYSQGHVRAQA

SEQ ID NO: 7069 - protein, 97 aa, Oryza sativa
  Clone ID: PAT_MRT4530_94515C.1.pep
VNTSTPAIQKCMAYFPQNEIEKDFYYLFSLATIFNTCILESWILIRGIKDIILVLHRGMKYLHLWTKRIKNRPCICGQRIIPWKAIQKLKHMVYVSG

SEQ ID NO: 7070 - protein, 544 aa, Oryza sativa
  Clone ID: PAT_MRT4530_94553C.1.pep
MCADCPSTVAALGKKAETLKPAQVLPTTSGPVLFKHREAKPTGGYCIHVICSKFRCPLLYGKAATTREGGEVEEGAMGGAEDAPRAAAANGHGNGATVEEKLDELRRLLGKADGDPLRIVGVGAGAWGSVFCALMQDAYGHLRDKVQVRIWRRPGRAVDRATAEHLFEVINAREDVLRRLIRRCAYLKYVEGRLGDRTLYADEILRDGFCLNMIDTPLCPLKVVTNLQEAVWDADIVINGLPSTDTREVFGEIGRYWKERITAPIILSLAKGIEASLDPLPRIITPTQMISNATGVPLENILYLGGPNIASEIYNKEYANARICGADKWRKPLAKFLRQPHFIVWDNSDLITHEVMGGLKNVYAIGAGMVAALTNESATSKSVYFALCTSEMIYITHLLEEEPEKLAGPLLADTYVTLLKGRNAWYGQKLAKGELTLEMGDSIKGKGTIQGVSAVHAFYELLSQSSLSVTHPEVKKLVAPVELCPILKALYKILIKRELATDSILQAIRDESMYDPRERIEMAQRQCLYRPSLLGLPKVDITQA

SEQ ID NO: 7071 - protein, 676 aa, Oryza sativa
  Clone ID: PAT_MRT4530_94738C.1.pep
MAPTSMSLAAKTPLPFSTLPSSGVAQRPVSVTASLEHKTNDARRKFLKLALGNLGVGLPTLLGAKRALAEEQGVSSSRMSYSRFLEYLDKDRVKKVDLFENGTIAIVEAISPELGNRVQRVRVQLPGLSQELLQKLREKNIDFAAHSNQEDSGSLLFNLIGNLAFPLILIGGLFLLSRRAQGGLGGPNGPGFPLGFGQSRAKFQMEPNTGVTFDDVAGVDEAKQDFMEVVEFLKKPERFTAVGARIPKGVLLVGPPGTGKTLLAKAIAGEAGVPFFSISGSEFVEMFVGVGASRVRDLFKKAKENAPCIVFVDEIDAVGRQRGTGIGGGNDEREQTLNQLLTEMDGFEGNTGIIVIAATNRADILDSALLRPGRFDRQVSVDVPDVRGRTEILKVHGSNKKFDTDVSLEVIAMRTPGFSGADLANLLNEAAILAGRRGRTAISSKEIDDSIDRIVAGMEGTVMTDGKSKSLVAYHEVGHAICGTLTPGHDPVQKVTLIPRGQARGLTWFIPMDDPTLISRQQLFARIVGGLGGRAAEEIIFGEPEVTTGAAGDLQQITGLAKQMVVTFGMSDIGPWSLMDSGAQSGDVIMRMMARNSMSEKLAEDIDTAVKRLSDEAYEIALSQIRSNREAMDKIVEVLLEKETLSGDEFRAILSEFTEIPVENRVPPATPAALPA

SEQ ID NO: 7072 - protein, 233 aa, Oryza sativa
  Clone ID: PAT_MRT4530_94829C.1.pep
MAANVGESTSSGTNGDAAGGSFECNICFELPQEPIVTLCGHLFCWPCIYRWLHIHAHSPECPVCKAVVEEDKLVPLYGRGKDRVDPRSKNIPEADIPNRPTGQRPATAPQADPNNNFAHANPNANANPWFMGTGVPLANARWGNYAFSAAFGGLFPMLSFQVHGFPDANPYAQPAGFHYGYGHGHGFHGGHMGHAAHGVPRQGPLEQPQQADIYLKALLIMVGFLVVASLLAF

SEQ ID NO: 7073 - protein, 996 aa, Oryza sativa
  unsure (1)..(996): unsure at all Xaa locations
  Clone ID: PAT_MRT4530_94961C.1.pep
MGCSSSVPARSTGGLNNISNDNSATDSKDLRAKLVLLGDSGVGKSCIVLRFVRGQFDPTSKVTVGASFLSQTLALEDSTIVKFEIWDTAGQERGAAAAVVVYDITSPESFSKAQYWVKELQKHGSPDIIMVLVGNKADLHENRHVSSQEAQEYAEKNNMVFIETSAKTADNINQVFEVTVFALGFRARMRPVLVRRGLGKGKKDFSTAILERKKSPNRLVVDEATNDDNSVIGMHPDTMEKLQLFRGDTVLLKGKKRKDTICIVLADDTCEEPKIRMNKVVRKNLRVRLGDVVSVHQCPDVKYGKRVHILPIDDTVEGITGNLFDAFLKPYFLEAYRPLRKGDLFLVRGGMRSVEFKVIETDPAEYCIVAPDTEIFCDGEPIKREDEERLDEVGYDDVXGGVRKQMAQIRELVELPLRHPQLFKSIGVKPPKGILLYGPPGSGKTLIARAVANETGAFFFLINGPEIMSKLAGESESNLRKAFEEAEKNAPSIIFIDEIDSIAPKREKTHGEVERRIVSQLLTLMDGLKARSHVIVMGATNRPNSIDPALRRFGRFDREIDIGVPDEVGRLEVLRIHTKNMKLAEDVDLEHIAKDTHGYVGADLAALCTEAALQCIREKMDIIDLEDETIDAEILNSMAVTNDHFKTALGTSNPSALRETVVEVPNVSWEDIGGLENVKRELQETVQYPVEHPEKFEKFGMSPSKGVLFYGPPGCGKTLLAKAIANECQANFISVKGPELLTMWFGESEANVREIFDKARQSAPCVLFFDELDSIATQRGSSVGDAGGAADRVLNQLLTEMDGMNAKKTVFIIGATNRPDIIDPALLRPGRLDQLIYIPLPDDQSRLQIFKACLRKSPVAKDVDLNALAKYTQGFSGADITEICQRACKYAIRENIEKDIEMEKRRKDNPEAMEEDEVDDIAEIKAAHFEESMKYARRSVSDADIRKYQAFAQTLQQSRGFGTEFRFADQPASGAGAAADPFASAAAAADDDDLYS

SEQ ID NO: 7074 - protein, 193 aa, Oryza sativa
  Clone ID: PAT_MRT4530_95069C.1.pep
MSLSTIARRLCCSRPTSGGRLSAVWAHLYSTEAAKDTGAKKYKYPEVYDPYGPMSPPSQKVVDLADRIAALPPEEIKQIAPALLLRLNQPPPQAISGQGFSFSPQGGGGAAGAAKAEEKKAEKTVFDVKLEKFDAAAKIKIIKEIRTFTDLGLKEAKELVEKAPVILKQSLTKEEAEAIIEKIKVAGGVAVME

SEQ ID NO: 7075 - protein, 1001 aa, Oryza sativa
  unsure (1)..(1001): unsure at all Xaa locations
  Clone ID: PAT_MRT4530_95078C.1.pep
RAAAGATGPRPAPGYTAAXAVIEKKEDGPGCRCGHTLTXVPAVGEEGTPGYIXPRLILFWGATALEGNCYTPPSSGGSAGIRLAGATADVHCYDVLRGSWSALVWRASPHLLALKVAYPLRVHLVRGCHQADGGIGPAGLSAEDLHVLDLTQQRPRWHRVVVQGPGPGSRYGHVMALVGQRFLLTIGGNDGKRPLADVWALDTAAKPYVLRKLEPEGEGAPPCMYATGSARCDGLLLLFGGRDANSVVFVNARLHVLGGPLGGGRMVEDSSNVAVLDPAAGVXCDTKSVITTPRTGRDSADAAGGGASVELTRRCRHAAAAVGDMIYVYGGLRGGVLLDDLLVAEDLAAAETTNAATEAAALAXAVIDNPEXPVRYAYNDEQTRXTATITSPDGAVVLGNPVAAPVNGDMYTDISPENAVIQGQRRMSKGVDYLVEASAAVAEAISDTXAAVIAQQVNGEAEHSPDRVKSMVATANVKQNAILIDPDYLLSNKLPRGGRLHHRAVVVAAETGGALGGMVRQLSIDQFENEGRRVSYGTPENATAARKLLDRQMSINSVPKXYVVRRQHSLETITLLLALKVEYPLNVHLIRGNHEAADINALFGFRIECIERMGERDGIWTWHRMNRLFNWLPLAALIEKKIICMHGGIGRSINHVEQIENLQRPITMEAGSVVLMDLLWSDPTENDSVEGLRPNARGPGLVTFGPDRVMEFCNNNDLQLIVRAHECVMDGFERFAQGTANNAGAILVLGRDLVVVPKLIHPLPPAITSPETSPEHHLEDTWMQILGFFCAGVVLNQFGLIRNLTDVKLLSEWGILFLLFEMGLELSLSRLKALARYAFGMGLPQVLLSTLAFTAFELPPNGAIGTKILQFLFDSRPDLVNIRSVDEAIVIGAALSLSSSAFVLQLLAEKGELPTRFGSATLGILLLQDIAVVPLLVILPVLESQNVVEQSVWPMLLAESLKALGGLGLLFASRLDWLKRIVLLYAVFFPLVFFFPFFLGS

SEQ ID NO: 7076 - protein, 292 aa, Oryza sativa
  Clone ID: PAT_MRT4530_95103C.1.pep
MEQYEKVEKIGEGTYGVVYKGKHRHTNETIALKKIRLEQEDEGVPSTAIREISLLKEMQHRNIVRLQDVVHKEKCIYLVFEYLDLDLKKHMDSSPDFKNHRIVKSFLYQILRGIAYCHSHRVLHRDLKPQNLLIDRRTNSLKLADFGLARAFGIPVRTFTHEVVTLWYRAPEILLGARHYSTPVDMWSVGCIFAEMVNQKPLFPGDSEIDELFKIFSIMGTPNEETWPGVASLPDYISTFPKWPSVDLATVVPTLDSSGLDLLSKMLRLDPSKRINARAALEHEYFKDLEVA

SEQ ID NO: 7077 - protein, 80 aa, Oryza sativa
  unsure (1)..(80): unsure at all Xaa locations
  Clone ID: PAT_MRT4530_95268C.1.pep
NSGGTPHYSSSLSYDDXSASSLMWDDSFSSTPRLLDLLFLFHGRVGAQVXVILTDLVNAGGERPWDQDRLKPLSHEVPXL

SEQ ID NO: 7078 - protein, 356 aa, Oryza sativa
  Clone ID: PAT_MRT4530_95963C.1.pep
MGVTGEKFQLGTVGALSLSVVSSVSIVICNKALMSSLGFNFATTLTSWHLLVTFCSLHVALCMKLFEHKPFDARTVMGFGVLNGISIGLLNLSLGFNSVGFYQMTKLAIIPCTVILETLFFRKKFSRNIQLSLSVLLFGVGVATVTDLQLNAVGSVLSLLAIITTCIAQIMTNTIQKKFKVSSTQLLYQSCPYQALTLFIVGPFLDGFLTNQNVFAFDYTSQVVFFIVLSCLISVSVNFSTFLVIGKTSPVTYQVLGHLKTCLVLAFGYVLLHDPFSWRNILGILIAVIGMVSYSYFCTKEAPPKPTEASPQLNQVKESESDPLISDSLSTAENGGNAGDDEALKVPMWSSKYSKA

SEQ ID NO: 7079 - protein, 930 aa, Oryza sativa
  unsure (1)..(930): unsure at all Xaa locations
  Clone ID: PAT_MRT4530_96163C.1.pep
MPLSARGWVCVMDAFSFMASQPPAAVEARLADLCKELGVDEGVAGEAAAVLEEGKGALLASPSFGSKSPEDAEKLCFAFVLYCVSKLKETKAGSSGVRLWEILKGCKLKYDDFFKESQRLASRIDQVLGSRYGSDWEARLELKQLENLVNLLADASRFYCKAFNELFLSPSTDQEPGSTTNIPDYIRFGWLLFLILRSKSPELFKDLVSCIHGLVAILAILLIHVPANXPMPSLDGIVARQSIHPDXLATYSLIKKVLMLAQMASCYPSXSPKRLCTESRNSLVEHNSQTPPPKQSQTGLSILKAKYHPLQATFASPTVSNPVSGNEKCAVVGVQIFFSKILKLAAIRIRNLCERLRHEELTVSVYNIFKQILDQQTALFFNRHVDQIILCCLYGVAMGSQLSLTXADAFDIPWAEARKMEASKLYYRVLEAICRAESQNNNVNNLTPLLSNERFHRCLIACSAELVLATHKTVIMMFPAVLESTGLTAFDLSKIIENFVRHEETLPRELKRHLNSLEEQLLESMSWEKGSSLYNSLVVARPSLSTEINSLGLLAEPMPSLDGIVARQSIHPDGLPPTPSKRWPSAGPDGNCYPQSPKRLCTESRNSLVERNSQTPPPKQSQTGLSILKAKYHPLQATFASPTVSNPVSGNEKCAVVGVQIFFSKILKLAAIRIRNLCERLRHEELTVSVYNIFKQILDQQTALFFNRHVDQIILCCLYGVAKVSQLSLTFKEIVNNYKREPQCKPEVFRSIFVGSTNRNGGFGSRHVDIIVFYNQVFVPTVKPLLVALMPSSTRPEDKRNTNSQIPGSPKSSPFSNLPDMSPKKVSSSHNVYVSPLRQTKMDALLSPSSRSFYACIGESTQAFQSPSKDLAAINSRLNYPTRRINTRINFDMVSDSVVAGSLGQPNGGSASSDPAAAFSPLSKKSKTDS

SEQ ID NO: 7080 - protein, 576 aa, Oryza sativa
  unsure (1)..(576): unsure at all Xaa locations
  Clone ID: PAT_MRT4530_96281C.1.pep
DFFSEYGDANRYKIQEVIGKGSYRCXICSAIDQHTGDKVAIKKIHNIFEHLSDAARILREIKLLRLLRHPDILEIKHXIMLPPSRRDFKDIYVVFELMDTDLHQVIKANDDLTKEHYQFFLYLVLRALKYIHTANVYHRDLKPKNILANANCKLKICDFGLARVAFNDTPTTVFWTDYVATRWYRAPELCGSFFTKYSPAIDIWSIGCIFAEILTGKPLFPGKNVVHQLDLMTDLLGTPSMDTVTRIRNEKARRYLSSMRKKQPVPFSERFPKADPAALKLLQRLLAFDPKDRPTAEEALADPYFKGLAKAEREPSCQPITKMEFEFERRKVTKEDVKELIFREILEYHPQLLKDYMNGTEKTNFLYPSALDNFRRQFANLEENGGKNGDAVPSDRKHVSLPRTTTVHSAPIPPKDHQNITSQVPQRIPGRTGRGACPVIPFENLSAMGPYNQRRVVRNPVLPPATTNLSAYAYHRKSDSSERELQQELEKDRMRYQPSEHFMDAKVVSHMSHDLRASSYYVSKAKSDVADRAALQSNMMQGIGPFNGIAAVGGLSELTAPLTTEMYLVNGYRLTA

SEQ ID NO: 7081 - protein, 98 aa, Oryza sativa
  Clone ID: PAT_MRT4530_96382C.1.pep
KSMTDIADKNNKWASYAGPGGWNDPDMLEVGNGGMTFAEYRAHFSIWALMKAPLLIGCDVRNMTKETMEILSNKEVIQVNQDPLGVQGRRILGQGKNG

SEQ ID NO: 7082 - protein, 417 aa, Oryza sativa
  Clone ID: PAT_MRT4530_9638C.1.pep
MAIGHHHPRGAQAQRTRAPPRLVCFGPPLAPPAEALTLRLLILLLLLRQEQNQTCHEGFDNLGVRDEMIFSVSLFGSSHQSIHKLYRKCWSSNSHSTLNVLSLAKTVGQSMRMKRIRVKPHATDLKNRPQAHEDNVFYKLVYRLPENLSWLLASPEMARRPPSKKKLKKEEMVSSNQFGVILEWEGVVVEDDDPDLEPRVWYVLSLEEAKSFPPDAVLKEIEGMRTDQAILEVLHWSEDPQEVQRLAARKEVIYKTLRGRFYQLRPGVLDFLNTLVDFDIPIAITTPRPRLSLEEGIKAVGLQGYFDAIVAAEDFCRGKPEGEMFEVTAGQLGLEPDVCLVLGNSNSTIESAHTAGMRCVAVASRYPAYELQAANHVVRWLDQLSVADLQRIANGEILGLRGRRSDMDMDMEIVIEE

SEQ ID NO: 7083 - protein, 446 aa, Oryza sativa
  Clone ID: PAT_MRT4530_96586C.1.pep
MAPPSAMNTSRAEEKAIDDWLPITSSRNAKWWYSAFHNVTAMVGAGVLSLPFAMSELGWGPGVAAMIMSWVITLYTLWQMVEMHECVPGRRFDRYHELGQHAFGDKLGLWIVVPQQLVVEVGVCIVYMVTGGKSLKKFHDLVAPPSAPPIRTSYFIVIFGCLHLVLSQLPNFNSISGVSLAAAVMSLSYSTIAWAASLHHHNHNNGAAAGGVDYSLTAATPAGRTFNFLSALGDVAFAYAGHNVVLEIQATIPSTPERPSKGPMWRGVVLAYGVVAVCYLPVAFAGYYVFGNAVDDNVLITLERPAWLIAAANMFVVVHVVGSYQIYAMPVFDMLETFLVKKLRFKPGMPLRLIARSLYVLFTMFVAIAVPFFGGLLGFFGGFAFAPTTYFLPCIMWLSIMKPKRFGLSWCINWFCIIIGVLLSVFAPIGGLRSIIVNAQSYKFFS

SEQ ID NO: 7084 - protein, 447 aa, Oryza sativa
  Clone ID: PAT_MRT4530_96587C.1.pep
MGTQVADNYPPAKDGRSAQEKAIDDWLPITSSRNAKWWYSAFHNVTAMVGAGVLSLPYAMSELGWGPGIAVLILSWIITLYTLWQMVEMHEMVPGKRFDRYHELGQHAFGEKLGLWIVVPQQLVVEVGVNIVYMVTGGKSLKKFHDVLCEGHGCKNIKLTYFIMIFASVHFVLSQLPNFNSISGVSLAAAVMSLSYSTIAWGASVDKGKVADVDYHLRATTSTGKVFGFFSALGDVAFAYAGHNVVLEIQATIPSTPEKPSKKPMWKGVVVAYIIVALCYFPVALVGYWAFGNHVDDNILITLSRPKWLIALANMMVVIHVIGSYQIYAMPVFDMIETVLVKKLRFPPGLTLRLIARTLYVAFTMFIAITFPFFGGLLGFFGGFAFAPTTYFLPCIMWLAIYKPRRFSLSWFTNWICIILGVMLMILSPIGGLRQIIIDAKTYKFYS

SEQ ID NO: 7085 - protein, 191 aa, Oryza sativa
  unsure (1)..(191): unsure at all Xaa locations
  Clone ID: PAT_MRT4530_97109C.1.pep
MVVASGGGRNAWAKEMTIRRRITSIFNKTREHFPSLKDYNDYLEEVEDMTFNLIEGIDVEVIEAKIARYQQENAEQIYLSRAKRAEDLAAALKASRMNPGKAGANDXRLLEALRALVVAREFRKASMRLLLFPPRPTGMAPQPIGGSSVPLQGDDEETMRLRAESGARAGGWSIEMCKRRALQEAFSTIFV

SEQ ID NO: 7086 - protein, 671 aa, Oryza sativa
  Clone ID: PAT_MRT4530_9713C.1.pep
MAMALGRAAKSPAEQRRGAGARQRSIGEGFGVGQQTAAATRRGGGGEEDETVRGGGGGGGGDGGDEEVGWVRPPGGLAGEDKAAAWKGRAPAIVVSDAVEVDFPVIYVNAAFEAATGYRADEVLGRNWLSSGGKVYLLTRKTIRFLQFRDPRAQRRHPLVDPMVVSEIRRCLNEGIEFQGELLNFRKDGAPLYNRLRLIPMHGDDGFVTHVIGIQLFSEANIDLSNVSYPVYKQQSNHRPNIQEINPASHEHIPKIQSSEYCCILQLSDEVLAHNILSRLSPRDVASIGSVCTRMHELTKNDHLRKMVCQNAWGRDVTVRLEMSTKMLGWGRLARELTTLEAASWRKFTVGGRVEPSRCNFSACAVGNRLVLFGGEGVNMQPMDDTFVLNLESAKPEWRRVKVSASPPGRWGHTLSWLNGSWLVVFGGCGQQGLLNDVFVLDLDAKQPTWREVASEGPPLPRSWHSSCTLDGSKLVVSGGCTESGVLLSDTFLLDLTKEKPAWKEIPTSWSPPSRLGHTLSVFGKTKLFMFGGLAKSGSLRLRSCDAYTMDAGEDSPQWRQLATTGFPSIGPPPRLDHVAVSLPCGRIIIFGGSIAGLHSPSQLFLLDPAEEKPTWRILNVPGQPPKFAWGHSTCVVGGTRVLVLGGHTGEEWILNELHELCLASRPDEDE

SEQ ID NO: 7087 - protein, 417 aa, Oryza sativa
  Clone ID: PAT_MRT4530_97364C.1.pep
MMMNVPSAAAASSCDDFGYNATPPPPPSLLPIMDQDGGGGSIQRDHHHHHNHQQLGYNLEPSSLALLPPSNAAAAAAHHATIAHASPHDLLQFYPTSHYLAAAGGAGGGGNPYSHFTAAAAAGSTFQSYYQQPPQAAPEYYFPTLVSSAEENMASFAATQLGLNLGYRTYFPPRGGYTYGHHPPRCQAEGCKADLSSAKRYHRRHKVCEHHSKAPVVVTAGGLHQRFCQQCSRFHLLDEFDDAKKSCRKRLADHNRRRRKSKPSDGEHSGEKRRAQANKSAATKDKAGSSSKNAGIGDGFETQLLGGAHMSKDQDQAMDLGEVVKEAVDPKGKASMQQQQQQAHHGIHQQSHQQHGFPFPSSSGSCLFPQSQGAVSSTDTSNIAQVQEPSLAFHQQHHQHSNILQLGQAMFDLDFDH

SEQ ID NO: 7088 - protein, 114 aa, Oryza sativa
  Clone ID: PAT_MRT4530_97559C.1.pep
MPRATSDAKLLIQSLGKAYAATPTNLKIIDLYVVFAVATALIQVVYMGIVGSFPFNSFLSGVLSCIGTAVLAVCLRIQVNKDNKEFKDLPPERAFADFVLCNLVLHLVIMNFLG

SEQ ID NO: 7089 - protein, 103 aa, Oryza sativa
  unsure (1)..(103): unsure at all Xaa locations
  Clone ID: PAT_MRT4530_97655C.1.pep
VENAIMVKLPKRAVSYKNDKLAXDPLMLLFKTALLTSGLSSEDPNTFCTXIQRMLKLVLSIYQDXSTKADTDMPTMEDYPCESKMDEVDLTGWTHGCHSGHFS

SEQ ID NO: 7090 - protein, 118 aa, Oryza sativa
  unsure (1)..(118): unsure at all Xaa locations
  Clone ID: PAT_MRT4530_97805C.1.pep
MADDKHQDHLLHHKKDHXPATGVDSYGEGVYTWETVTTEVAAGGQDKYERYKKEEKQHKHXQDLGEADALADGASAHDEKHEANKDPVKAHRHMITEDIAATGAAGAGGYTLDEHHEK

SEQ ID NO: 7091 - protein, 475 aa, Oryza sativa
  Clone ID: PAT_MRT4530_97968C.1.pep
MVGSYAAGGGRGAAVAAVAEGKLDELRRRMGKADGDLLRIVGVGGGAWGSAFCALLQDAYGRHRDKAQVRVWRRPGRAVDRATAEHLFEVINSREDVLRRLIRRCAYLKYVEARLGDRTLYADEILRDGFCLNMVDTPLCPLKVVTNLQEAVWDADIVINGLPSTETREVFGEIGRYWKERIRPPVIISLAKGIEASIDPVPRIITPTQMISNATGVPLENILYLGGPNIASEIYNKEYANARICGADKWRKPLAKFLRQPHFIVWDNSDLITHEVMGGLKNIYAIGAGMVAALTNESATSKSVYFSLCTSEMIYITHLLAEDPEKLAGPLLADTYVTLLKGRNAWYGQKLAKGELTLEMGDSIKGKGTIQGVSAVHAFYELLSQSSLSVTHPEVKKLVAPVELCPILKTLYKILIKRLKFFAHFTCRELATDSILQAIRDESMYDPRERIEMSQRQCLYRPSLLGLPKVDITQA

SEQ ID NO: 7092 - protein, 302 aa, Oryza sativa
  Clone ID: PAT_MRT4530_98306C.1.pep
MGAMDVQLESTAVQHGQAKINVEEHALVSLLSDEKYATEKTEDVDPDDYEKLEEGIMQYGCAHYRRRCRIRAPCCNEIFDCRHCHNETKNSIKIDAVKRHELPRHEVQQVICSLCGTEQEVRQVCISCGVCMGKYFCEVCKLFDDDVSKQQYHCNGCGICRIGGKENFFHCSKCGCCYSIVLKNSHACVEGAMHHDCPICFEYLFESTNDVSVLPCGHTIHVKCLREMEEHCQFACPLCSKSVCDMSKAWERLDEELATISDTCDNKMVRILCNDCGATSEVQFHLIAHKCQKCKSYNTRQI

SEQ ID NO: 7093 - protein, 231 aa, Oryza sativa
  Clone ID: PAT_MRT4530_98621C.1.pep
MALRCVASRKTLAAAALPLAAAAAARGVTTVALPDLPYDYGALEPAISGEIMRLHHQKHHATYVANYNKALEQLDAAVAKGDAPAIVHLQSAIKFNGGGHVNHSIFWNNLKPISEGGGEPPHAKLGWAIDEDFGSFEALVKKMSAEGAALQGSGWVWLALDKEAKKLSVETTANQDPLVTKGANLVPLLGIDVWEHAYYLQYKNVRPDYLSNIWKVMNWKYAGEVYENATA

SEQ ID NO: 7094 - protein, 779 aa, Oryza sativa
  Clone ID: PAT_MRT4530_98682C.1.pep
MAGIAALANRQSVLPFSYASPLLMLSTGSSLFVEEHKQTFLTSPNADFSCGFYEVGGNAFSFSIWFTNSKNRTVVWSANPKSPVNGHGSKVTLNHEGNLVLADVNGTANWDSKTSSGKGTTAVLLDTGNLVIRDSTGTKLWQSFWAPTDTLLPLQPLTKGTRLVSGYFNLYFDNDNVLRLMYDGPEISSIYWPSPDYSVFDIGRTSYNGSRNAILDTEGHFLSSDKLDIKAADWGAGINRRLTLDYDGNLRMYSLNASDGSWKVSWQAIAKLCDVHGLCGENGICEFLPSFKCSCPPGYEMRDPTNWSRGCRPLFSKNCSKIEEYEFFKLAQTDFYGFDLIINQSISLKECKKTCLDICSCSAVTYKTGSGTCYIKYVLFNGYSSTNFPGDNYIKLPKNMVSKQSDLSCNPTKEIVLGSSSMYGMNDANKNYATYYVFAAVLGALVLIFTGTSWWFLYSKHNIPMSMEAGYRMVTSQFRMFTYRELREATGKFKEEIGRGASGIVYRGVLEDKRVIAVKRLMNISHGEEEFWAEMSIIGRINHMNLVRMWGFCSEGQQKLLVYEYVDNESLDKYLFGDVSAERLLAWSQRFKIALGTARGLAYLHHECLEWVVHCDVKPENILLTRDFEVKIADFGLAKLSKRDSTSLNFTHMRGTMGYMAPEWALNSPINAKVDVYSYGVVLLEIVTGSRISSGIKVDGREVELRDFVQVMKHILATGDVKDVIDTRLNGHFNSEQAKVMVEVAISCLEERNSRPTMDEIAKAFLACDDEDNHPAYSW

SEQ ID NO: 7095 - protein, 1846 aa, Oryza sativa
  Clone ID: PAT_MRT4530_98926C.1.pep
MAAPGGARRPDFSSAASPSPSPAGAAGRRLLRTQTVGNLGESIFDSEVVPSSLVEIAPILRVANEVEATNPRVAYLCRFYAFEKAHRLDPTSNGRGVRQFKTALLQRLERENDPTLKGRVHQSDAREMQRFYREYYKKYIQALQNAADKADRALLTKAYQTAAVLFEVLKAVNVSQSVEVDQAILDTHNKVEEKKKLYVPYNILPLDPESTYQPIMQYPEIQAAVNALRNIRGLPWPKEHEKKPDEKKTGKDLLDWLQAMFGFQKDNVSNQREHLILLLANVHIRQSPKTEQQAKLDDRALDAVMKKLFKNYKKWCKYLGRKSSLWLPTIQQEVQQRKLLYMGLYLLIWGEAANLRFMPECLCYIYHHIMEALLNSINYIEMAFELYGMLAGNVSPMTGENVKPAYGGDEEAFLMKVVTPIYKVIEKEAERSKTIKSKHSHWRNYDDLNEYFWSVDCFRLGWPMRADADFFKTPEDAYPSRLNGIIGMDYISSLVLQCNAKKKKYLLGVLILWVPISRLVANAGEQIRRRFLESSNVKVITFIMWWSQPRLFVGRGMHEGAFSLFKYTMFWVLLLAMKLTIKPLVQPTKDIMKEPIRDFQWHEFFPRANNNIGVVIALWAPIILVYFMDTQIWYALFSTLIGGIYGAYRRLGEIRTLGMLRSRFESLPEAFNEHLIPSDSHKSKGLRAAFTGKPSKTSGDEQEKEKIAARFAQMWNLIITSFREEDLIDNREMDLLLVPYCKDRELNIFQWPPFLLASKIPIALDMAADSGGKDRDLKKRMGSDPYFSYAIRECYGSFKNIINTLVFGQREKIVIQQIFTIVDEHIEGGSLIKDLNMRSLPALSKKFIELLELLQKNKEEDLGQVVILFQDMLEVVTRDIMDEQDQLGGLLDSVHGGNRKHEGMTSLDQQDQLFTKAIRFPVEESNAWTEKIKRLHLLLTVKESAMDVPTNLDARRRISFFANSLFMEMPNAPKVRHMLPFSVLTPYYKEDVLFSSHNLEEPNEDGVSILFYLQKIYPDEWKNFLDRVDRKSEEELREDETLEEELRLWASYRGQTLTRTVRGMMYYRKALELQAFLDMAKDDDLMEGYRATELMSEDSQLMTQCKAIADMKFTYVVSCQQYGIQKRSGEAFGAHMIVLSATVQSSVFLYPSLRVAYIDEVEAPSQDRNKKTDKVYYSALVKASVTKPNEPGQSLDQVIYKIKLPGNAILGEGKPENQNHAIIFTRGECLQTIDMNQEHYMEEALKMRNLLDEFLKKHDGVRYPSILGVREHIFTGSVSSLAWFMSNQETSFVTIGQRVLANPLRVRFHYGHPDIFDRLFHLTRGGVSKASKIINLSEDIFAGFNSTLREGNVTHHEYMQVGKGRDVGLNQIALFEAKIANGNGEQTLSRDIYRLGHRFDFFRMLSCYYTTIGFYFSTMITVWTVYVFLYGRLYLVLSGLDQALATGKKFVHNAPLQVALASESFVQLGFLMALPMMMEIGLERGFRTALSDFVLMQLQLASVFFTFSLGTKTHYYGRTLLHGGAEYRATGRGFVVFHAKFADNYRLYSRSHFVKGIELMILLVVYEIFGQSYRGAITYIFITVSMWFMVGTWLFAPFLFNPSGFEWQKIVDDWTDWNKWISNRGGIGVAPTKSWESWWEKEQEPLRYSGKRGTILEILLALRFFVYQYGLVYHLNITKHTRSVLVYCFSWVVIFVILLVMKTVSVGRRRFSAEFQLVFRLIKGLIFITFVAIVVILIAIPHMTVLDIFVCILAFMPTGWGLLLIAQAIKPAVQAIGLWGSIKALARGYEILMGLLLFTPIAFLAWFPFVSEFQTRMLFNQAFSRGLQISRILGGHKKDRATRNKE

SEQ ID NO: 7096 - protein, 44 aa, Oryza sativa
  unsure (1)..(44): unsure at all Xaa locations
  Clone ID: PAT_MRT4530_99003C.1.pep
QNLVASGVDGLRAGMGSGLIGTTQEVXAVGRGQATAVHKVASYA

SEQ ID NO: 7097 - protein, 96 aa, Oryza sativa
  Clone ID: PAT_MRT4530_99181C.1.pep
MAFNLEGPENERSLSLSFLCAMEEGRLMDIIGHHIQTDENAGVLEEVANLASRCLEMIGNNRPSMRDVADKFGRLRKVMQHPWAQHDPEEMVQHSK

SEQ ID NO: 7098 - protein, 97 aa, Oryza sativa
  Clone ID: PAT_MRT4530_99963C.1.pep
QGVRQKLCIRRSKNKKFVALKGLPTVRCPFRPVYCEIVINGRSYKVFKVADWLQALTAFALLDLLNTDFQHGGPVYSFWRNHGQSCFLCEIVIRSQF
